United States Patent Application Publication US 2008/0050393 A1 - sequence listing, part 14

SEQ ID NO: 53459 - DNA, 77 bp, Homo sapiens
cctcaagactcagtacatgagtcacctccccatagacgcttcccctgaccctctgtgttggtctgctctggctctca

SEQ ID NO: 53460 - DNA, 166 bp, Homo sapiens
ctcaaagacctcaggccacctgtggtcattagtatgtggcagcaagattgaacctgcctgcctcctacctgtgtgagcctgtggtgtgggtgtggtaccaaggccctggctctgggcagactgttggctcctggtgttcactaaggcgtgaggtgacaggccatct

SEQ ID NO: 53461 - DNA, 1014 bp, Homo sapiens
tctttccaactgcagttaagatcaaaccaccaagacctcaccaggctcccatctacttttcagcctcaactcagtccacctgctctgccaatcacacctgtttctttttgttgttctttccctaggatatagatcctggcatacctgcattctgattcttcttggaacaagccaaattctttcccctgtcagtacgtttgcatgtgtagtacatgttgcatcccagggcctgtctgccttcttaccctattttattttcatcataggcactttacttaccatctgaaatgatcttcatttatggtttgtctcctcagtgattaacacagttcctgcacacagtaaatcagtagttctcaacaggaagtgaagaggtcatcctgaggggaacatttagcaatacctagagacatttctggttgtcataaccaggggaatgctcctagtggatagaagtcagggaggctgttaaacccattccacaatgcacaggactggaacaaagaatgatctctcactcagaatgtcagtgttgccaaggtggagacatcctgcagtagatgcttgtggcagagggtactggttgtcccccagtatccattctttcattcacctgtgttaatacatgctccagttttgtatttttttttataaacagctgtcaagcataaagataacattttccatctccttgtatgtaagtggaaataggactgtcatgtggggccagtttcttttttttcttcctctgtcctgctgcttgaaacatatgctgctatcttagatcatgaggtcgaggccatgcaaagtggagcaacaaggagctgtgtccctgacgccataagcaccacacctgtcctgaattgctgtgaatgacaccagctaactacaatgcattgtctcaacatcctagacataataaaaagccataaatatgtttgtcctatgcagcacaaaacctttgtatctttgccttttatgttgggatcttaattaaaaattacatcctctaaa

SEQ ID NO: 53462 - DNA, 422 bp, Homo sapiens
caaatgttgccaggagtgcaatgatgaaggactctccattctatcaacactatgacctagatttgaaggacaaacccctgggagaaggtagtttttcaatttgtcgaaagtgtgtgcataaaaaaagtaaccaagcttttgcagtcaaaataatcagcaaaaggatggaagccaatactcaaaaggaaataacagctctgaaactctgtgaaggacaccccaatattgtgaagttgcatgaagtttttcatgatcagcttcacacgtttctagtgatggaacttctgaatggaggagaactgtttgagcgcattaagaaaaagaagcacttcagtgagacggaagccagctacatcatgaggaagcttgtttcagctgtaagccacatgcatgatgttggagtggtgcacagggatctgaaa

SEQ ID NO: 53463 - DNA, 677 bp, Homo sapiens
ctaatcaaatctctttaatgtttaagcctatttgtatctgatattttgttacttgcagccaaaagcagcctagctgatacacaatcgtccccctgccccctggtcacccttacagctcagagatgaactctagagaaatgcaaagccccagttgggagccagccggagactctccttggtctttagcttgggaaaataggacttgtgggggtgggggcagcatcagatggatcacagactccaagcaaaggcatgataggagtttatttacagacaagacacagcaaccagcacccactcaggctctgaccaggggaggtggtagacaagaccccagatatatataaatatacatataggtcccagcaccatcagcaccagaacgttccccagccaggtccctgccagaaggaccaagagtcaggcaggattgaggacatagaaaggagagggccccagtctttgccaggtatcagtgatcacctgttatggtccccatgtcagaggaagaaactatccttggccttgaagtgtggacactgaggagcatgaggacggagagaccctctggaggcgcccccattcctgtgtccagcctgtgccctcaatgccaaggccacagaagcgaagtgccagcaggagcagcttggggaatggagacactgcaggcccctcca

SEQ ID NO: 53464 - DNA, 285 bp, Homo sapiens
ggacaacgaaggcagtgacacggaggtctgtggtccaaacagtccttctaaacggggaaacagcacaggaataaagttagtgagaaaagagggtggtctggatgacagtgttttcattgcagttaaagaaattggtcgtgatctgtacaggggcttgcctacagaggaaaggatccagaaactagagttcatgttggataagctacagaatgaaattgatcaggagttggaacacaataattcccttgttagagaagaaaaagagacaactgatacaaggaaaaa

SEQ ID NO: 53465 - DNA, 456 bp, Homo sapiens
  misc_feature (1)...(456): n = a,t,c or g
cctgggcgggccctgcgtcaggttgcagtttcacttttagctctgggcacctccagctcctgctcgccggacgntcccagggagagcagacgcgccagacggccaccctcggggcgccgacggtcacggagcatggggtcggcctttgagcgggtagtccggagagtggtccaggagctggaccatggtggggagttcatccctgtgaccagcctgcagagctccactggcttccagccctactgcctggtggttaggaagccctcaagctcatggttctggaaaccccgttataagtgtgtcaacctgtctatcaaggacatcctggagccggatgccgcggaaccagacgtgcagcgtggcaggagcttccacttcttacgatgccatggatgggcagattacaggggcagcgtgggagttggcagccccagggacagggcaaagatcgcaggc

SEQ ID NO: 53466 - DNA, 719 bp, Homo sapiens
tttttttggatttacattttattcaaaggataaatacaaaattaagaaagagttcaaattcaaagtaaatatgcttgatatttcaaaacaattctacatacaaagtacaataggaaaaaaccaaaagcccccataaattagagtggctagacacattcaagtctagcagaaagaaacttgaaatttaatgcaacgttatttctcttgcctagaagctaaagccttaattgtctcagatatcttccatctccttatgggcattacttgaagataacaatggagcaagctttttaatgaacttgccatagtgaaaaaccaatgacagatgcgacactggaaagaggacaacaatgtaacctaaaagggagctactggcagaaataaaaactagtgatactgataacatctagacctttgcagacgtttagagtactgtacaatcttaaattattgtttatcaacctttgggtctcacagattaagaatgtactagttaagaaccaaggagttatacccagttcacaatactgtttccttcacttgccctttagatataatggatctggaattctcaatgagtgttacatggtttgggaattctggcaattttccttccaagacctccctatacttatctccatttcaaaatatacaaagctgagtgacagaggcaaaaattaattcctaaagatccaaagggtatacaatacctgtcaaat

SEQ ID NO: 53467 - DNA, 666 bp, Homo sapiens
ttttttaattaggaattcccgtaagtataaagccattttaagatgtacattttagagactagctattgttaagtggtctgttacatttgtgtaaaccataaagatctttccagaggaagcaagtctctcataccagaatttgaaaccactagccccaggcttgagtaacctagatcacatgaagctgacttcctctgaggagtctaggacctcagatataggtgggagcacacaatcacccttctggaaacagctaagacttgtggctcaggcgtttgaccttgctgacaaaggaagaggtcagggttgacgagagctccaggaagaatgaaagtgcctctggaaggcaggaagaaagttactgtaatactttatccttagggtggaacaagagtctgggaaagctctgccctataaagtccccttccccattcctcccaggtcccaggtgtggtggtataaggagagttggcccaatctgggagctgagggatctgagacatccatctactgcatcagtgcactcagaagtgaggattttggcacagttattcatgagacatcagcccatcatataaaacatgcctccagtttggttaaactaggaagcactatataatattttaaaatcagttacatgtcactgataaaagacttagtattaca

SEQ ID NO: 53468 - DNA, 443 bp, Homo sapiens
gtgctacaggacataggtgttccttcaggccattgctacaagccctttcaccaccttcaccttccagcctgtgagtgcaggcttcccaagactccctgctggggctgtggtgggcatccctgccagtttcttgggagacctagtgatcaacactaaccatcccgtggtcatacatgggcatacagtggactggcggagcccagcaggcgcccggctgagagcttccctgaccttgtcccgtgaagcccagaagttcgccttggccagggaagtggtgtacctggaaagcagtaccactgccgtgcacgccctgctggccccagcttgcctggcagggacctgggcactgggcgtgggtgccaagtacaccctggggctccatgcaggccccatgaatttacgggctgccttcagcttggtggcagcaagtggcaggctttgtg

SEQ ID NO: 53469 - DNA, 757 bp, Homo sapiens
tttaacatgaaaaaacacattttattgcacttaagttataagaaaataaaatttctaagtgaatcaaaccatagacacaatccctttaaaggttgttttcctccatcatgtcaggttgttacataactaaaattaaccaacttgaatctgattgttttaaatcagactataaataaaacaaacaaaaaaataaacagaaggaggaaaaaagatcgcctaggatacagtgttaaaccactttcacagttcagcttgagttgtggctcttggagaatgaggcaaaccatttgactgtttcattcattttgtttgtttgcatgtgacgcctttactacaaaaactgaatagtttctgctttgtcagttactcagagcaataaaactgtaacagttgttttcccaaatactgtaaaacactaagactgaccagcaactttattttaattttgtgttttatatatttttaaaatattttgtcagttttacgatgtacggttcatccattcaccacagccctcaaaaagaaaagtttctccacagaacaggcaagtaatagctctgttccaaggaatgtgttttaatttttgcccagataaaagaaaataagctttgcacacactctcaattctttacttgcaggcaaacttcactctttattatctgaaactcttccattctcagcctcttagaggcacagatggctcaagtttcagtggcaaaaagtcttttttccataaccaaactagagcaaatttgga

SEQ ID NO: 53470 - DNA, 365 bp, Homo sapiens
  misc_feature (1)...(365): n = a,t,c or g
taaacataataaaaatatttttgttctaatttgctttcatgaatgaagattattgacatcgttggtaaattctagaattttgattttgttttttaatttgaagaaaatctttgctattattattttttccaagtggtctggcattttaagaattagtgctaataacgtaacttctaaatttgtcataattgggcatgtttaatagcatatcaaaaaacattttaagcctgtgggattcataggacaaagccaatgaggaaacattaggtaaaatattaaatgggatattccnggatgccatttagggnaggcncctccaattggtncctcttgncataggttccaggggattgtttttcccggaa

SEQ ID NO: 53471 - DNA, 397 bp, Homo sapiens
aaagcatacatctctctctcgagccttataaatcataaaagtgtacaccctggggagaagccctttaagtgtgacgagtgtgagaaggccttcatcacataccgaacccttacaaaccacaaaaaagttcatcttggggagaagccctacaaatgtgatgtgtgtgagaaatcttttaattacacatcgctcctttctcagcacagaagggtccacactagagagaaaccctatgaatgtgacaggtgtgagaaggtcttcagaaacaactcaagccttaaagttcataaaagaatccatactgggggagaggccctatggatgttgatgtgtgtgggaaaagcctacatctcacactcaagccttattaaccataagagtacccaccctggcaaga

SEQ ID NO: 53472 - DNA, 401 bp, Homo sapiens
cacaaaatatcttcacctaatgccagcaatgataatttaggagtgattggatttggagtatttttaaacctttcacctgtattcttttctacaatatttagttctttataataagcaattcgtatttttacagcaacagtgattgttcttaaagacaaatttaaaaagccaaagacgttggcctcggttatttccctcttcacaggggaagggagtggttattgggcacacacaagtcatcactgaggggtgcagcctgcctgttattaggcctgccagagtccagtgaaagttctaggcaggggcctttttaatatttgggattttacattgctgcccagcagcttaacgtttagttgtttccatcagtggttctcattcttctttcactccagcactgg

SEQ ID NO: 53473 - DNA, 361 bp, Homo sapiens
gttggaggcaatttgatcctatttaggaatgattgcttttatatttgctactggttatagaatcatgctgatttacttcatatctggaataaatatttaaggacaaattctgcatttctcaaacatattaaaagggatcacatggtcaaatacccaaagtttgggaaacacagactatatggtaagcatttgcaaaaggtgtatatggaatgcaattaatgagataacaggaatttggcagtagaaacactagtgtgttaaaacatttacaggttttctctacaatccagtctaggagttaagaacatcttaatctcaattcacagtcccaactatatcacaaattgtatctccttttttt

SEQ ID NO: 53474 - DNA, 2442 bp, Homo sapiens
acctgctgatcctgaaattgcccggcatttacgccctggaactctcagagcaatctttggtaaaactaagatccagaatgctgttcactgtactgatctgccagaggatggcctattagaggttcaatacttcttcaagatcttggataattagtggtgtggaaagtaaagaagtcacaggttgggacatttagacaagagtgaatcacacacgaggaatgtgttcattcttttattgtccgttgttttaacctgactgaatacaagatcaacaagagcactgtactcctggcaattattacatatgttagaacatggattttgcactgtagacaacatttaacaccagtctatggggtactgcattgctttttataaagttcaaaataaagatttattttcaaacaagtgactttggtttatttcatacattacactttttcttgcagaaaaaaataaaattgtacaactgcataaatataaaattcttccaccatgaaaatggttaaaacattcataaagacacagcaccagcatgtgatgcctccagaaaggaaaaaaggaaagtaaaagaaaatgtataaagcaaattaattagccctgtcactagccaaagtgatgggcagatccagatctcagacacagctttagaacataccggaggacaaggcaagagatgtcaagacagcattcaatacaagcataacacaacccatcacctttttgtgtttttctgtagtgtcacttaaaatttaaagggcagttcccccatgacaaacccccaccccagcccccaggaaaaaaataaaaataaagacctaacaccacaggaaaagactatggagtatgttaaaaatgctcatcgatgggccattacctttgaaagagccaaaaaacaaaaaacaaaaaaaaaaaaaaaattaccatgccagttttattcccgttgaatatttacaccttggacagcaaaccttgctcacataaagtagaaaacagatacaataaaacatggcttgaaaaatgaccagagtatgcacctgtagtactgtacactaaataaaatacacaaggcagcaatacttaggggccagaaacactgcttactacaagtcagttacggaatcataatttacagtaaaaatgggcacgtcccaaggctcaatttttctttttcttttgtcatttacagtagaataaatattttgttgctattgctacactttaatttacattctaacctattaaatgcagaaagctagtgtaaagcatatagattaagtgtaggtcccatacgtatgacagtttgttcaagactagtaggtttttgtttttgtatctttttttaacttattaaatggctagtgggaaagatttgtgcttgtgatcagctcttaacttcaatttttacatcaaaacgtccctgaaaacggtctttctcactgtacccaatgttctcaccgtacgccttacactctatgcgaatttcagtgtccatggtaagattggtgaactgtacggccagcaggggctgcaggtatttgggctgcaggagtttgccatagtacgggataatactgcagaggaaaaccaggggagttgcccagtccaaaatactccacatttccaactttatccttatcttcatctcgcttgccagtgcactgaacgggaaggacatttgggttatacttcatcactgggtaagtctccaaggactcattcttgggaggcttaggtttgaagcctagaactcggttgagctttataataatgcacggtttgccctctttgtagccataagtttcatcatttaatccagagcaatttcccagccattcaagcttgaatctgcagacctttcgctctcctcgttcatgattaaagtctcctcgttctttcggtttcactgggcacatcgccacaatcttcaaaaatcatgtcatccctctgggctgaatctttgtacttttccaggaacctaactatgttcagtacatatgcctcatagctcttgggatcattaggacgaaaggaaatttcagtctttctggatctgaggaatctgtgttaatcctggcggggccactcggtcctgatatgtgggcttaaattcactgatggtgagcagcatcacttggatggttccgatgaagatgccagccaggcagccataaaatattacgtagaatagaaggatcttaaaccaactgccaccggtcctgcccagaaactccttcttctctgagttccagatgaatttcttccagctgccctcctccttggctttcccgcgggccatggcgatggcgggtcagcagctgccgcggtccggagggtgggtggctgcggcgcgcccctggcgtcctctgcgccgctcggcttctccggcctggctctctgcaggcaggacgcgctgcgctgcggctctcggagtgcgagacg

SEQ ID NO: 53475 - DNA, 729 bp, Homo sapiens
ttttttttttttcccatctctaaaaaaatttatttttttaaaaagaaagaaaggaaatatttgggccccctgtggcaaagtcaatttgacacacaaaattagacattgctatacccctatcaccctaaataaggcaccaatcttagatcctattagatccaatttagtttcgacttcagtaggagtgaaataagaaccaaaacagaaataaaacttcaggaaccctgtaaatgcctctatgaagagtgtaaggtgtatttcaaagcatagttccagtatcaaaaattgtcttgcattttctcatcagcaggtcagtttgagaaagcacgaacaaagttatagtagttaattttgccttctccatgagagcacatcctgattaactccttaaccaaggagtcatccactgggacgttaagcgattcacagattttaaagaacatgtctctgtccacatatcctgaagcttccttgtcataaatttgaaatgcctcacgaatgttgtctttgcatgagtgatctttcagttgcttctgaattgtgtctattaatgcttccaattcctgcacgcctggatccttttcagtttgcttgctttctgcttctggagcaggcgcttctcgctttcggacatggttctgaattgacgcgagtgcttctggtgaatactgggcagcgttgctctccatgtatttcaaaacatactcgtctgtatcaaggatgatgaac

SEQ ID NO: 53476 - DNA, 191 bp, Homo sapiens
ggcaaaggaaaattgacctcatgtgcaatatatacacagacacaatgtttttactcactcctgcttcctcccaaataatccgtcactgggctgggcttaaataattccctaatgcaaactgggaacttccttaaatggttaaatgctcaccagagagggaaagggatgaagttatttaaaaaaaaaaaaaa

SEQ ID NO: 53477 - DNA, 391 bp, Homo sapiens
tggaacatcaagagtgtgaagactgaagataacctgaggcctaccagacatcctatattcaccaagattcacattttttggtatgtgtgcctacattttagcaaaaattggttggttaatccttctaaaattagagggatgacattgggtaacaaagtcttcccagcctttgcagttatagtaatttctcgcaatagaaattccatacagatattattgccagtgaagagagctattcttgtttattatcagttctatatttttagctgaagcaacttagccctaaaaaaccccaaaatcaacttcttcctccaaattaaactctcccccaaatttaatggtttctgttttcttaaatgtttttctacttgacactgttatgtcagtctca

SEQ ID NO: 53478 - DNA, 658 bp, Homo sapiens
aaagtcgccgccctggccgccagcccggcctcgggtggcagtggactcgggctctgaactcaacagccgctcctccacgctctcctccagctccatgtccttgtcgcccaaactctgcgcggagaaagaggcggccaccagcgaactgcagagcatccagcggttggttagcggcttggaagccaagccggacaggtcccgcagcgcgtccccgtagacccgtcccagacacgtcttttcattccagtccagttcaggctgccgtgcactttgtcggatataaaataaaccacgggcccgccatggcgttagcccttccttttgcagttgcgtctgggaaggggccccggactccctcgagagaatgtgctagagacagcccctgtcttcttggcgtggtttatatgtccgggatctggatcagattctgggggctcagaaacgtcggttgcattgagctactgggggtaggagttccaacatttatgtccagagcaacttccagcaaggctggtctgggtctctgcccaccaggcggggaggtgttcaaagacatctccctcagtgcggatttatatatatatttttccttcactgtgtcaagtggaaacaaaaacaaaatctttcaaaaaaaaaatcgggacaagtgaacacatta

SEQ ID NO: 53479 - DNA, 327 bp, Homo sapiens
gcaaacaaacaaacacccacttagactgaaaccgtgctaaatactttataccttattattttatcttatttaatcttcattgtagttcggaaatatcttcattttacagctgaggaactagagattcagaaaggttaaatgacttgcccaagatcacagctaatgatggcactgggatttgattccatttctaacttcaaaccttctgtggttttcgttatacacctttctggtacctagctgttgcttatacctattatgccagataattatctctatcctttttttctagtattgtgccacacacacacacacacacacacacac

SEQ ID NO: 53480 - DNA, 1420 bp, Homo sapiens
ttttttttttttcattttttagagcatatgaagtaatattagaaacatttaatttgggaaactttgattcttgaaagagaaaacaaaagcatgtgaataaactttgaagtgttcacctcagtttgggaccaaactgcttggatctttgtaaaaaccggttttgtatgtcaaggaggagtttaaggcctttccgaccaccttgtgttccccttttctgcgcagcagtgtatcacgtggagttgctccttaccacacctcacgtgcccctgagccctatttcctgatttcttctgggctggacttccccgtttctccaccagcagctccagtatcccaaactttctagtcctgctgatcctcccagcaacggggtggaaacctggagggcagtgtctggtctgttttctaagaaacttatgaattctattatctttacaaatatgagaaaattttttcaatattttttattaatctttttataaaatgaaaagaaactcctatgatcgattaaggaaggtggttatggctgggtggttcaggggtttttttgggtttctttttttttttctttgtctttttaaccttcaccccaacacccagcccgtggccctgcaaggggaccctgccagctgggaaacccaaaggcctgtccaaacgtgcgcaccaggaccgaggggagctccctcccaacacctgctaggaattgccaacttttaaatggatggggttttttatgggttgaacctctgttaatacttttgtacactctcactacagtttatatttttataggctattttctcaaggtgtttctagattccacatatctattttatataacaagttattatgttatgtgtgtgactcccttgtgtgtatctgtgccagcctcagcctccgagttgcttttccctctggccctgactctcactgactcaccgatgtgatgtgcaggcccacttcttaccccagatagcctcgggcgctgcctgtagtcatgctgacagctgtacagtagccgccaagactgctgacagctggagacggttctggtttcaactacggtatattgatatcggaagtattctagacagatcctcggttgggttttctagctacatgtttgtattgcacagatccccacctgccatcctatagtgttgtcttcctgtgtgttccggggcttctgggcagctgggcctgcccggggaagtccttgcaggtgggaggccatacagagacccactgtgtgccactgagcgtcccactgctgctgggcaactggaggactgcagggggcgccaggtgactctctccttttatatcacagcagctcctgtgctgaccttcaagttacgttttggaactgtaatactaaaggaagaaataaactactaatttgtataataaaaaaaaaaaa

SEQ ID NO: 53481 - DNA, 489 bp, Homo sapiens
  misc_feature (1)...(489): n = a,t,c or g
tgttgttaagcctgtaggactggatgaatggggttgtgaaactnatttgacaaggggataatttacaaaaatcaaatgagtattgagaagccacagaaatatcaaaaatggtgacatcactattaggatgaaaattttatgaaattccaatgctccctttaaccatataattaaattacaaaggtatacataattaatctaataaaggatcatgaggaatgccaaaagctgaaattttagcaagtctggtgttttaaattcattataaactatttattaactaatgtaatgtcctcctctaagaccatattgtaagagtcttgttaaaatgatggattcaacttctgcctcggatgagaggttggaaatgtagctgcttttctttagaaaatatgtagctgtcatcatttggtactgcctaaaaagagttagactctattggcaattgatagagtattacccacggtgcttattattgtttatgagctt

SEQ ID NO: 53482 - DNA, 2529 bp, Homo sapiens
tttttttttagtacaacaaagctctcaaccagttttatttttcctcacaatgaacggaagaaaaaggcagaaataaatggtagggtcatttgctagtagaaaagaaagctgggattccccatttactttggaaactgaggagaaagaactgctttccccactcgtgtctgggcaaagggtgtgcccagatgttggcaaaggaaccagacaaaatcaacagccagcagttttctgttccaaacagttagctcctctacagtccagagggaagctattcctgagttcattcaaggtgacagcagaagtgtttctctctttctgcttggcccaactgtgcctgagggctgatggatccagaccttgtaaacattcagctaggtgtaacataaccagaaaggctgaaggaaggctcttggccttcccagcttgagaagtaggggcctcatgtgtatctggtggcctgcagagcccaaagcagagagctatgatgaataaaatatttttattgcttttctaaaataactcctttcatatacaaggattccttcagttaggtcctctattatcctaaatgctctctggtcatgagcaggtgaggttctatttagccaagataagtggctgcctcagagtttctcatagggaaaactgaaatctgattattttcttttcttcacatagtctctaggttgagaactccaagtagtaagaggcacaggataaggatgggagagactgagcatttttgagagaatactcctctgctgaatgccactttgaagggaaagaagtcgaatggccatttccagtccattttgggttggccccttggaggctgtggcttctgggtaatgtccacaaagttcacaagagttgtcaaagatacttctgtaacttgctgagaatcctgtatagactggcactggtataggaatcgaactcctgatacatgagcttgcgggttggacaggagacctacatatgcccacaatacctggatctccagggaaactggtatgagacagcaggaagtacagtttatagctgaaatgctgcagtgcctgttgaggatcctggtccaccctcctttctgggctgggtcagcattaccaaagatggcaacatactctggtctgggccttccatgaagagtctgataaatctcctgctgcaagtggctgcagtctgccttcttcaacctgagcttgcatccagatattgcattcactccaaactgcacttcatgtcttttaacagagcaacttccattaccctggctctgtaagagggtcattgagtaacttatatcatcagtcagagccaagagtggcttcccaactatatagccaggattcccacttctaggactggtgagagaagcagctgtgcctctgttgaaaagccctgaagcgaaggatgaagtgttgctgtaaggaagcgccctggctcaacagtcaggttggtttgtcccaaactgacagaaactttctggattccaaaagtcccattggtctctatctcataggtgacctgagaaactacattctgacaagtgtttccagccaacagaggagcattagcctgtgaggtaagtattacaggaacctggaactccatattctgtggatcagtcatgcttcttggaacctttaagactgtgaagttatagtaagaggcagcattgagggctgaatccaaggtacagctactagccaggttcttgaaaaaacgagtgcaagttgtacttttactctctaggaaacctgcaggattgctttcagcacagagtcccccagctcccaaactccctgcaggttgtctcagcaagcttattacagaccacttggggaaagtaagtaagaatggggtcccccacccctgtaaaaaagatggtggtgaattgaagtttggaatgttgaagtgaatgattcgccctcccaaactctgccagccagggccctggaagttggttgcattgaccttttgaagcttctggaaatagtttaagtttgagttgttcacatggacacaaaactgcctgattccattagaatccatgaaaactcttgaaggaaacggggaattactcctgaagataacagagttgtctacacaaacccagcttgaagaccttacgctgcctggaaggcagaaggagaaaactgtcctcggatggagaagatagcagtccctgtcgcagcagcaatttatatcgcaggctccaggagtcaagtcacagacacagatcggtaagactgggaagaggtccacagtcctattcccaggggccgagggagtcacgagagtagggaccactgtagggagtccaggcacggccgggcgagttgcagtcgcctctgaaggggactggagggttccgccatccgtccctcgctgcagctccaaagacgtgggcactgcccctgatggggaggaagagggctgaggccggacgccatcggggaacaccagaaagaacacttgcaggagcgcgagctgtggggtgcgcatggggcattcaggcctccg

SEQ ID NO: 53483 - DNA, 654 bp, Homo sapiens
  misc_feature (1)...(654): n = a,t,c or g
gaagcaaaacttctgacctgagacatcgaagcagataaaaagccgctacacaaaatgtatcgctacaactagagggcagtcttgcctttcttccattcaattattcagtttctcatgttcctaagtgccagcccagaaccatggaatgtgaagaaacacaaaactcactcctctgcatcagtgaattgattgtgtggtggggatgtaagtctgcatgtgactgacagttccccaaagtggtgccaagtcaatctaaactagagagaatttctggccaggccaagcagagatttcatggatgaagtctcccaaagactgatttcctaaacattaaacatcactggttttccaaaactggttttcttttttttttttaaccctgtttctcaggctggagggcannnnnnnnnnnnnnnnnnnnnnnnnnnnnnnnnnnnnnnnnnnnnnnnnnnnnnnnnnnnnnnnnnnnnnnnnnnnnnnnnnnnnnnnnnnnnnnnnnnnnnnnnnnnnnnnnnnnnnnnnnnnnnnnnnnnnnnnnnnnnnngctgtgttgctcaggctgggtcactcgatctgcccacctgggggcttcgcaggattgctgggggttacaggtattgagccaccangggccagcccactgggnttcctttt

SEQ ID NO: 53484 - DNA, 986 bp, Homo sapiens
ttccaaaccagtgacagcaaggaaatgctaaagaaagtaaggggctggatgaacacctaggctagagattctggtgaatataaactaatttcctagccactcagagaaataaatgtaggaagggttataaggtgtggtactaagctggaagaaacaacacatctttatatcttgcatgatttgttcaaacttaatgtaagccagcaggtttcctttgttgaggatttttcggttgatatgacaaggatacttctaagtgactgttagacagtggtattagttcccatacagagagtatgttggaataatcagtgcttgcatttgaatctgcgactctaccaggtgggatgaaagggcagctggaaattcaggcacaacggagggaagttctttttcagggtccttctgtttgtgtattgaaaaaaaaatctaaaacatttatatttagatgagtcttacagtctcaaaagcccatttttacaatagcagacaagtctctccgaacaacctgtccccccacaccctccgtgcacacaggtctgactcacctctggttccctgctattcttcagacaccagaagattccttcgcttctttgtgtcgcctctgcctaagaccccccattccttaggcacttacgggactcactcatagacctcctccagcgtggctgccctgagcaccctatgtggaatgactacgcctccagctcatccgccctcctgccctgtcctgttacatttccctctattgtccagatccgcttgtttctgcctttttaaaaaattattgttggttcacccccccgcctcccattagaatggaagatccatgaacgcagggtgattttgggggagggtctgttttgctcattgctatatcgctgtggtttttaatgaattcatgaccggtaaataaatgactgtaaaagccccatgcctaggaaaaaagatcagaaagaaataaaccaaaatgttaacgtgaa

SEQ ID NO: 53485 - DNA, 1538 bp, Homo sapiens
gaggataaagtaaaacactagaaagcacttttattttttcaaaacacaaatataaatgctatgtcatgatattgttaataattttacaggtacctcatcatgttacccattcagatatgtgcttaaggtaggtgttcctacaggatcttgggttggatgttccgtttgattttattttaaaaataataaatcacaaaactaaaacgtttgagcaaggtcacttaaccctctccccaggtggttagttattattaccatcatcatcctcctcaacatcattattacttttcagctacatgtttaaaagaggagatctttaatatgtcagcttaactgggaaaatgtgtcccctggcacaggtgggttttcagaagaaaaacccatcttcacaagagctttgtcctctgcttttattttaaagtgcggaccctgggtggggagggacggagcgggtgttccgggtctgtcactgaggaaccaattccctcagagaggccagagcagcatggatgcggacatgcaatctgttttcaaagtcgtagccagagaaatcctcctttgcttgaagaagtagagctctgcctcttcctacagtctctggtttgtctaatagaagacagccaagttcataacaggcatacggctgaacatataaattattctgacgacacaattcatctttaacagctcgctggaagtactgaacagcatcttctgagtttcctagacatttgtgtatggcaccaagaagcaaatactttaatccaacaacagatgagtcatccacttcatggcaagcttgactcatcctctgcaggttggggaaggaacagtttggaagagctttccacaagtacaacacttcaatagacgccaacacacagagcgctttggttggggtttgcttccgaaatcgctctgcctttttcaccgagaactgttcaatctgattgtttttccttttgaagagtttctgaacttctttaaagacaatctgtgccccatccacatcaccagtggctccctgacaaactgcagtcaagtaggcataatagcactgggaccacctggactcattttttagcctctcaaaggaatcaaatgcatccttgaaattgagctctatcatgctgcaccaaccaatttcatacagacagacatgttgaatttctctctggtctactgcaagttccaaagcagtgtggaaagatgtcaaggcactgttgatttgacactctagtcgttgtatccgtcccttgaaaaacataaagagggaagaatttggataagcagcttcttttttaaggagaatttccttagcttcatcccaggcctgccttgttatcactgccatccaaggcaaaaaacgggcggactacagtatgataccagagcagagctaatgtagctaaaggggccttcatgtccttactttcgcttgcatacatcagtgaagaaagcccctgtaggcggtctccaggaaaacccagcaggttgatgattttgagcaggtttgggggcaccatggatatgcaaag

SEQ ID NO: 53486 - DNA, 401 bp, Homo sapiens
gcggagtctagccttttgtaaacttcatattgcacactaggactataagccattgctagctcattttgaattttaacgtgtaatttttgttttattttctttctgtggggaaacaatgcttgatccaccaatgctctttttaatgttttataactatgtatgtgtatatatataaatatcaaataatatgtatgcacatatgtgtgtgtatatatctatatgtatatacatatatagatatatagagatatatagagaggttttgagacaaaaaaaatacagaacgtgaaacccgagctgaacagcgtgtgctctgattacttggaatctgggtctcctcggcacctggttattaagaactgaatatttttccacttgaatttagtgctattaaaaaatta

SEQ ID NO: 53487 - DNA, 260 bp, Homo sapiens
gacaatttcaatatatttactatctgttcttcattttattattatttagcttctgttaactcagtgttagctgaaacatcagaaagaaataaaacttatgagaagggtattagcaaatgtgtgaaaaagtcaagtactgtttatactccaaaaagtatttggagcttataattcctccaaaagtcatactgagggtcatagttggggatgcagcaccctgcacatcacatcaaactgttatgatggtcccataaccatcc

SEQ ID NO: 53488 - DNA, 61 bp, Homo sapiens
aaatggaaggagggagggaaggtggagacaaactacagctgaacaacaccctgtccatacg

SEQ ID NO: 53489 - DNA, 741 bp, Homo sapiens
ttttgccagttatacatttatagaaagataatcccctggctttaaatagtcatgtacatacaaatatgaacaaacttaaaaaaaaaatacaaacccttggatcacatgggggcttctgggaacccccgtattcttccccctcacccaagggcagtgggcatgaatctactttttaaaaatgattaattttggccatccttgcagaaaagagcctaaaattgggtgatttacccacaaagtgaaagtcgagggaaaattcagtttccagtctctgaactctatgcgataatctcctatcattagggctacatgctttcttgttctgtcttttaaatattatatcaggataaaggagagggctccctcctgaaatgggtcaagaaagaagatagacttgtagctttaaaagggtgggaaaaagtgtcatctgccctaaaagcaaatgacaagacaaaggcatacagaccccagggaaatacccagttcccacacctaaagggatacactgtccagcccaggtccaggccctaggttctttactctagctaccccctatttctttggtattgtcaaaagacaagattcaggccgggcacagtggcttatgcctgtaatccagcactttgggaggccaagacgggtggatcacctgagctcaggagttcgagaccagcctgggcaacatggtgaaaccccgtctctactaaaaatacaaaaaagaattagctgggccaggtgtgg

SEQ ID NO: 53490 - DNA, 1076 bp, Homo sapiens
gatttaaaagacagcgtgagactcgcgccctccggcacgaacaaggccaggcgacaggtgtcgttcgaaaagactgggcttgtccttgctggtgcatgcgtcgtcggcctctgggcagcaggtttacaaaggaggaaaacgacttcttctagatttttttttcagtttcttctataaatcaaaacatctcaaaatggagacctaaaatccttaaagggacttagtctaatctcgggaggtagttttgtgcatgggtaaacaaattaagtattaactggtgttttactatccaaagaatgctaattttataaacatgatcgagttatataaggtataccataatgagtttgattttgaatttgatttgtggaaataaaggaaaagtgattctagctggggcatattgttaaagcatttttttcagagttggccaggccagtctcctactggcacattctcccattatgtagaatagaaatagtacctgtgtttggggaaagattttaaaatgagtgacagttaatttggaacaaagagctaataatcaatccactgcaaattaaagaaacatgcagatgaaagttttgacacattaaaatacttctacagtgacaaagaaaaatcaagaacaaagctttttgatatgtgcaacaaatttagaggaagtaaaaagataaatgtgatgattggtcaagaaattatccagttatttacaaggccactgatattttaaacgtccaaaagtttgtttaaatgggctgttaccgctgagaatgatgaggatgagaatgatggttgaaggttacattttaggaaatgaagaaacttagaaaattaatataaagacagtgatgaatacaaagaagatttttataacaatgtgtaaaatttttggccagggaaaggaatattgaagttagatacaattacttacctttgagggaaataattgttggtaatgagatgtgatgtttctcctgccacctggaaacaaagcattgaagtctgcagttgaaaagcccaacgtctgtgagatccaggaaaccatgcttgcaaaccactggtaaaaaaaaaaa

SEQ ID NO: 53491 - DNA, 307 bp, Homo sapiens
gaatggacaaaattccaattattgtaaatgtaaaagaaaagacaacaaaaataagctagaaagatgaaagctaaaaattctatttgaactatgtaagatgatgacagatattaaacagtaattagtcatgaaacaatcatttaaatgcttttgccaggagaactgagaagttgagaccctcaaagagcatgcaagctagtagggaggctgcgactcatacctttgaatctttctgttctgcaaattctcaactcttaccaatttaactctgcagtactgctatggaaattacataagagtaaattgg

SEQ ID NO: 53492 - DNA, 4514 bp, Homo sapiens
  misc_feature (1)...(4514): n = a,t,c or g
aaattcaacaattttattaaatataaattgtctaaacaccaattaaaagacagatatttttagactggataaaaattatacccaactacatgcagtctgtaagaaacacattttaaatacaataatatagatatatttaaagtaacatgatggaaaaagatataccacaaaaacactaatcaaaagaaagnnnnnnnnnnnnnnnnnnnnnnnnnnnnnnnnnnnnnnnnnnnnnnnnnnnnnnnnnnnnnnnnnnnnnnnnnnnnnnnnnnnnnnnnnnnnnnnnnnnnnnnnnnnnnnnnnnnnnnnnnnnnnnnnnnnnnnnnnnnnnnnnnnnnnnnnnnnnnnnnnnnnnnnnnnnnnnnnnnnnnnnnnnnnnnnnnnnnnnnnnntnnnnnnnnnnnnnnnnnnnnnnnnnnnnnnnnnnnnnnnnnnnnnnnnnnnnnnnnnnnnnnnnnnnnnnnnnnnnnnnnnnnnnnnnnnnnnnnnnnnnnnaggaggaaggaaggaaggaaagagagagagagaaagaaaggaaggaagaaagaaaggaaggaagaaagaaaaggaagttgagtgcgtatgttatttttagacaaagtagacttcagaacacagaaaattatcacagataaagaaggacattacataatgataagagagtaaatgcaccaataagacataatactaaacatgtatatatctaataatagagcgctaaaatatatgaagcaaaagctgacagaactaaagagaattggacaaatccacaattgtacttcaaagcatcacaggaccattaatcctgaaatcttgacctcagtttctctcaggcctctgttgggcctcagttgactgtctctgtgcctctggttccacaaaggaataaccctgccccagagagtttagggtaactgtgaaagcgtgttctgtaaggagcccacccccaccagatgtgagactgtgagcatagccagactttagctacttgttgaaattttagagaaaatcaataggaattttccagctatgtctctctgggaaactcatgaaagctcaaacacagcattaagagtttgttgtggacaggtattattttgcatctatcatccactctcctatttctgataacagtgtcccaattttgctttagggaaaatacctctacatacccctaacttaagctgcaattaagtcaatatgaatatttcatcctcctgactcagtgattggtcagaaacaggcacacaactcagccagagcaatgagatgcaaggttacacttgctggggcatctgggaaagagagcttcctctctcctctttgggcatcaccagaaaacatgatgtccatttagccagatggtgtggcttggggatacgagagctgggcaggccacagtctttttgatatcgggagggaaaccctagaactatactgtgtagcacctgagggtaaagcctacactgcggaaggcagaacagaaggacatacagaaaagggtcttgattgttttgagctttggttcaaaccttatctaaagacagaacaactctggtaatttctattatgcaaaggaataaatgtttccatttttcctttatttttcttgcttacagtagtttgcataatattttgggttttctgttgtgaatgacattcacaacacagagttctgactaacacaaggcttactctcacctcttcatccctctctaaacctcatatctatctttctcacaaataacaacacaatgnnnnnnnnnnnnnnnnnnnnnnnnnnnnnnnnnnnnnnnnnnnnnnnnnnnnnnnnnnnnnnnnnnnnnnnnnnnnnnnnnnnnnnnnnnnnnnnnnnnnnnnnnnnnnnnnnnnnnnnnnnnnnnnnnnnnnnnnnnnnnnnnnnnnnnnnnnnnnnnnnnnnnnnnnnnnnnnnnnnnnnnnnnnnnnnnnnnnnnnnnnnnnnnnnnnnnnnnnnnnnnnnnnnnnnnnnnnnnnnnnnnnnnnnnnnnnngacaaagctttatatgtggaaaaaataataccttaatgattagcaatacacatataagagaaattgttcagaatttaaaactgtaagcaaaaagatagttttttaaatttatatattgatagagaatgctatttactctgtttttgctaaaatctttgaaaaacatcactggagttattgtctcctgagagaatgtttaccaccatcaactacctcaacctgtaattcttaaagaacaataataaattcaggaggcccagtcttccctgaccctgttggtactcaaggagacaatggcttcagaattcctccatgggttttgcatttcaggctcaagctaccttcttgatgaaaaattctggacgtgttctgaaaatcacagtcatccctaacttcagtggaaaagattcatattgtccagctgaacaaggattgatacttaaaccagggatttcctaaaatgaaaatgtttctgtggataaaactgattacatgcagagactggaatggagttaattctgggtagatatgggattcaagagattggtcttcatgaggcatttatcaaggatctgcaagggatttagaggtgacggaagcacagtccttcctgggcagttgcctctagcctggtgggaggtgttcctcacacccaggactctcatccatggcaaaataaaaagtgagatatcnnnnnnnnnnnnnnnnnnnnnnnnnnnnnnnnnnnnnnnnnnnnnnnnnnnnnnnnnnnnnnnnnnnnnnnnnnnnnnnnnnnnnnnnnnnnnnnnnnnnnnnnnnnnnnnnnnnnnnnnnnnnnnnnnnnnnnnnnnnnnnnnnnnnnnnnnnnnnnnnnnnnnnnnnnnnnnnnnnnnnnnnnnnnnnnnnnnnnnnnnnnnnnnnnnnnnnnnnnnnnnnnnnnnnnnnnnnnnnnnnnnnnnnnnnnnnnnnnnnnnnnnnnnnnnnnnnnnnnnnnnnnnnnnnnnnnnnntggatatcacatcagagaagctcctggccaggtggccttgaggaacagggatgagttcagcacttagagatggagttggctttccccgttggagggaaaggcatgagaagggacataggtaagaggaagtagagtagtgcaggggccattgagtagtagtccttccaagacaggacttcatcatagaaccactttctctgaggaagctctgcttgggggaggttttaattcatgaggaaggcaaattcaatggctctcaggtgaggtgggaaacagacacctaccaacactccaaagagaacatgtacctctataaaagggcacagtctagtgaacaaagtccacagctctgggtttgatttctagcactgtcacttaatactgtgtgaccttagacattcacttaactctctcagcctcaggatacaatctgtaaaaacaggagaatgcttgttccctgtgccttataggattgatatgagcatcaggagagacagtgggcacaaaatagcactgtcaactacttctttctagtcagttatctggtcatgtttgtgaagctccccaggactgggaacatagcatatgatttttttaaagttacttgatgaatgaatgaataaatgaatgagtaaatgaatgaataatatctaaaggcctccaactaaataataatcaacttcctaaccgtactgaaagcctttaattgactttggggctgtttggcctggaggaggctctgagttagtggtgatcagttggtgtcatggtagagaagaaagcctgtgaaggtggagtcattgtcattatcagcatagagtccattacgctctccttccccatacacctggagccagacttggtcgcccacctccagatgcaggagcacagagccggaggcctggtccacattattttcctggtactgatcataggtgaagagcatagccttgtccttcttgaagaggctgaccttcacatccttcatatagactgtgatgtggtaggcaaagtagtacagcccaggaatgttgcagtggaatttaccagtggagccatcatagtggttttgctgattgtagaagatcttggtaaagcgaatgggcatgttggggatagtaacgtaagtctccaatcccacactgaatgctgagcggtatacataggcaccttctccaggttctcctttcctgccttggattcccggaaagcctcggggaccttcagccccgggtactccggtttcaccgatgtctcccttaggaccaataagacctggatctcctttctcacccttctcaccaggggtgccatctctgccatcacggcctggggccccattatggcccggatgccctgggatgcccgccatccaacctgtgcaggcccccttgggcaggggaagcaggactccgggcccttgagtcgtggtttcctggtcatgcccgggcagagctaatagcagtagaacagctcccagcaacagcatcctgagcccctctggtatggaatcag

SEQ ID NO: 53493 - DNA, 1797 bp, Homo sapiens
  misc_feature (1)...(1797): n = a,t,c or g
gcgaccgaggggcaaatcctccgcgcagtcctccgcgccacctggcgcccggcgccgcggggtctacgtgctgcccatcggcgacgcggacgcgctgcagcagtgaccacgtcgtacagacaggaattccaggcttggactggagtgaagccctcaagatccacaaagacaaaaccagcccgagtcatcacaacccacacttcgggatgggacagcagccctggggccggcttccaggtcccagaggtgaggaagaagttcactcctaacccctccgccatctttcaggcctcagctccccggattctcaacgtgtgactgcctgcaccgtgacaccatggctgccgacaggacagggctggggagcggcctcaggacccactgccgcggggctgggcgagagcatggcatgggcccctgcgggagggcacagccctgctcaaagctgtcaccagggccaaagtgctggtgtggagcagatgcaccgatggacttggcacacccagctcagcctcaagcatcctcttgagaagcctgtggaaggctcctgcgtttcgttaactgccatctggccgtctctcagttttgaaatctctgaggagcctgaggatcaagtcagttggggaaccgaattggtccatggaagctgaggaatgtggacacatccggcccttgaaagaaccagttatgttccacttttggtggatttcccaggatgcgtgagcacttgattaatttcataacctacagtgagacccttggctcttcctacaaatggcccctgcagttgaagctgttggaatcttgggccgtcacctgcatgactcatggtgatgctgagtatccaggaggaaatttccagaagaaacagaccgtcagtcacgggcttccacttcacagacctccttatggccaagatgagcctcgtgttttaacaaaacaagttcttgggattgaatgactcacantttaacttggtggtaggttctaaagattgaatccacattttgttactaatgattttcccgctaacataaggatgatgagcagggcactatcatacacactggctgagaactggaactgtttttggggaagggtggcatttgtctcatttccctgaaataccttaaaatgtcctctacaccaacccttccgtctaccctgctcacatgtacagtgacggggaactcaccaccttttgaagaggcagttcattttctttgcaaagctctctcctaacttcctccgtaaattccatgccaagcatgncacatgggtcacgcctggtgccttcacacgtttgaggggtcttcgtctctttttaaagcttagaggtacaagctcaggaccagtcttcagtaaggaaatttgtggatttccctttggatctttcttcctcttccagcccacaagtggctctagtgagacgagcatttaagctgcaggtggtggcactcgggtctcagagccaccagacgtgcaggtgggacagtggttccagctccgactgcctgtcagcgtccctcccaggtgcctagccctggcaggcacagccctcccctcatgccagcaaaggaaatgctcttgatgagaggctcgctttaaagaagcccaaagcgtgtgcttatccaaggggttcagctattcctgacttcacggcttgcatgtttgatttttctaagagaaaagaggctgcctgctgggtgtctgtggaaatgagattaaaaactgtacaatctcagattttactaaaatgcaaaaatgtagtttcagtttcttaaattataaaaaaaa

SEQ ID NO: 53494 - DNA, 638 bp, Homo sapiens
ctatgaaccatttttctgttctcttatttattgacagtttcttttaattacaacacaatgaattgatggtaaatacagaagatgcaatagtataaaaagccatttaacccttccctaggttaagacacttacagcagacaaaaactgccccacccctaatcccctccttgaatggaaacaaaataaatataaattaataaatacaaaacaaatcactggcacagcccttaactctttgattgccatggcaagaaccatgctgatgattctagcttgtgacatttgtgtggttaaaggttgccgcagcagtcaaagggttatagcattgtaaacataagtactttgtggaaaagttcagtcctggttaatgggtctataggccatgagattaatagcatgaccccttgacctttaatgacgcaacattataaggagttaaaagagatagtagcttggtgagctgttacatagactagtcaaccactttatttaacaatgtgctatgaggccttgatttactaataaaagacaacttgtgaataataaacactgttcaatgcactgatcaataaaatcaatgaaaaaattaatttaagcaccacaaaattttgcctgattttatctgacagtcataatac

SEQ ID NO: 53495 - DNA, 3388 bp, Homo sapiens
  misc_feature (1)...(3388): n = a,t,c or g
gtttgccgagccttgacaggcgtggcagagggagcagtgcccgagcgcggtttctcttaaggttctgcagggcaaggctgtctgggacaggcttggccatggatccgctctcagagctgcaggatgatctgaccttggatgacaccagcgaggctctgaaccagctgaagctggcctccatcgatgagaagaactggccctcggatgaaatgcctgacttccccaagtcagatgactccaaaagcagctccccggaacttgtcacacacctgaagtgggatgacccatactatgacatcgcccggcaccagatcgtggaggtggcaggagatgacaagtatgggcggaagatcattgtgtttagtgcctgtcgaatgccccccagccaccagctcgaccacagcaagctcctggggtacctgaagcacaccctggaccagtacgtggagagtgactacacacttctgtatctgcaccacggcctgaccagcgacaacaagccctccctcagctggctccgtgatgcctaccgggagtttgaccgcaagtacaagaagaacatcaaggccttgtacatcgtgcatccaaccatgttcatcaaaactctgctcatcctcttcaagcccctcatcagcttcaagttcgggcagaagatcttctatgtgaattacctgagcgagctgagcgagcacgtgaagctggagcagctggggatccctcgccaagtgctcaaatatgacgacttcctgaaatccacacagaagagccccgcgacagcccccaagcccatgcccccacggccccccctgcccaaccagcagtttggagtctcgctgcagcacctccaggagaagaatccagagcaggagcccattcccattgtactcagggagactgttgcctacttacaggcccacgctctcaccaccgagggcatcttccggaggtcggccaacacccaagtggtccgggaagtgcagcagaagtacaacatggggctgcctgtggatttcgaccagtacaatgagctgcacctgccagcagtcatcctcaagaccttcctccgggagcttcctgagcccctgctcacctttgacctctacccccatgtggtgggcttcctcaacattgatgaaagccagagggtgccagcgacactgcaggtcctccagacgctgcccgaggagaactaccaggtgcttcgtttcctgactgctttcctggtgcagatttctgcacacagtgaccagaacaagatgaccaacactaacctggctgttgttttcggccctaacctgctgtgggccaaggatgcggccatcaccctcaaggccattaatcccatcaacaccttcaccaagttccttctggatcaccaaggggagctgttcccaagcccggaccccagcgggctctgaacctgggcccctgccccaccagccccttctctggtagcccgggtttggactcttcctcctggcatcaggggccatgaagccccctggagagagatgttggagccacccatcaggcatgctctcccccacctctgtccagcccgcctcacggccctggcggcctcgctgttaccagaagacgtttttctctgccttacacttctcactgcctctctggacaccgggcttttgctgggctctccagagctgggcttggctcttccagctggagaaggactgagccccagtaacccctttcctgctttttcctgcctctgtttccctagcaagtgtggatgaatcaaatgactgccggctgggctggtagcaggggccagtcctcccctcttgattgctgggaatgagcagctgagctctttggtgtggacaccgccccaagctgaggtgcctcccatatcatggtaggctgccctgctttgcagaagccccactgcatgaaggcctgagtgcaagcacccttgctcctgtactgcccccagcagcgcagtctggggtatttcccctgctgaggagtgacagggctggagactgtgtctgctttctgcctcctcttccacacatcctgggtcagcctttcccaagtgatactgcccctggggtgtcctaaccccttggttgtgcagggactggtagcttggatgacatggctcagagtcccagcatccacttgaaacctccctctccacctccccgcccccgagagctacagcgtgtgatggaatcagtgaccggccaggttagcctctcccctcttggcctcctttcccacacgggcagatcatcagccttcatgttcttgtggacctgtctgttacggagtcacactggcccctgccccagccagaggtgactcagtgcctcaggatcttatggctccttcctccagctgggggactcttaaaggggctggggtagagactaagagtgcccgtaggaggggcagagattgtgctgataggtcagtccagataggtgggttctagcaatttccccaggggattaaggggctctagggccaccnnnnnnnnnnnnnnnnnnnnnnnnnnnnnnnnnnnnnnnnnnnnnnnnnnnnnnnnnnnnnnnnnnnnnnnnnnnnnnnnnnnnnnnnnnnnnnnnnnnnnnnnnnnnnnnnnnnnnnnnnnnnnnnnnnnnnnnnnnnnnnnnnnnnnnnnnnnnnnnnnnnnnnnnnnnnnnnnnnnnnnnnnnnnnnnnnnnnnnnnnnnnnnnnnnnnnnnnnnnnnnnnnnnnnnnnnnnnnnnnnnnnnnnnnnnnnnnnnnnnnnnnnnnnnnncgtgacacttgcgcccggccagccctgttgtctttcaaagaacctcggccccagtgatggctgatctcactcccactgtctcgtagaattacactccttcctggggatccctcttcctgcagccttgtccttggggagtacagggaagtacctgcagtgaccctgcccccatgaccttggccagggcaggatgattccagagcccgtactgtgggggatcctcactgaccagcccagccccatccgcaagccaggctgggcctgggcataaacttcgctgggctctcccaagaccatcagcagtgcatccagccccctggggcctgggctgctgctggttcttcatcagtcccttggtctctagcctcggccagggctgctctgctctccgccctcctttgtgtatcaagtgtcgctcacagccccattcactggggagcctttcggatctatttggtctttctcatgtcccccactggtctgtaccccagggagcgggtgcttgtactgtgtgaatccagtgttcacattcacacttaatgacttccttggcaccaatcatgtatttcaccgtttgcactttttgtatttcaataaaaatgttgatgcaaaactgaaa

SEQ ID NO: 53496 - DNA, 396 bp, Homo sapiens
ttttttttgtattattcctttattttactgggaatctgttcttcctacttacttatcttcccccaccagccatttacagcttttggcatacttcatggtataatgctgctggtttatgacaagtaacattaacaatgtcatatatataagcacaatcactagaattctaacttctgtgaatgtcacatacataaagccataatgaaagacagtttaaaaagataccttttaataacatgaaggaaaaaaattcaaaataacatatctatacaaatacatcctattgttattccagtatttcacagaataaagaatttgctatataatttccttcagtagcccacaaaatatttaccactcctttccttaattaccattggattaaagacatctgat

SEQ ID NO: 53497 - DNA, 343 bp, Homo sapiens
cggacgcgtgggcggacgcgtgggcggacgcgtgggtataaatagaatgcagagttatctgtaaaaatatacattactttcattgagtcttaatttggataatataaacatttatataatttaagtccagagaaacagtacctaacttttgatatacaatttattcttcattgttaacgcataacatttaggatacagtagaattatgtatctcgcaaaacttggaactgtgtgtgtgtttaattcacttcttcagaattgttgctagccctgaagggacttcagatatataatagtatcaacaactaatacatctaatggcagtaggcatcaaaagctaaaa

SEQ ID NO: 53498 - DNA, 485 bp, Homo sapiens
aatctttcaaaagctgacgatttttaatttaacagaaaagaaaatgaaattaatttttataaaaatgatccaagtgttcaatgcacaaatttttctctcaaacagcagaataagatgcacccaggaattctcatataccgcaatagaatgaagaaacagtactttcagagaattatctttaggtgaagaaattcaaactgtcaagagtaatatactgtacataaacatatacataaaaagtctaaaaaccaagctgtgacaagggacctagaactgaaacaaaatttgagaaaaacttacttaaaagcatttgtttcctgtaatctctacaaataattttagaagcagagatttctgcactcaactgttatgactaatacaaccaaaaacttcacttaatggcattttgtgtaatggtgccgatatccttggtgtattaattttttgacttatttcctttctcgtgccgaatcctgcagcccggg

SEQ ID NO: 53499 - DNA, 369 bp, Homo sapiens
tgaattctttaaaaaaaaaaaaatgagggcagccctcaagtcgggcctggcaagcttgtcatttgcaaataaatcaaaagaccatcattgcaggaaggagaaccaatgaatagagttgctttgtcattctttgatgggccccacactcaagcccgctattaaaaatgaatgcattcaagagcctctgcattaagaacataaacaattaagggcacttgagttgctctgctgagagctgctgcgaagataggagagctttctccggagatgcaggcccctgcaatctgcctcacgaggagctagagaatggggagcaattagtgttgctatctgtggcccaagcagccttcagcacggttttttttttcc

SEQ ID NO: 53500 - DNA, 368 bp, Homo sapiens
atcccccctgaattcctttcggcctctggggccatttggcagccgagttccctccccgggtgctcctggagctcccagggcttgaccctccggctcggacagagctgggagcggcaggggcggcgaggacagtgccgggagcaaaatccgcagcccccacccaggtcccccagccgagcgccagggcacggggaggggagcggagggggtgtggccgggatcggaaggggcgggggacagggaggccggctggacgggttcggtggccccaatgtcgcagccgctctgggccctgcgggcaggttgcgcgttctccctgggtagcggctgctcccgggaagctcgctgccggctggggtgggggttcc

SEQ ID NO: 53501 - DNA, 415 bp, Homo sapiens
gctggcgactggcaggacgcggtgcagagagcggacttccgcgacgcggaaggtcctacagtgtaggggaagcaatggaagaacttctacctgatggacaaatatgggctaatatggatccagaagaacgaatgttggcagctgctacagcttttacccacatctgtgcagggcagggtgaaggagatgtcaggagagaagcccaatctatccaatatgatccctacagtaaagcttcagtagccccagggaagcgacctgctcttcctgtgcaactacagtacccacatgtagaaagtaatgtcccttcagaaacaagtctcttgaggcctcccaaagactccgaaagccagtgatgaagagaaaggtgctgcgcagaaagccagatggggaagtattagtaacagatgagtcg

SEQ ID NO: 53502 - DNA, 387 bp, Homo sapiens
atccccatgcacctccttccccagctccacgaccacgctgcttacttagtagacaacctgtgggactgtgcagggactcagctgaaggactgggagggtctgacaagcctgctgctggagaaggaccagagcacgtgccacatggagccagggccagggaccttccacctcctagggtgaaaccaggagagattgcttgcttcacttgtacaaggcaggaacggtggcatggggtgggggaaacttggagttggaaggtggctaatctttgattctatgtttttgatcctcctggcactccagacctgggtgatgtgcaggagagcacactgatagaaatccttgtgtccagtgcccagcaactcctgcctcagcctcccgagcagc

SEQ ID NO: 53503 - DNA, 653 bp, Homo sapiens
aacatcaccagatttgttagaaagtgggtcccccaggcttataggtggctgttaacattgttttatttcctttatacaaaaagtagaaatgacagaaaaaacactcttgacagaaacaataccactgacctgatctcatgaaggagctgagccaaatctgcccacattatggggaaagggaggttcaatcaacattagcaaatactcatgcaattgatgaaatataaaatggtatcagtggcttggtgaatgtcctgtgggtagggtgaatcaatctactcttaaaaaacatacattttcccaatcatgcttttaaacggcatcttttaaaaaaacaagttatatatacagatatcaccccaaaatgaatcttttacagtctactactataaatttaaggcatcctgatattctgttcttctgctggtgaggcattgttttcatggttctctttccaaagaggatagtccagaaatttccaataatttccaaagggcatcagtgagagaaaatttaaaaagtgatttacaagaagagttcttttgactctggctcagcaatgtgctttatgctgtaggatttcttcatttttctattgatgtcattatgctgccttattctttcctttgctagcggagctggcagggtttccc

SEQ ID NO: 53504 - DNA, 290 bp, Homo sapiens
actttctgtccttgttcctcgtcccatctggagcatttccaattctggttttgcggagcagcaggtctgagcttgtccggcgagggtgggagttggtcccggcggagatccagtgggaagagccggcggctgcccgggcgtctccttgagcctccagaggactcacaacactccggggcatgttgctctttcaaataccaggaatggactctggggaatggggcacccttgaagtctgattatttcttccctgtagcacccaggggctaattaaactcgtgtttatggaa

SEQ ID NO: 53505 - DNA, 806 bp, Homo sapiens
  misc_feature (1)...(806): n = a,t,c or g
ctcattgacttttttattaaggaaagaaagtattatatgcaagccaaagaatggtcccaccagtaggcaaatgaattcaagtcttcggcaccggtctaccccagaactctatggcatatatgtaattaatgtgcagtgccaattctgtgagtatgatgtgtgcatggagccagccaaaactctgattgaatttcagaactgggacactctcttgttttgcattcaggaaggagtgaaaatgtttttaaagcaagaaaaattatttgtggaattatcaggtgaggatattaaggaatttagtgaagataatggtnttagtttatttgatgctactcttcacaagcgtgtgacttccgatgagaggagcaatttccaggaagcatgtaataatattttagattcctatgagatgtttaatttgcagtcaaaagctgtgaaaagaaaaactactgcagaaaacgtaaacacacagagttctagggattcagaagctaccagaaaaaatacaaatgatgcatttttgtacatttatgaatcaggtggtccaggccatagcaaaatgacagagccatctttacaaaacaaagacagctcttgctcagaatcaaagatgttagaacaagagacaattgtagcatcagaagctggagaaaatgagaaacataaaaaatctttcctggaacatagctctttagaaaatccgtgtggaaccagtttagaaatgtttttaagcccttttcagacaccatgtcactttgaggagagtgggcaggatctagaaatatggaaagaaagtactactgtta

SEQ ID NO: 53506 - DNA, 602 bp, Homo sapiens
  misc_feature (1)...(602): n = a,t,c or g
ggcacgagtgatgatccagacaaatatcatcagggttttgaattgttgctgtcagccttgggtgatccctcagaaagagtagttagtgctacacatcaagtatttttaccagcttacgctgcgtggactacagaacttggaaatttacagtctcatcttatacttacactactgaacaagattgaaaaacttctcagggaaggagaacatggactggatgaacacaaactccacatgtatctttctgccttgcagttccttgatcccatctctctttgcattagtgctacagaatgcacctttctccaggcaaagccaagcttcatggtgaagtgccacagatagaagtgactaggtttcctcggcctatgtcgcctcttcaagatgtgtccactattatcggaagtcgtgagcaattggcagngctgctgcaactttatgactaccagctagaacaagagggtacaacaggctgggagagtttactgggggttgcaatcaattgtgnccncttatanaaatannggcnaaantaatgnncttnnctgctgggnctgannctccnnatntttggngccttnncggcnttngnnnnnnnttac

SEQ ID NO: 53507 - DNA, 1752 bp, Homo sapiens
ttttttacttggtactttaaccattacaaatttattcaggaaaactaaaattatttaaagaagagacatctagttctagagtaatctggcacattcatatgtgaaaaaaattagaaatcacttgatacatctacaatacacaaatacacgtataaacattgtattttaataatactctttgtcacttcaatttaaatcattccattatgaaaatttcttaattgaagggagactatttcttcaaaactctaaattaaacagagctttatcaattaagtttacagcaatatagcctttagaaatacatatttcttcattttataataatacttcccctttaaaaatttgccatggtttgtcacagatttaaaatacaaggcacctaatgctataaaagaataatacagtaaatgtagtgtaagtgaaccagatattttctcaaatacttattctttttaaagtcccatgaaatttgcacaaacatgcttgttgcataaattaaacattttttgtgtggttaatttgcaatattctacaaaacccaaaaatataatccacacttattacaggtagcttattttagcatttacctgtcagaaatactggtctatgaacacttaagtgatttcttgaaaacattttccataatatattcccagcatttaacatgtgaaaataaagtccccagaacattaggatttattccttgattagttcaaatgatttcaacagctgaattccttgagatgtgtaaggcaggttggtcctttggatggactgtagactgaaacttcctataactgtagtgatatgtacacagctacatagcaaagtgcttcattatgaaaatgaagaaaacaggtatgagaaaaatatattttagagtttcaaagaactcaaactgttatttttcagactaggcactgaaacattttttctacaaaaacttgccagagattgtctcttcgctgtatagttccattatcaagctgggctacagacaacagacagctaactagctccatcctcctgagaaacactgtgcatagaaatgagactctcacactgttcgctgtcttctggaactctctgaattcgatgttttctgcatataaaagcaaatattcttctgattcccaccatcacaggatcccaattattataatggcataggagagttacaataaaaaatgaaaaaaatacagggatagctcctgcaaaaaataaccaagaaaactgcaccttttgcatacacatgtcagctattatggacagaggtattgtaaggcttagtgcaagtgtgcctatcaatgatgaggtaagaaagcagccccacaaccacaggaactctgagagtactgttccaataaggccattaatgataatgcacattaatactactttattgggaaactcgaagtcctcaaatccagtataatgaagtaaaaagaaacctggccataagagcagcagattaaacaaacctacaaaaccaaagaacattggaatatccaacttgtcttctctatctacttttctcttaatcataacaatatagacagcatagagcatggctccagcaagagaccaaatggaacctactgtgtctcttccagcaggtttttcagaccctgccaggtttaccagtacaacgcctccaatgcttaaaattacagctaatagtttagaaagggtaaatctatctccactgttacttggaaatactgcagcaaggattaaggtaaaaagtcc

SEQ ID NO: 53508 - DNA, 4033 bp, Homo sapiens
gaaaaccacctttactgaaaaagaaacttcggagctctgtagctgcccctgaaaaatcatcttccaatgattcagtagatgaagaaacagcagaatctgacacatcacctgtgttagaaaaagagcaccaaccagatgtagacagtagtaacatttgtactgtgcagactcatgtagaaaacccagtctgctaattgcttgaaaagttgcaatgagcaaatagatgaaagtgagaagcatactgcaaattatgatacagaggaaagagtaggatcttcatcttctgagtcttgtgctcaagatcttcctgtgctagttggtgaggaaggggaagttaaaaaactcgagaatacaggtatagaggctaatgttttgtgtttggaaagtgagatttctgaaaatattcttgaaaaaggaggtgatccattggaaaagcaagaccagatatctggactttcacaatcagaggtaaagacagatgtatgtacagttcatcttccaaatgattttcctacatgtttaacatctgaaagcaaagtgtaccaacctgtatcttgtcccctaagtgacttatctgagaatgtagagtcagtggttaatgaagaaaaaataacagagagttccctagtagaaattactgaacataaagattttacactaaaaacagaggagcttatagagagccccaagttagaatcttctgagggtgaaattatacagacagtggacagacaatctgttaagagcccagaggttcaattgcttgggcatgttgaaactgaagatgtagaaataattgcaacatgtgatacttttgggaatgaagatttcaataatattcaagactctgaaaataacttactaaaaaataatcttctgaacaccaaattggaaaaatctttagaagaaaagaatgaatcgctgaccgaacatcctagatctacagagttgcctaaaacacacattgaacagattcagaagcattttagtgaggacaacaatgaaatgatacctatggagtgtgattcattttgcagtgaccaaaatgaatctgaagttgaaccatctgtaaatgctgatcttaaacaaatgaatgaaaattctgtgacacactgttctgaaaataatatgccgtcttctgatcttgcggatgaaaaggttgaaactgtttctcaaccatctgaaagcccaaaagataccatagataaaaccaaaaagcctcgtactcgaagatctagatttcattctccatctacaacttggtcacccaacaaagacactccacaagaaaagaagcggccccagtctccatctcccagaagagaaactgggaaagaaagcaggaagtctcaatcaccatctcctaaggaatgagtcagccagaggccggaaaaaatcccgttctcagtccccaaaaaaggatattgcaagagaaaggaggcaatctcagtctcggtctccaaaaagggatactactagggaaagcagaagatctgaatcactgtccccaagaagagaaacttctagagagaacaaaagatctcagccaagagtgaaagattcttccccaggagaaaaatccaggtcccagagcagagaacgagaaagtgatagagatgggcagaggagagagagagaaaggagaaccagaaagtggtctaggtccagatctcattctaggtccccctcaagatgtagaacaaaaagtaagagttcatcatttggtagaattgacagagatagttactctccccggtggaagggaagatgggcaaatgatggttggagatgtccacgaggaaatgatcggtacagaaagaatgacccagagaaacagaatgaaaatacaaaaaaagaaaaaaatgacatccatctagatgctgatgatccaaattctgctgacaaacatagaaatgactgtcccaattggataacagaaaaaataaactctgggcctgatccaagaaccagaaatccagaaaagttgaaagagtctcattgggaagaaaatagaaatgaaaattcaggaaattcttggaataaaaactttggttctggttgggtatctaaccgtggtagaggcagaggcaaccgtggcagaggcacttacagaagtagttttgcctataaagatcagaatgaaaatcggtggcaaaatcgaaaacccctctcagggaattcaaacagttcagggagtgaatctttcaagtttgtggaacagcaatcctataagcgaaaaagtgaacaggagttctcatttgatacaccagcagatagatctggatggacatctgcatccagctgggccgtgagaaagactttgccagcagatgtacaaaactactactcacgacgaggcagaaattcttcaggtccacagtctggatggatgaaacaagaggaggaaacatctggacaggattctagcctaaaagaccaaacaaaccagcaagttgatggttctcagctacctataaatatgatgcaaccgcaaatgaatgtaatgcagcaacaaatgaatgcacaacaccagcctatgaatatcttcccatatccagtgggtgttcatgctcctttgatgaacatccaacgcaatccatttaacattcatcctcagctacccttgcatctccacacaggagtgcccctcatgcaggtagccactcctaccagtgtatctcagggactaccaccaccaccaccccctcccccaccatcccaacaagtcaactacattgcttcacaaccagatggaaagcaattgcagggtattcctagttcttctcatgtaagtaataacatgagtacaccagttttgcctgctccgacagcagccccagggaaatacgggaatggttcagggaccaagttctggtaatacttcgtcatcaagtcacagccaaaggcctctaatgctgctgtaaaattggcagaaagcaaagtaagtgttgcagtggaagccagcgcagatagctcgaagacagacaagaaattgcaaattcaagaaaaagcagcacaagaggtaaaattggccatcaagccattttaccaaaataaagatatcaccaaggaagaatataaagaaattgtacggaaagcagtagataaagtttgtcatagtaagagtggagaagtaaattctactaaagtggcaaatctggttaaagcctatgtagacaaatacaaatattcacggaaggggagccaaaagaaaactctggaagaacctgtgtctactgaaaaaaacataggctgaaatggggaacgctgtcaaggacattatcaggatatctgcaaagtgcaatttcaacatgtaccattaactgaaaatcatacataactgtgattgaaatttggttttgataaaattatttttttaacataggatatgatgttttgttctaaataaatataggtctgcactgcaacttctgtatccttccttcccctccaccctcccccacaaaattcaagggaaagtaaagggtttaaaggaatgtgcatctttactaggactgtgttatagtgtggatactggaaaatgtatagctttttgattagggcaatggagtgcataaattagaaacttctaagtgcactggttttcaaagagatatatataatgcatttattctgtcaggttaaaatataaagtatgatctttatgattttttccctctaattatagaaagttaaataatgtattaccatgaaaaatgtttctaatattaaatagaacatatcagttgcaaagttcctaatgtgtatttttaaagcacatatctgaataaattgcctagatagaaaaaaaattatcacgagtaaaatttagtgttcaaaacattgagacactcttcacctattgtatgaccaaataaaggttatgctgcttgtttttcttttgtgcctttgtttacccctaattgagataagcagtttgacttactagattacaactttggcagttcaaagtctttgttgaagactttgaggaaaaagatttggaaaaattgttgactttcggccgggcatg

SEQ ID NO: 53509 - DNA, 520 bp, Homo sapiens
cttctaccactcccactgccacacagccaacctcactggggcaactagctgttcagtctccaggccagtcaaaccagaccacgaatcccaagctaggtaaggcttcggaagaggagatggcagagccaggcttgggatggtgggtggagaacagatgattatcacttggtcaccgtagctccctccttcccctctccacctgcagtgagcattgccagctttgtcactgtgaagcgacctggtgttacaggcgaaaatagcaatgaagtggccaaattggtgaatacccttaacaccatcccttccctgggccagagtcctgggccagtggtggtgtccaacaacagctctgctcatggctctcaaagaaccagcggacctgagtcttcaatgaaaggtacaataacctgaaagactctgagcagccagtcattcaaaaacattaataaagtgtttgttgtatcagagctttatactcagaaatagaaaaataaaataaaatacagctgctgtagtttgt

SEQ ID NO: 53510 - DNA, 4684 bp, Homo sapiens
  misc_feature (1)...(4684): n = a,t,c or g
tggtctccggcgatggacgccccaaaagcaggatacgcctttgagtaccttattgaaacattaaatgacagttcacataagaagttcttcgatgtatctaaacttggcaccaagtatgatgttctgccttactcaatacgggtcttgttggaagctgctgtacgaaattgtgatggctttttaatgaagaaggaagatgttatgaacattttagactggaaaaccaaacaaagcaatgttgaagtgccctttttccctgcccgtgttcttcttcaagattttactggaataccagcaatggtggattttgctgctatgagggaggcagtgaaaactcttggaggtgatcctgagaaagtccatcctgcttgtccgacagatcttacagttgaccattctttacaaattgacttcagtaaatgtgcaatacagaatgcaccaaatcctggaggtggtgacctgcagaaagcaggaaagctctctccacttaaagtgcagcctaagaagcttccctgcagaggccagactacctgccgaggatcttgtgattctggagaactaggccgaaactcaggaacattttcttcgcagattgagaatacacccatcctgtgtccttttcatttgcaaccagtgcctgaacctgaaacagtgttaaaaaatcaagaagtagaattcggcagaaatcgagagaggcttcagttttttaagtggagttcaagagttttaaagaatgtggcagtgatccctcctggaactggaatggctcatcaaataaacttagaatatttgtcaagagtggtttttgaagaaaaagacctcctcttcccagacagtgtagtcggcacagattcacacataacgatggtgaatggtttagggattctggggtggggggttggaggcattgaaacagaagcagttatgcttggtctgccagtttctcttactttaccagaggtggttggatgtgagttaactgggtcatcaaacccttttgttacatccatagatgttgttcttggtattacaaagcacctcaggcaagtaggagtggctggaaagtttgttgagttttttggaagtggagtttcacaattatctatagttgatcgaactacaatagcaaacatgtgtccggaatatggtgctatcctcagctttttccctgttgacaatgtgacattaaaacatttagaacatacaggttttagcaaagccaaactcgaatcaatggaaacataccttaaagctgtgaaattgtttcgaaatgaccagaattcttcaggagaacctgaatactcccaggtgatccagattaatctgaattcaatagttccatctgttagtggtccaaaaagacctcgggatagagttgctgtgacagatatgaaaagcgatttccaggcttgcttaaatgaaaaggttggatttaaaggcttccaaattgcagctgaaaaacaaaaggatattgtctccattcattatgaaggaagtgaatataagctgtctcatggatcagtggtcattgctgcagttatcagttgtaccaataattgcaatccatctgtcatgcttgctgcaggtcttttggctaaaaaggctgttgaagctggtctgcgtgttaaaccttatataagaacaagtttatctccaggcagtgggatggttacacattacctcagttcaagtggagtattaccatatctaagtaagcttggatttgaaatcgttggctatggatgttcaacttgtgtgggaaatacagcacccttatcagacgcagttttaaatgcagtaaaacagggtgatttggttacctgtggaattttatctggaaacaaaaattttgaaggtcgtctttgtgattgtgttcgtgccattatcttgcctctccacccttagtggtagcttatgccatagcaggcacagtgaatatagatttccagacagaacctttaggtactgaccccaccggcaagaacatttacctgcatgatatttggcctagtcgagaagaagttcatcgagtagaggaagaacatgttatactatccatgtttaaagcattaaaagataaaatagaaatggggaataaacggtggaattccttagaagcaccggattcagttttgtttccatgggacttaaagtctacttatatcagatgcccttcattttttgataaacttaccaaagagccaattgcactccaggctattgaaaatgcccatgtcttattatatttgggagactctgtcacaacagatcatatatcacctgcaggaagtatcgctaggaatagtgctgccgctaagtatttgacaaacagaggccttacccctcgtgaattcaactcttacggagctcgaagaggtaatgatgctgtaatgacaagaggcacttttgcaaatatcaagctttttaataagtttattggaaaaccagctcctaaaacaattcattttccatcaggacagacgctagatgtatttgaggctgcagagctgtaccagaaagaaggtatcccactgattattttagcaggaaagaaatatggttcaggaaactccagagactgggctgccaaaggaccgtatttactgggtgtgaaagctgttttggccgaaagttatgaaaaaatacacaaagatcatttgattggaattggcatagctccacttcagttccttccaggagaaaatgcagattccttgggcctctccggtagagaaacattttctttaacatttcctgaagaactgtctcctggaattacattgaatatacagacaagcactggaaaagtattcagcgtgattgcttcgtttgaagatgatgtggaaataacattatacaaacatggaggattattaaactttgtggcacgaaaattctcatagtatctacttaccatagatacctttcataactggtaactgcaaagccttttgtgctggacccaggaatccttaccgatggagcagcagatagtcccagtatactcacttatctcatccatggatgtaaatgatgatgaatcaacatagtaactgaaatgaaatcttcttgattttaaataatatacgaatggtgctattaatattgctaaaatcaacgtgtgaagtgtgttgtggaagagacctgtaagtatgggggggggcgatattttatcagaccattttgtaaataaaggcagaatttgtgttgaagattcttatatgaataaccttcctggatttgtttagttttgcaccaataaaactgtgtactactgtttgttggtttaagagtagcagattgaaatataagaagccagattagactctaaaattgtggccattgggaatctcatttataaatggaccttttaagtatattaattcctcttcagaattgagctggacacatttggcattcttagtttgtcatataaccaggtttatccttagtctaactgcaagggatagaacctgccccaggtcaccaatccattctgtccaatcccagcccaaggttcccttcccacatatgaagatggaccatggcaggatacaactgattgtgtggcaccatgtattagcagtgggaatatgtatcacatatgatgcagcctttcatatttcagcagtttgccactgtgactgtctggcaagcccccagatggcgttatattaattggattagattattttgctcaccttatgtaatactgtaacttcctataacctaatattttcggtatcattaaccaaaatttcacactcatagttgctaaagagaatgttattcaatcattaaactctgaactgatttcttctatacatttaaattatccaccctcaataatacgggtgctcaaccctatgcattttttaagtgttgctatttcttaattaaattgatttcctgtcattttgaatcatttatcacctgcgatgcatgattctattaattttgttatgttactgttttaaccaaagctgaccgtaaggataaaacacttaagttgttgctgagtactatatatcctcaatatgcatgtctgcccatcacatcaaatgttctgtcaacaagatgtttggtaattttttttaaaaaggttggaaaattaattatagaaggttctatactgtttttttaattaagaaactaaatctagcaggctaaaggttaattgtagtgattttttttcacatagatatctttctatgacctagttagttactgcaattcagaattagttcacattgcataaagaattacttgttgtaagcaaaatgctgaaactaccaaaccagtggatgaagaccactaagaactttgcacataatcatacaatcttttgaaaatattttgcaaatatgtgtttagacaataagatggactagagttcgacaaaatgatttctttatttaaattttgtataagtattttcttcgacactttcaaattatattgtgttcttgatatatgctgtatatttatttgttaggtgccatgtgtttttaatttacatgaaaacatgagttaggagaaattacaggttgaaagatgaaatgccnggtatgtggctccggaagaaatgggtaattccagattggtggcagggggggaaaccaatccaatttgggtttggttttggntttttngagaccgagcccttggcccnggtggctggggc

SEQ ID NO: 53511 - DNA, 1901 bp, Homo sapiens
  misc_feature (1)...(1901): n = a,t,c or g
agactgctctcctcaccacacagcactagtccatcctcagcacctgagcctccctcacttggacactcaggggaccacacagagaagtggatggacacttcgccatccaggcagaactaagccaggcataaccacagccaagcagattaaccccaggcagaccgataaaaagacctccagataggcagacagacagatggaccaccaacctggacagacagccaaagcttcagagatacagtccacaggtggacaaagggatccccagccagagagagagagaccagccaacagcttgatagaccagtgcagccagagagaccaccaaacagagcccccaaaagacagacatctctgctagctggacagccaggtggaccccctaagttagattactagacagatataaacagatcccctgctgaacagatacacagagttctcagaccccacccccaccctcaggtgggcctggctggctgacagaccttctggccagacagactcctaaccaaccagatggactgccagacaggcagacatcagccacatggaatcctgacatcccagccagccggccagactctcatcttgatgtcttgatggatggaccccagctagtcagacatgatcctccagattgacagacaagtcccccaaatgagtacacatctccagctattcagacagatggacccccagcaaatcaggacctatctaggcagaccccagccagacccccgccagacagactcccaaccagactgaccccttactattcacacagcctgccgagtagctgggactacaggtctaannnnnnnnnnnnnnnnnnnnnnnnnnnnnnnnnnnnnnnnnnnnnnnnnnnnnnnnnnnnnnnnnnnnnnnnnnnnnnnnnnnnnnnnnnnnnnnnnnnnnnnnnnnnnnnnnnnnnnnnncatgctcagccccctaagatttgaaacactttaaatggcccatggtagggttcctgctaggataaaacattaagcggctgttaaaagaaataaaaggaggacacgtctctgtgcactggtgtggacaaatctccaagtcactgcaaaatggaaaaagtataagatgctctttccctgaacctcaagggtcccgcccctctcactttcaggtctctggacctctgactgacactgtgcctgcccaggtccctgtatgcactgccacagtgccctgggccccatgtccacccctgtcctgcccttctctgggatagggctggccttcctctgcctctgcctggctgcatccatggtcgatctcaagtgccttggcatgaactccactctcctgcagccttcaatcaaggaatgatggggatgtgtacataccccaccccaccccttgggcagggtgatgctgaggtgtggatttttaacagttcccagactttcccaggaggcttgggtttgggtgcccacagtgggagctggtgtgatatcataccttcgccggccgcctttccttcctgttctctgtgcccctactcccactctagagctgccccgtttctctgttttcgtgaaagagctgaccctgtgctgcctcccactctcccaatgcccctgccactcctgtgagcctgctgctggtgaggtcggtgctgacctctgtgttgctggataatgagtcatctatctctggaggagaagaaaggcaggtcctccacagccctgataaaatctccaagtctcccagtttcgggtccctctcctgggatgcagacccactgcctgcccagctggtacgatccacatgccctcttcttgggaataggggcatgggaaagtgactaaagatactgttctggctgctgtgttcactgtgagtaataaactgtccatttctccgaaaaaaaaaaaaaa

SEQ ID NO: 53512 - DNA, 529 bp, Homo sapiens
gatgcttttcaaaaagctgaactgcagatttcttgtagatcattgcagctaatgtaatcactgatccaatatggagaaaaggagaaaggacacttgttccctgtacagagtgaagagaagagttaatagtattcagtactcatcagatactacatggatctgctgcagaacagttcacagttcaactcaaactttcaggaacctcatggtgcctgataggcagcaatttctataaatcacaaactagaagagctaatgaaaagtagcagcataaattcattaggcacaaactgaggatttcacttaagagaccaggcttatttttacaaagcagctcatactttaaaaaacatgtgaataagtgtgtttgtgtgtgtgtatgcataaaagtatgaatatataaagcatataaatgtgggtaagtatatataaaattgaagttttgaacattagtttctttaaaggctaagtataaattataaattaacaaatgattttatacatttgaaataaaaaacaaaatgacaac

SEQ ID NO: 53513 - DNA, 321 bp, Homo sapiens
  misc_feature (1)...(321): n = a,t,c or g
ccatttcggtaacacaaacaaatggaaacacatcccatgctcatggattagaagaatcagnnnnnnnnnnnnnnnnnnnnnnnnnnnnnnnnnnnnnnnnnnnnnnnnnnnnnnnnnnnnnnnnnnnnnnnnnnnnnnnnnnnnnnnnnnnnnnntaatcctaaaattaatatgaaatttttaaaaagagcctgaatggccaaagcaaacctaagcaaaaacaacaaatctagaggtatcacattaccagacttcaaattgtaccacaaggctatagttaccaaaacagaatggtactgatataaaagtaggcacatagaa

SEQ ID NO: 53514 - DNA, 583 bp, Homo sapiens
  misc_feature (1)...(583): n = a,t,c or g
tcttatgctgccaatctaaaaaatgtaatgaacatgcaaaaccggcagaagaaagaaggggaagaacagagcctgctggccgaagaagctgacagttcaaagccaggtccatccgctcctgatgttgctgcccagttgaaaagcagtttactagcagagataggactcacggaaagtgaagggcccccccttacatctttcaggcctcagtgcagtttcatgggcatggttatctcccatgacatgctgctgggacgctggcgcctgtctttagaactgttcggcagagtattcatggaagatgttggagcagaacctggatcaatcctaactgaattgggtggttttgaggtaaaagaatcaaaattccgcagagaaatggaaaaactgagaaaccagcagtcaagagatttgtcactagaggttgatcgggatcgagatcttctcattcagcagactatgaggcagcttaacaatcactttggtcgaagatgtgctactacaccaatggctgtgcacagagtcaaagtcacctttaaggatgaaccaggagaaggcagtggtgtagcacnaagtttttata

SEQ ID NO: 53515 - DNA, 488 bp, Homo sapiens
aacagattatatacttaaagtgatctgagcaatcattgataacatatggcttaaatttgctgctgcctgaaaagtatattaactagattagaagacaccatatactccaataaaatgaaatatattctattctcaatatataaactttaattgtactccctatcaaatattttgaaatttccatcacggcattactttgcatatttttttctaattaaatggttagtacagatgaaatctttatagatgactacttgaaaactaagtgctacaaattttcaaaccattattaagaaatatatcctgaatcatatatttagttactttctatagtgattgtatggatttaaaagaataattaaaatgtgaagttgaaaaacttgtaaaatttggaatatacagatctgatttttttcatttttgttagtatacctataatacataatcacattgacaaaccaatgaaaatattgtttttctgatgaatg

SEQ ID NO: 53516 - DNA, 329 bp, Homo sapiens
gtggcttgatcctcacttgtacttattagggcccaccctcacatttagctgaaggtcccagcacactctcacagtgtcagggagaacagtctcagggatgtctgttgctctgaaggtcacttgcccctcttgctgcggcccttcctggagggcaacttcccactgccccccgaagaggcagggctcgaggccgaggcactggcgatgttgatctgtccctcctggatttcctgccgggtctcggcaggcagatggttgatcttctgctgtgtctccaggtagaacatgacgtcacgcagctgctcctggatctcggtgatctgcagatc

SEQ ID NO: 53517 - DNA, 428 bp, Homo sapiens
gcagttttaagcaggattattagatgatctcagtcaactttacaactcactttgctgaatggagggtggattaacgagggggtagttggaggctaccccttggagggcattctggacttatctaccaaaatttcaaatgcacataccctctgacccagcagttccacttaagtatttggtcctgaaatcttggtaaaagtgcccaaagatacagaacaaggatgttcactatagcatctcttagaatatggccccaaacaggaagcaaccccaacctctttcatgagggaggtcataaaattcctgcacatgcaacagtgccatcctctgcagcctgtcaaagaggcaggcagcactaactgctggactggaatgttctccaagatataataaatgcatttgtttgaaagcagcttgcagcacagtgc

SEQ ID NO: 53518 - DNA, 365 bp, Homo sapiens
cacaattatgagaaagtcagacttccaatattttgatcatgccttgtgtcttcctaagtgtccttatcccactggattgtgtctcttactcccaagacttattccaaatgattttttgactcttttcattaatcaaattcaccccaaaccagaaagttttgccattagcgtagatattaaaaatattactggctgggaaagcactcctcaaagcagaggttctaaattaatttatctgttcttttaccatttgctcactcactcactcatggacccattcaatcatagaatatttaagatttatatgcccagaattataataggcctaggccttgataattagtgaatttgacttggggtgaatg

SEQ ID NO: 53519 - DNA, 1403 bp, Homo sapiens
  misc_feature (1)...(1403): n = a,t,c or g
cacaggggcaggcatccagaatgaggccccctgaggaaccctgagtgctgaccagtgccggcagaaatcagttccacccctgtggccctgcacactatatgtcagggtgacaccaactgcagcaggcaggagccacaggaaggaagacgtcatccgatggagcctgacatccccaggttcccgccctggtgagcaaggtcttcatttggctttggtacatatgaccctatacaggggaacctagtgtgtatcactcaccagcctctttctgtatctggggaaaccaaggcagtgaggtgactgcactcacctagcaataaagtaggcctttggtgcacttgcagggcatgtcctcctctggggcagagagcaggttccttgctgaagggcagatggtggcaaacatctccctcaactgtttccctgggccagtctttagggagcctagggacaagggcccaccctcccccttccacgtgtgccaaatcagcacctgaagtgaggcatttccagcaagcaactccacagacccgagaaaggaagggctctagtggaagagctagcatctcaccaccccaggtcccctgggcctgggtccagggncagccagctgcatgtgaccattctgttgccagctccccacacatccctcctgtcacccaggctccaagacattcgaccaactagactgaaaatgcaggcatccagctttgggagaccctgtgtgtgccacaccagggctaagctctcccagtgccctagcaaggtctttttttctttttctctccttattctactctacagtcttttgacagtattcccaaacgaggttgacacagctccagtccacaccagcataccaggcttccttcccagggcagtttagaggaagctccttctgggcaaggtcaggcggtcctccttccctctctccttcccctttgtcccagcctcaactgactctggctgtgggaggtgtggagggtccttaggcttccctccccaacctggcctccaccaacacccctaacaggaggcccgtggaaggctcagcctctcctccgcatccctcctccttcctgcctatcggagggagccagggtcccctaggctgaccctgaatcctcttcctcccttcatgggaggggggcaggaatccagaggaggatgaagccagcgggaccacatggcttggtggcttggacaaacaagctcagggaggaaatgaggaggcggcggctgcagaggaatgcaaccctgttgggcacagaccatgcaatctggggctggccctggggccagctgggtcctgtcctccacctgctcaaccgtgcttccaccaaccagaggaaacccatttactagtttttctaataaatcaataatgctccaaaaaaaaaaaa

SEQ ID NO: 53520 - DNA, 753 bp, Homo sapiens
  misc_feature (1)...(753): n = a,t,c or g
tcaaattaattagcgtctagctctttgtaaggtaattgacagtctgagttagttgcttcccccactgcaaagcagcaaaatctgctctcaaaggcttcacgtagccgggaaaactccgttcccaattcagatcctctggggagggcatcaattatttcctattgtttttagcaccgattgttctgtctaatttgaaaggatccaaaaaaggaaatgatacttgggcattagtatcattctccatcactcttgaaagatatatgaagggaatgttgggcgcaatcagtctaggaaacatatttctcccataacaataagccagttctttttgctttgaatcagaaatagctccatcaggcccatgaaggaaagggaaacaaaactgagtgccaagcatatgataacatgctcagcatcatatgacattaggggattgcaaattgaaacaacagtaccaccacacacctatcagaatggccaaaatccagaagactgacatcaccaatgctagtgaggaatgtgggagcaacagggaactcttcattcacgggctgggtggggggatggcaaagtgggtgggagccactttgggggaaggacagtctgggcagatttccttaaaaagggttaaacatactctttacttaaacattctagttagggntttggctcctagggtgtttttaccccaagggagttttggaaaacntgtttcccaccacaggnaaaccttggcacntggattgttttttt

SEQ ID NO: 53521 - DNA, 157 bp, Homo sapiens
cccaggccgaccgggactccgaagcgccaggtgctgatggcgcgggcccgcgaggggccctgcccgttcccgggggtcacggccaagatccagcggaggatggaccaggtgttcacgctggcggtgcgcgagacggaggccctgatcccgcccgagg

SEQ ID NO: 53522 - DNA, 336 bp, Homo sapiens
ttttggttttaaaattattttaatatttgattctaggaagagtagataacatcaaaaacatgagatatgggtagctgataactttggcagtgcttacgttgttctcacagctatgatctaaggtctgtagatgccacacacaggtgaaacaacgtggtatttataatgcatctgggttagtgcctggcacatggcaaatgcttaataaatggtggttcccctctgaccctgacagttccaaggtttggggtgacttgtggatgattctaatgtcccaaccccacacacaagtcttcctgtatggaggtcttcttctagggtataagaaggtgccac

SEQ ID NO: 53523 - DNA, 808 bp, Homo sapiens
gctctccaaagtgtcatgttcagcaccaaaagggaataggcacagggtgaccccagaagttcatttgtgacacttaaatctccagatatttatcccacgtgggtctgatgcgggctcagcactaaattaactgtatgtggaaagtgtcaattgcagagccttctgtatcgatgaggcttccgccacttgtccatgcttagcccccttgcctcttccttggggagcatgcttttctatttcctatgtggaaacaggcctgacataagtgaaagggtttgggggttcaaggcaaacatgagatgtgggttcatatcttggccaccactcctgatagctgtgtgatcatggcaaacctcgttttcatcgtctgtcaggtggagatgaagagaaatggtgcatgtaaagtgctcagcatctgtgcttagcaggccatagtctccctgcctcctttttcttgagtaagcctttagaactttctgactcctctagagaaggcagagaaacgaatatattttgggtgccatttggagtctgggtcttttgttaaaattgtcctgtattatgttgaaaagtgtcggttacccccaggctctgggggcatctgtgatcatagaatactgccatgcttattttgcctttctatgttgagattaattcactgacgcctcattttccacgtgcatctgtcatagtctgggtaccagattgtatttagagaatggctcttgccactgttatgtacacacagatcgtgtgtgtaaacaagcaaattaaagtaaactgagataatgaaatcccaaaaaaaaaa

SEQ ID NO: 53524 - DNA, 731 bp, Homo sapiens
  misc_feature (1)...(731): n = a,t,c or g
atgtaacaactgtctgtaccataacttgtaaaaattatttagaacaagccaaaactcttttcacattcatcataatgaccacactttaaagtagcagcagctcattccttgggctttgcgtaaggaaagaatgactatggtgaaggtaatagaaattatagaaggattaggaattacaaaactcaggaatgggaagcagtggggaggaacaaaacagtaactcaggaatcctataaggattaatgattctttaagaaactataggtcatttccttcccagcaaagcttagctttaggaacaacaatagcatgagccacccacttattgaggactagaatttctaaacggtaattaaacattttaaataaagaacagtttgatggttaaggagacacccagacattatccaagtgctatacagagctacaataaaaaaaaaaaaaagtacaaggctgggcacnagntnnnnnnnnnnnnnnnnnnnnnnnnnnnnnnnnnnnnnnnnnnnnnnnnnnnnnnnnnnnnnnnnnnnnnnnnnnnnnnnnnnnnnnnnnnnnnnnnnnnnnnnnnnnnnnnnnnnnnnnnnnnnnnnnnnnnnnnnnnnnnnnnnnnnnnnnnnnnnnnnnnnnnnnnnnnnnnnnnnnnnnnnnnnnnnnnnnnnnnnnnnnnnnnnnnnnnnnnnnnnnnnnnnnnnnnnnnnnnnnnnnnnnnnnnnnnnnnnnntccgtca

SEQ ID NO: 53525 - DNA, 1104 bp, Homo sapiens
  misc_feature (1)...(1104): n = a,t,c or g
aatggaggagtcggaacccgaacggaagcgggctcgcaccgacgaggtgcttgccggaggaagccgctccgaggcggaagatgaggacgacgaggactacgtgccctatgtgccgttacggcagcgccggcagctactgctccagaagctgctgcagcgaagacgcaagggagctgcggaggaagagcagcaggacagcggtagtgaaccccggggagatgaggacgacatcccgctaggccctcagtccaacgtcagcctcctggatcagcaccagcaccttaaagagaaggctgaagcgcgcaaagagtctgccaaggagaagcagctgaaggaagaagagaagatcctggagagtgttgccgagggccgagcattgatgtcagtnaaggagatggctaagggcattacgtattaatgaccccatcaaaaccaggctggactccaccccgttatgttctgagcatgtctgaagagcgacatgagcgcgtgcggaagaaataccacatcctggtggagggagacggtatcccaccacccatcaagagcttcaaggaaatgaagtttcctgcagccatcctgagaggcctgaagaagaaaggcattcaccacccaacacccattcagatccagggcatccccaccattctatctggccgtgacatgataggcatcgctttcacgggttcaggcaagacactggtgttcacgttgcccgtcatcatgttctgcctggaacaagagaagaggttacccttctcaaagcgcgaggggccctatggactcatcatctgcccctcgcgggagctggcccggcagacccatggcatcctggagtactactgccgcctgctgcaggaggacagctcaccactcctgcgctgcggccctctgcattgggggcatgtccgtgaaagagcagatggagaccatccgacacggtgtacacatgatggtggccaccccggggcgcctcatggatttnctgcagaagaagatggtcagcctagacatctgtcgctacctggccctggacgaggctgaccgcatgatcgacatgggcttcgagggtgacatccgtaccatcttctcctacttcaaggg

SEQ ID NO: 53526 - DNA, 511 bp, Homo sapiens
agacccctcccgttaggcttcacctccaacactgaggatcaaatttcaacatgagatttggaggaggtcaaacaaactaaactgtagcagtgtttcataaaattgtttgcctgactcaggttgctagtaagccagcagagggatatttgcctcctaaatctttggcagaggcaggagtaaggaagccatttctggagtccttgctactaatttggaaaactgagcttctttctttcattgctttttcccttaagagacaagtccttactatattgccctgtctctcaagggaagacatcaagactggacttgaactcctgggctcaagcatcccccaaccttggcctctcgagtagatgggattataggcatgtgccacggtgcctgacttgagtttcttattctaagaacacttggaagcctgaactctggaccaggcccctcacttggagcctttgctttctgctcccttggtaaactgcccatattggggtgcactttgccctgccac

SEQ ID NO: 53527 - DNA, 1870 bp, Homo sapiens
ttttttttttttttttttgacacttttcgttatttttattgtttgacaagcatttacaacgttccattcatagacctaaaaacataaaaatagaccttctttcagcttataaaagaaatatataagaacttttgacatagacacgtcatgaccttatgtacaagagacaatggcaccctctccaagcaccagacttccgagtgttttcagatggatgtgttgcactggagccagtaaatgcgacgattagaagcctctgcttccgttttccatctggacgcgatcgaaccggagatgatatggaaaaatgcagtgatacaaagggtatagaaaccattctaaagctttttcagaaaaccagaagatatagcaaaaatttaatagaataaaactttcaaaagatcaagctcgaagccctggaaacccgaaaggcggggggaatacagggtgggaacgcaggaaaagcaggcagaggcacaagagcatgatgtactgaactctctattgtctggaaatataaagtcataactgatttttataaaatataactcctaaagctactataaaattcaggtctttaaagtacctactgatgtgtcaaacaccaaatagatattttccccaaaaagaaagttttcatagtattttaaacccttcttaggaagtggacattgtgacatgggaaaagaaaaagctataaacctttttttaaaaaaaaaaaaaaaattgaaagtgctataacttgtttttcttcttagtatttggatatctgtttagactgttaatgttttgagcatgtttaccctgtttcgttggcatgaagaaagtgttaaacacaagagaagtttttaaagaggttgttctgtttaaaggtttggttatggactgtcagggaaggggaaggtaatctatggatgaagatgcaattttgatggaaaaaccaatgatcaccatggcaaccccatgagaaggaggctcccctccctgccatgtgcaacagacacacacaccgcccaccggggtgtcatgtttaatccaaccaaactcccatctcaaatatagattcaaacattaaaaaaaaaaaaatccgctttttggaagaaaagtatatccttcgcatgagcttgctggcctttcatatataaatataaaaccaccacgcctcactctctctgtaaaaggttatatcctcattttttaggctcagggatacatacactaacactgtaaaattcctcatcctatttgtgcccctgtatctcaggtaaaatacaaaaaatagtgtttcttttctttctctcaagcgataaatttggatctcttttcaaagagtttggcatctctataattctatgcaaaactagagcttccgaacatggacacagagtaagaccagccatagacccaaaacaggaaggaaaaaaaaaaaagaggctcattgaaacatgaatcgccaccctctcctcacacattcttaaaatacacggagattctcagacatggaagagggaagggtacagtcagaacacggcaagctgtacacatttcattttgtgtgtgaaagaggtttccccagctaggagactgatttcagatagaaggatcgtgtgtgtgctactatcccttaaattaatctgttgtacatccgttaactcctggggtgatttgctttccagtgctatagaatcttttttcttttaattgttcaggccctgatttattgagaataaataaaagcccttagtaatatacagaagataggactcaagcttatttgggattctgatcaattctttctgatgttgttgaaaatgacaaagttgggtggctacatggcttcagaaccaagtcagctgccaaaaccgtgtgt

SEQ ID NO: 53528 - DNA, 615 bp, Homo sapiens
cacaaaccactcctgtgcagggcaaggccctagacccacctgccagctgcctcctggcctcagtcccagcccataagggtcagctcttgcagccctgagcccaccacacagcctggagacctgcagttgctactttctagaaagctcctctcagtggggttcagctgagatcccagccaggtcttcctctggaccttgtctgccctgactggagtttctagtatgtaaccttgtatgttctgcaaagcttaaagcccgaaagacctgactttgatctacagtcaggatgtgtgcctcacggccacgttgtttgaccaatgtggccggggtttgatgcttgggagaagtgacgcagcctccaccagcacttcctaaactgcactgagcacatggccacctggggagcttgtgaagatgcaggagggctggggtggggcctggggctctgcatttccaacaagctctcagtaatgcccattggctgggagcccaccctgataacaaggactcacaccccagctgtgtggcttgtatctgtccttgcacgtctgtctgcaggctgcccagaccacctgtccagcggttagagctcaggacccatgtgacaggctctga

SEQ ID NO: 53529 - DNA, 245 bp, Homo sapiens
gatcatatttataagacttctctccaatagggattttctcatgcctaatatcaaggagcaatttctcacatacattaaactcatcaggcttctttctggaacagttctttttactaataattaagcccgaaatatttttcaaattcatttcacatgagtcacatattttatagggataatttaattaaagaaacagggtctgtgcccaaattgaaagttttgcttcctctatctccattttctcc

SEQ ID NO: 53530 - DNA, 1102 bp, Homo sapiens
agtaatatgctgatttagggtacacagacctaacatgatgactaaaggaagaacacatcagacatgaaaatagacactgttagtttctacaatcctgctccaggacagaacatgtatttgaaaggttaaaactattccaataataaaaattgattagtcaaatatttttattttgccaaagaactctaaaagcctttggtgattcccaaacatacaatgaaccccaaataaaacaaaaccaaattgcactattacaaaggaacaagtccatgaaagtagagaggaggcgccagttaagggacagcaacttcaaggagacggttgttttttcgtttacatgttgggacactcccatttttctggtttccctgaataaacttcacacatactttgtcctgtctgaactgtaccaggaactcatcggaaatctcaatattgagcttctgtttggtttggctgagagttgtgcgatagagcttggtggccatttcaatcaggtgatcactgctgaagagaaagtctcctttactagctgcttctgagccctctttgaggtggacggcgaagaagccatcattttgtgagctcattgataccttggtcacatccaccagtggaacctctgacttgatttgtccagacttttggtcagcaacgaaggagattattgtttgttaagaggaaaatccgagatgtactcttcccattagccacggtttaattttgttacacgacttcagcaatgatgatcttttcttcaatggcatctttgagtttcttatacttggggttcttgttgatttcccaggtaagccccttggaatggttgcccaacactagatgggtataaagccttcttgtctttgaagagttcactggcttctagtttctcttcataaataagtttctgctggtctgtgaattggtccctgtattttttacacctccacaagtggaaaatcctttttagctccttgtgagtagaatccaagaataagtaaggtcttgagggccaattcttgtctattggagataaggaaggcatcttatttttcatttccaagaagtatttttgcacaattctctgaagcgtaaactcata

SEQ ID NO: 53531 - DNA, 832 bp, Homo sapiens
gtttttacagaaggagttcaaaatttatttataaatttgtgtaaaagaatataagacctttttcttttgtacatatttgtaccataaagaaagtagggattaaaatctaaaaagacccccaaagctttcaaaacctgatctgagaattagataagaatatgtcacttagaaagacaagcctgtagcacccatagctctgattaacctgaaagcatcaagtgactccctctttttctaccctaccaacatcactctaattatacttccaattagaaaaataatgtagcatttccctggcagtagagtttaaatatgagttcaggaatcagctcctccaaacatgcataaatgaggacaaggagaagccagtcactcctgactgcacggtcaagtgtgtgggcagttgaaattaaggtaaaaacagtgaggctgaacaaaatcacattaagaaaaagcatctcatgaggcttttcgaggtcagttgatgaaggccagataggagtcaatattttctcatataccccagctgttaccactattcatattccaacagcctccagattgctcgaggccacctggttgacttttaccttggagtcggtccagaaaagcattatttaccctcctgtgttcagtctggtggattttggctctttcttgctcttgctgctgccgtttcagttccagtaattcactcttttgatgttgttcatccttcatcttttgcaattttctgttttcttctgcctttagagaatctctgtaagcccagcttctggcccatgttgaggattgtgggccacaaacagcactttgacaggcacttctgtcc

SEQ ID NO: 53532 - DNA, 180 bp, Homo sapiens
atactctgttcgtaagcttccggtgaattttgttccacagactcggaagaaaggttggataagagttcactggagatcgacaagtactcgggatagtgaaaagccggagttggaacatggatagccgcttgcaggagatcccgtgagcggcagaagttacggcgacagctcctgcgcgca

SEQ ID NO: 53533 - DNA, 515 bp, Homo sapiens
  misc_feature (1)...(515): n = a,t,c or g
gtagacagagggtccttatttgcttgtccgtggtgtctatgtgggcctattgagggaatggtagttacttgaaggttcacatatgtaagcgtgtggacccagcacagtctgtgacctgattccagatcctcaagagtggagaaggaaagaaatatgatgatttcctatgcttgaccctaacccaaccccaaaactgctagggattcaacagtgagtaagatgtatgcaataagagaacagataacttcttcaacaatgtgcatgccgtttgtgtaggatgttcaggaacttacatatgtgtgaatatcactcccacctttacacacggcacacacactggcaatcacatgggcatttaaaaaatatattgtgtatggggaacttgggcgaggtcagtcaggacctggagctgtaattcataggccttatttgccacttctttgcgttgtgtatacattgaatggctcatagattttaagagattttttttttgtnagtntttttctattttcact

SEQ ID NO: 53534 - DNA, 619 bp, Homo sapiens
cggctccttaccagctcacctctcgccgcacatgtttgaggatttaagtgccctgtatgctcaaaatttgtatcctcagatgaaatggatttgcatcttgtaatgtgtttaacaaagccacgaataacctataatgaggatgtactgagtaaagatgctggggaatgtgcaatatgccttgaagaattgcagcagggagatactatagcacgactgccttgtctatgcatatatcataaaggctgcatagatgaatggtttgaagtaaatagatcttgccctgagcacccttcagattaagcgtcagcttcctgttttataggttttcttgtcttgacaagatgcttgaaaaaccaagaggatatgaaaatctgtctctggagaaacaaagacgcaggcatactcagccagaaatctgagttttgtgagacttggtaatacagagatggacaatcgtactggggtaaaaaaaccctgctgaagagaggacagtgaccacagaactcagtgtaccaaacatgcatacaaaggacacacagggattttgaaaatgctgcacatcccttaatagtcatctacataggtaatactgataaacattttgtattcagacgccaaa

SEQ ID NO: 53535 - DNA, 446 bp, Homo sapiens
gaccagtgtaataccctgaatccccttgtactcccagagtacctcatccacgctttcttctgtgtcatgtttctttgtgcagcagagtggcttacactgggtctcaatatgcccctcttggcatatcatatttggaggtatatgagtagaccagtgatgagtggcccaggactctatgaccctacaaccatcatgaatgcagatattctagcatattgtcagaaggaaggatggtgcaaattagctttttatcttctagcatttttttactacctatatggcatgatctaaagggattctatccagcaagatcctgtccaagagtagcctgtggaatctgatcagttactttaaaaaatgactccttattttttaaatgtttccacatttttgcttgtggaaagactgttttcatatgttatactcagataaaagattttaaatgg

SEQ ID NO: 53536 - DNA, 1520 bp, Homo sapiens
gctgacaagagctcagtcccaccatggatctgaggaggaaagaaaaaaaagaaagattttagctcgaaagaagtcaaaacgatctgctcttgaaaatagtgaagagcattcagcgaagtacagcaactccaataattcagcaggatctggggccagctcacctctcacgtccccgtcatcgccaactccaccctctacatcagtagagcatgcaccattttgaacgtgaattttcgggatatctgcattacctccacctcctccacctccaccaccaccagcagctcccttgcctcctgcgagcaccgagggcacctgcccagctctcgtctcaggctgtgaatgggcatgagccgaggggccttgctcagctccatccagaatttccaaaaaggaactttgaggaaagccaaaacctgtgatcacagtgctccgaagatcggctgaagcttcctgtttacacttggagggaaaagttcttttttattcctactcacccctaccccccaaactaccctcttcctgggaaagtaattgctgagccagtacagccacaaacagtactattttgcagatgctcatgtaagcagcttttcgagagaaataattctttaagcagaataaagttaggctggcattgctcccttaagatcttgctcctttattaaccctgtaaaggagtcttgtttatcctctaatggccaggcttttgggacagcagcatattgaaatattttcaccaactaaaggaaatagacagaaaaacaatgacaatattcaatcacagcagtaaatggcctttgtgttgcaatcccttctaccccatcagacagctcctagaaacattcctcttacagttcatttctctaaagcattttctgattcttagataactccaatttttgctacctttatcttagacattaacactatagcccaaagcatagttactttgctaaatcagaaagcaactgagttctttgttttctcctcaaatagaatggggaacgttcacaacattctcttaagttctaacaggaataccattgtggttatagaactcagggctgctaaagcaactactctagacccatagttctttttagttagatgtattgaaacagacaaaaatattaacatcagaaaaagctcttgccaattagaggatcttcttaatcctcagcaattaagtttggggtttgaggggggcaggtcattgttacaacagaagtaaatttggcatctatagaaatcaattatgatttttgaaagatttatctaaatatatcaatatagcatctctttaatgttagtcatttattagaaagatcctttatcctgatttgcttaaacctttcaataaattgcactttaaaggattataaataatccatttaaaaattcaagtacacacatcagtgttggttactatgcagagaatgtcattgtgtatagtttcatgtaatctgttatgtcagctgtattttttattaaaatcatgtcaagaaaaaaaaaaaaaa

SEQ ID NO: 53537 - DNA, 433 bp, Homo sapiens
  misc_feature (1)...(433): n = a,t,c or g
gtctgcggtgacttggctggcgggatcaagtgcacctgcttcaggctgaggtggcagatagtgagcgctggtggcggagttaaagtcaaagcaggagagtaattatgaatagcgcagcgggattctcacacctagaccgtcgcgagcgggttctcaagttaggggagagtttcgagaagcagccgcgctgcgccttccacactgtgcgctaattgtagagcgggaaggaaacttcaagatcactgaattataacttctcatttttctgtggtaaaactagctccccacgatgagatggtgctgtgctggctctgcagtttctctctcttcagtcccattttccggaagtgtgatatggcgtctttatctggtttttccatgccttttttcttcaaatagtatctantctctccttttctcttccttcttcaga

SEQ ID NO: 53538 - DNA, 506 bp, Homo sapiens
gcatttttttgttatagaaatattcaaagtgtaccaacgtagagaaaatagctttaaacaaagcccatgtgtacctatcagtatgctttaactgttgtcacctttctgccccacttttatctatctcgaacacccctttctgcacactctttaaaccactgtattaacaaacacattagactgcatcctgccagacctacccatacagacatcaaagtaatgattattgcttattgcctgacctaggatgtgagctccatgagaacagagactgtttacctctcgctcccctgcacctaaaacaatgcctgcttggtgtaaagtaagtgctcagtaattttttaatgtgtgaccaatgaaataacttcaagagcagagagctcttttagattagaggcacatactaagtgccagcattcaacaaaagacagacggaaataagacagatgcaaatagatctcatttattaactgtgtaaatcagctgccactgcaattaaaaaaaaa

SEQ ID NO: 53539 - DNA, 512 bp, Homo sapiens
gtgctaagaatcatcgtatgctattgactgaagaatataaccttaagacagcagtagctgctgtaagagataaagtaaaacatctcagtaactaaacatagttcaggcttatttctcgttcatgtcaagtccattcacgtgttcagctgttggccttctactcaattattcaggaacccaaactccttttatattatggctttgctatcccctaagaccttggagtccttagtttccaggcaacggacagaaaaagaaaagctactagaggattgcatgaggattgtttcttatgggtgaggactggaaatcacatactatttatgtccacatgccattgaccagacttcagtcacatgccacactgacctgcaagggagactggaaatgtactatggacccaggcagaagagtaaacgattttggtaaacacatatcaagtctctgaccatcccttaaagggcagactgcatcttagtcatctttgttactcttgtgcctatcacaccaga

SEQ ID NO: 53540 - DNA, 403 bp, Homo sapiens
ctggtttgttctcggtgaacggcgcgcggggtctctcctgagtgcgagctacgggaccttcgccatgccggggatggtactcttcggccggcgctgggccatcgccagcgacgacttggtcttcccagggttcttcgagctggtcgtgcgagtgctgtggaacgatttgtaaccctggaccgcggaagtctatgtctaagctgctttacatccgcctgccgctgttttttccagagatggtctgggcctctctgggggctgcctgggtggcagaggtgttcagtgcgacaggacagttgtaaacggcatcatcgcaaccgcgtggcagttggatcatcatcgctgccacagtggtttccattatcattgctttgaccctcttggggggaaaatggctccatat

SEQ ID NO: 53541 - DNA, 438 bp, Homo sapiens
aatttggtggcggcgtccggagggtgctggtttgttctcggtgaacggcgcgcggggtctctcctgagtgcgagctacgggaccttcgccatgccggggatggtactcttcggccggcgctgggccatcgccagcgacgacttggtcttcccagggttcttcgagctggtcgtgcgagtgctgtggtggattggcattctgacgttgtatctcatgcacagaggaaagctggactgtgctggtggagccttgctcagcagttacttgatcgtcctcatgattctcctggcagttgtcatatgtactgtgtcagccatcatgtgtgtcagcatgagagttggatcatcatcgctgccacagtggtttccattatcattgtctttgaccctcttggggggaaaatggctccatattcctctgccggccccagccacctgg

SEQ ID NO: 53542 - DNA, 1632 bp, Homo sapiens
tacacacaagcactatcgtgacgcgcgctttattgtttcaactcctgaatccactggccgaccccagagccagaagagtagcaagaattcaatcagcaactcctgatgtggacaaacaactgggcagtgggaataggcagttggggggctgtggctcggcggggccgggggctccacttactttcccgatcgggtttcgtcttcatccccagccagagcccagggctgcccttggtgacgcccaggagaaaaccccagcccgcaccctcaccacagttccatttgtacatccaggaagcccagtttgaaaaacaaaccacgcctgtaaactgagttggatgaaaagagctgccttgggggtgggaggctaaggaactgttcacggtcttctgggtgggccctggattcccgcacttctggagcagtcctcagacagccaagggatccatccacgggccagggcttcccgaggctgtctccacggtcgctgggtctcaggagtcgtcctatcacctgagcgtgctcgctacttctgctaccattatggccacaatgacttcccataaacttaagtcattgagaccatggaattctgttcccatccgattcctgttgatggacattcgctgttttggcgtcatgggaactcctcggatggtaagtcagtttaaggacaaaagcgtgagtccatcgttcctgggacagtttccagtggccctggtcaggccacgtccacactggagaccccttgtgctggacaggagacgcaggccgctctgtcggagaccacgctgtccaaggcccgcatcaggatgtctggcatgtggtcggtgagcatcttcggacctatgagtattttgctgaattccgcttcgtgtgaccacttggcgctatagtgagcagcagagcagcagccaaaccgccccgaggcgccctccctcctgcaggtggatgaatcctgccgggagggtagagaggggggtacttgggagaagagtccagtggggagtcgctggagaagctgtaggccggggaccagcgcgtcagtaggctctgctcccccagaagaggctgtgtcaggacttcctggtcgcccccgtccagctccgtgggcaagttgttggggtttcctccaaacagttcgtaccacaaaccgtgcagcaagatcttgtacttgggtttattgcagtgcgcgaccactcgcaagattcttctcttcagatcttccaagttggtcacactgagcctgggaatcacatccttccccaggacgagtgacacgatgaagctctgagaatattcctgcagagctttgctccaggagcccccggggtggggagaaggcgtagcacctgacctgcgggtaggcggctctgaccatggtggccagcagggcggccgcccctcccccgaggctgtggcccactatgaccagccggtactcaggagcaatgctgaaggcttggctcaaaatcccgtcgttgatgagtcgttggtaaacgtatctggcagcttgagaaatacccttgtgtgccaggcggtcctgcacctcacactccacgtccagcacctcactctccgctgacaggtccgtaagacatcctgtaaaaagggcgttgcagaagcggccgt

SEQ ID NO: 53543 - DNA, 665 bp, Homo sapiens
  misc_feature (1)...(665): n = a,t,c or g
gcgagtcagacacagttcctatccttttggagtttacattttatgtgtggagacagacattgaacaggatgcacacaggatcacaggatgtgacaaatgcagtggaggagaaagataggctggtgtgagagctgttaatgggggctctgctctagcctgagaggcaaggaaggcttttccaggagtcacattagaggaacaatctatacaagcagggaactaggctgggggaagtgcagggagctttttaggtggaaagaacagcatgttcaaaggcctgaagctggaaggaggctggctgacttggctccagagaagctgttgggggagtgtgggagagacaagacagggagtaggggtggggagaagccagacctttggagtcttgtaagcctggttaagacacgtggactgtcttctgccgtcaacaagtggctctnagtccagccagatcgaagactncannnnnnnnnnnnnnnnnnnnnnnnnnnnnnnnnnnnnnnnnnnnnnnnnnnnnnnaggtgggggccgcgacagcccggccgctgcggggtcagcctgcggtctccgcctgactcnagctactccctggccccgnaggccctgggcgctacccacgtcagtgagtgctcacaagtctgtgaggtagcggcgccacagagaga

SEQ ID NO: 53544 - DNA, 680 bp, Homo sapiens
  misc_feature (1)...(680): n = a,t,c or g
tttttgggtggagcgggtactttatgaataccacagggacaaaggaaggctgctcttctcacacactgctgaatctccggatctccgcaaggtcatagccagtcacagcaaaggagttgcctgaggaatcacaaaatcgagcaccacacagctgggtgtcggcgacacactcaccatgacagtgttccacctcaatgtagccactctctgggtttctgctcagcttccagatatgcacaaaggtgtcctcacctgcagagagtagcttgcccacctcagaagccaggtccagggcgcagatggcccgggcatgggcattgatctggacatgtagatttcctgtagtggcctcatatagatgcacttgtccgttcccatagcctgctgctatgatcccctgccacagctgcacagaggggcacggaactctgcaagggtgacacccaactttgttttgcccagatcaaatcctactccccagcctgaagctatctcaggaagccctctaccctttctgcctcacctacccaaatcctggaatgcgggtcaataatgtgaattctggcctgaccgccagacacacagcaagcctgagtcatctgccggtcagcatgtcagccacacaatccttaagggaaagggaagatnaacccntccctttctcccctgctatggntctg

SEQ ID NO: 53545 - DNA, 300 bp, Homo sapiens
cagtgaaatatgtccaattttatttccagtgcattaaacaaattttaaattaaaagaagaaataaacgtttccccccatctttctaaaggaaatgactaacaaaagtacaatacaatagaatcaggcattgccaagaatagcatgatgtgcaacctcaattacatcaaagaaaacaaatagacaaacaagaattatagaacataagtatgaaggagccaagattacataattccaactatggtatgattggcaagcactggttaaaaaaacaggtaaggctacttcttagattttctaac

SEQ ID NO: 53546 - DNA, 370 bp, Homo sapiens
aaaaaaaaaagatgtacacagtctaatgaattatgcaagtcttaaaatgtctcaagaaaaagattactcattaggattttcgaatgaataaattcaacataattgttggtgcaactgctctctcatgtaataggtaccaaaatctgattcatgttttatattggagggacgggtacttttctgaagaattttaataaaggcaaataaatgccttttctaggatgctttatagtagagcccacaaaggttttcttcagcaatactatcagtgctgcttttctctccatacttccaaaacctagaattttttgccagtactttttccctgttttcttctgagtggtaaaatccatctgggcagattttctac

SEQ ID NO: 53547 - DNA, 1433 bp, Homo sapiens
ctggatcagagggtgattaccctgtgtataagagtatgtgtctcactgcaccttcaatggcattgagtagatcgtcagtatttaaacagatcacatcatgcgtgagtacaagctagtggtccttggttcaggaggcgttgggaagtctgctctgacagttcagtttgttcagggaatttttgttgaaaaatatgacccaacgatagaagattcctacagaaagcaagttgaagtcgattgccaacagtgtatgctcgaaatcctgggatactgcagggacagagcaatttacagcaatgagggatttgtatatgaagaacggccaaggttttgcactagtatattctattacagctcagtccacgtttaacgacttacaggacctgagggaacagattttacgggttaaggacacggaagatgttccaatgattttggttggcaataaatgtgacctggaagatgagcgagtagttggcaaagagcagggccagaatttagcaagacagtggtgtaactgtgcctttttagaatcttctgcaaagtcaaagatcaatgttaatgagatattttatgacctggtcagacagataaataggaaaacaccagtggaaaagaagaagcctaaaaagaaatcatgtctgctgctctaggcccatagtcagcagcagctctgagccagattacaggaatgaagaactgttgcctaattggaaagtgccagcattccagacttcaaaaataaaaaatctgaagaggcttctcctgttttatatattatgtgaagaatttagatcttatattggtttgcacaagttccctggagaaaaaaattgctctgtgtatatctcttggaaaataagacaatagtatttctcctttgcaatagcagttataacagatgtgaaaatatacttgactctaatatgattatacaaaagagcatggatgcatttcaaatgttagatattgctactataatcaaatgatttcatattgatctttttatcatgatcctccctatcaagcactaaaaagttgaaccattatactttatatctgtaatgatactgattatgaaatgtcccctcaaactcattgcagcagataacttttttgagtcattgacttcattttatatttaaaaaattatggaatatcatctgtcattatattctaattaaaattgtgcataatgctttggaaaaatgggtcttttataggaaaaaaactgggataactgatttctatggctttcaaagctaaaatatataatatactaaaccaactctaatattgcttcttgtgttttactgtcagattaaattacagcttttatggatgattaaattttagtacattttcatttggtttgtgtgtttttgttattgtttatagattaaagcgtttattttataatgaaaaaaaaaaaa

SEQ ID NO: 53548 - DNA, 516 bp, Homo sapiens
gctgactttcatcaaccaaggaattaatctgcagagcataaaatccatttaattctccttttggaatttctaaaatgccatcgggtaaaagaggatgctccaaatccctcagatcagtaaggagccactgctcaaacacttgtttattcatttgggcctgactcaagttaacattattattttcttcttgaatccagttaatacaagcttccagccacatcggaggtactttaacatgccatgcagctaaaagccaagtttcagctcttaatgcaatactagtcacattcatttcttttaaataaaagaaataatatgcatctattaccacgaggaacagcagcacaggatttgatgacagaatttggaactggttgttagtggattacttgaaacctccactgctcagaaatggcccgcgccgcagctcgtcccacagcccacagaccacagcccggggcgtggtaaggggcttcgggcacgagtgtgggctgtgaaaacacgggcataagtctg

SEQ ID NO: 53549 - DNA, 537 bp, Homo sapiens
tcttatccaacctgtaggtggagaactggcccagagggtaacaagtacttgcagtttctctgaaaagttcagtccctcctcctcttccttttctctttttctcccttccctgatagcgaaggagtgtttttctttaccccttgacagaagtggtcctctgccaccttatatttccctgtagtcctcctcttctgtggattcatatgggagcgatatgtcatttaagtaaagttactgttcaacttagttacaatgagttttaatagcgtcccagtgctacattttatttttcaagcttgtactcacggtttagttttttctagttgttagtgattgcaattatcaggatgagcctccttttagcagagtgaacccctttttaaaggccactttaacaacaaccaccaatatattgtttagagacggtttctgtctagtgtaaaacttgagtggtctgactctaataaatggttttgaaatgtgtgactggtattataaaatttgtgaataaaacatataaaatatgaaaaaaaaaaa

SEQ ID NO: 53550 - DNA, 386 bp, Homo sapiens
  misc_feature (1)...(386): n = a,t,c or g
cttacagtatgtgattgtaaggacaatggctgtgctgcagtcaagtataggctgaggtacacatcctgcacagtatgacacagtgggattggagcacaggcgcacaatcccatgcattacataatcacagctatgtagccataacgtgggagggctcatcacctgcctctgagccattatggtctgtgaggtgcataaatgcagcaccgacagtgtgaagaaactgctgaataaagccatgtcccacctacctggaacctaacagtgaccttttgagattgccttttttcattcagcataatgccaatgagatccatccaagttgtatatatcaagtagttcattctttttttttaatcactgagtagtattccatggnatggatg

SEQ ID NO: 53551 - DNA, 614 bp, Homo sapiens
cggcccagaagccgagggactctctaggctgccgggcgctggtcgtcagcgccgaggctgggctgaggcgccgcggtaccatgaggcgccggtacttaagagattatggcatcagaaacccacaatgttaaaaaacggaacttttgtaataagattgaggatcatttcattgatcttcctagaaaaaagatctctaatttcactaataagaacatgaaggaggttaagaaatctccaaaacagttggctgcttacataaatagaacagttggacaaactgtgaaaagcccagataaacttcgtaaagtgatctatcgcagaaagaaagttcatcatccctttccaaatccttgttacagaaaaaaacagtcccctggaagtgggggctgtgacatggcaaataaagaaaatgaactggcttgtgcaggccacctgcctgaaaaattacaccatgatagtcgaacatatttggttaactccagtgattctggttcttcacagacagaaagcccatcatcaaaatatagtgggtttttttctggagggtttctcagggaccatgaaacaatgggcccaagttttgttcagcagggatatgagattgaatgtagctt

SEQ ID NO: 53552 - DNA, 129 bp, Homo sapiens
ttgttttagtggaaagagcaagggactaaaggtcaggagacccaggacccagtcctaaagctgcaaaggttagatctcggcctaactttccgttcattgcccccaatttgtctggcctgtaaaatgaag

SEQ ID NO: 53553 - DNA, 278 bp, Homo sapiens
gctcaccttctacgacatcgccatgaccccggggtggttggttctagctattgccatggtacgtttttatatggaaaaaggaacacacagaggtttatataaaagtattcagaagacacttaaatttttccagacatttgccttgcttgagatagttcactgtttaattggaattgtacctacttctgtgattgtgactggggtccaagtgagttcaagaatctttatggtgtggctcattactcacagtataaaaccaatccagaatgaagagagtg

SEQ ID NO: 53554 - DNA, 830 bp, Homo sapiens
acatgcaataccacaaatttattataatacacagggaaaaacaaactcaaactttgacaacatccacagaatgttccagtctttaaaaagttagcagaaataaagggtaatggaaagaatataatctcgtaattttatacttaaggctgtaaatggcaaagtcccatagatatttaaaaatctatatttgtatttatttataatatagatataggccctcaaggattcatagagatttatgtaataaactagattttggaactatttattttgttgttgttgttgcttgttaggtaagcaaacccaaacaaattaagtcctgaaaagtgggatgaaatccccaaaggaactctatggtgaccacacagaactcttttaataaatatggcccatacaaattccatatccagtgaaaatcattttgatccacaatcatgttgatgtttctatggaggatacttctagcagctgtgatttcttttgtagcattctggctctccacttctattcatataattgagtatgtgttttattacatgttagcttataggcaagttaaacattttaaagactacagggaggttaggagaggttgtatgatgaaggtcggaaagtatgcaagaaataaactctcctgtttcatctcttttatttttgcctcattttggtctctatactacttgggttctttggaaatggtgtgatttctaacagcacctagcataccttctcattttagcacaggttagatatgaagagccaaacctggaaaacagttaaggagtcctgagacctttccagtggaataaattagagcagcagtttcattt

SEQ ID NO: 53555 - DNA, 1139 bp, Homo sapiens
  misc_feature (1)...(1139): n = a,t,c or g
cttttcactatcatagtcactctggtgaatccaagcataaacagacaaatccaactacaactcaacagggtgcagatggggagggcagggcaacatctatgtatatgttcagctgctccagcagaacagacagcatggcttccagctgggactgggggaaaagaaccatttccaagggggtgtgttcccctttgtcgggtgtggagggctgatactatgcatgtggagctgagcagcgggctgggctgtctgggaggttggcagctacaagctagggtgcaagtgggggacagcgggactgtgggcctgccctgggtgccttgcccttccatcctggtgccaccactgacaaccaagacacccagcctgctgcttgtggggctcagcacaggaagggggccagggcttctcaggggaaagggctctctccatgtcaacaaggcagaaacacctaagggtcacagctgagcagtgccctggctcacatctgtgacgggaagaggagacagggaacccgaatcagatcatgagattcgtggtgagggtcccagttggatgagtggaactgagagtgagaggctggggtcccactcttgtgcctggactttgccttcccttaatttcaccctcagtatggagtaggtacctcctgcaaccaaccagggtcattactgagaaggggtggtgaggctgggaattcgggacattgtgacgtgtgatgaggggtataggcagtgattgggctctcacggcagacaacagcacagccggcgccagacaggggtgactgcagtggccgtgggaaggacagggttgacatcgtctgcctgtggctccacgaacacaccaagtttcaaatcctttgttgctgccactgcctctgtgacacccccacaacagggccagaggtggttggcacccccagtcccttgaaatcccccagaagcagctttcagagcctctccttctccctcttctacatgggagggggggaagaaaaaagaatcaaaaggaattgcctgaggaaatgttggatgtggccatgtttttgaatgttttttttttaaaaatattttatttattaggcccacccttcatttgggaaaggtgaaatttgtttttaattcccttnattgatt

SEQ ID NO: 53556 - DNA, 684 bp, Homo sapiens
  misc_feature (1)...(684): n = a,t,c or g
ggcatctcaaagtgtttgagccacaacacctggcaactcttagctcttgtggccagagcaggtcgtagtcatgccttcaaaattgccttcactcctagaaaaaaatggagaaaggattatttaaaatctagagaaaaaggtgagcccataagtcactctctctgaattccagaagctcagcaaataatctggggttggaaccaattgtgnaacaaataccaagtcctgctgatgttgatttggaccaaagtgatggagaatctagtttgggagtctggtaatccttgggaggccccagcatcactgcagctcaactgtcattcctgccttgcagctcattttaaaccctctggcagcactatttctggctgggccatctatttttggtggccagggaagttgttatttgtttcgttttgttttgatgtggtttacagtgctctagtgtgatgatgaagataacatctggttattccaggattgggggtgttgtgggtgtgtttctatgttggggaaggcagcaggaacatcatcttaactccttttctttatccacatgatgaggctgcctaagacggggtttattaatcaacctgatgcaatagctctgtcattagtgctcttgttatcaggcaagaaaaggctgtgtacaggatgggtatcagtatgcttctgagtgttagc

SEQ ID NO: 53557 - DNA, 470 bp, Homo sapiens
gtgagcttcaataccctgagatatctcacaaaggccagtgatgccattcttcatattttgtaaatacagtcctccaaaatcggtattaatatgaaagatgaacagtgaattatttcctctgctcttgtggacagaggtgtacctgtggaagatacatgtcatttccttaagtttttgtatttaaatgaaacaggcatttggagagtagaataacaaatggttaatggcagttgaagaacagcagctgaccaagagggagagtcccatccaaataatgcacacagttaccacatgtccttagctgccacttaggtaaatgtacccttccaagagcaatggatgccctgtaactgtaaactggaaagagttaaatcagaaaaatcgattctcctcagtgtctaagttttttttctctcctgcaaattcttagaacagcaattgtatgggcaaaattattcttccttttcaat

SEQ ID NO: 53558 - DNA, 238 bp, Homo sapiens
tttaagccactgaaaattatttatttagaatgtttgaaacatcaaagtatttatgatacaacactaaataaggaagagcacagaactaaattcagtaagtactcaatgtttataaaaatattgaaaaaagactgaaaggaaataagctagactaacaatacttccctgcttctaataattttcaatacattccaccctttctactacaacgagctttcttagtcaaaaaaaaaaaaaa

SEQ ID NO: 53559 - DNA, 566 bp, Homo sapiens
gctagtagtcaccatgattcaacagtctcaaaaatcttacaaataaaattctgagaagctttattattctataaattcttcagggtacaaagggtgacatattgaggtgaaattgtcagatttacttagcctggtgacatgaattagctgattgtggaactctcagcagcatttcacgtattgttaacatgtatgggcatttattaggcatattgtatattatataaggattgaggggatgtcatattttcagctttcttttaaataaaaattgagtatattttcctattttatatcagggtaactaaattatggctagttatgtggggaaaaaattgcaaagatgctttgacagatataatccctttggtgctccatctgatcaaagttgaaaagttgatgttttttaagagacaagctttatcattgtctctgatttcagtagaataatggtttattgttagacaatgatgtttctgcttggataaatcaaagataaattacagttacatggttagatgcatcttttgtcatctatattgtagtttctacataactgtaaacct

SEQ ID NO: 53560 - DNA, 522 bp, Homo sapiens
cagctgccagcccagggtctggcataaagtagcactcagtatatgtctgctgaatgagtgggtgaatgaataaatgaatgaacagtactccagctctcagttcaccaaagtaatctgggtatacaggctgggagaggtggggacacactggggcagaagatgtggagtcacctgagcacagaggaggtagagaagtcagagatgttaccatagaggggaaatgttaggcaaggggaggttccgggtgggggtgggaatgaaaagcttctctgcagcttgagaagcaggaaatggtcagcaagtagctgagaggcaggtgctggtgggctcctgggctggtcttgctgtagccagagacacagggcgtttccagagcccccagctctgtgcttccttcctgggtggcttcctttgtgttcctcttctgaatgaagagcaattccaaaggcgtaagtccccagacaccctgctaaggggtacacaccagcagctcagttgtgcaagctagctacaagctgtctt

SEQ ID NO: 53561 - DNA, 429 bp, Homo sapiens
caatggagtctagatttttcgcaagaatttcgagattttaaaaatagagtcggggaacaggagtttgaagcttggggagttggaatgtcactagagaacaaaaggccggaaatgtttccatgataaaaaatggttaaagaaaaatcccaggagttctgttgtcttgaaagtcatagaaacaacttaaaagtagaaaatggttaggtgttacggctttctcgtcgttttgcttccgtatgttaaacatacagcactcaccaacgttgaaatgggcattttccgctgttggaacagcaaatctgttaatttcaagttgctccagagaaaacctgagctgtccctttaaggggttctgcttttcctatttgtgttggcatttgaaagattgtggaggcagaaaactttctggaatgtcaaaaaaaaaaaaaa

SEQ ID NO: 53562 - DNA, 390 bp, Homo sapiens
gctcccaggtttacagccccggcctgccgcctgccccggcccagccctcaagcatcccaccctgcgcactggtcagccagcccacggtccagttcatccttcaggggagcctgccgctagtgggctgtggggcagcacagaccctggccccagtgcccgctgccctgaccccagcctgagagccagccagtcaagccacttgcagccagcaactcggaggagaagaccccggcccccagggttagctgcggagaaaaccaaagaaggaggagtacatgaagaaggttgcacatgcaggagcgtgctgtggaggaggtgaagctggccatcaagcccttctaccagaagagggaggtgaccaaggaggagtacaaggacatcctgcgcaag

SEQ ID NO: 53563 - DNA, 2409 bp, Homo sapiens
  misc_feature (1)...(2409): n = a,t,c or g
tttttttttttttttttcaatatttattaaaatctttattcattttcttttttcagaattgaaacccatagaacacattagaaatttagatccatatctgtcttgtttggtatcttaccaagtacaatctctgtctgtgcaacagctctgagaggaaatccttggcagatcaaaagagagggtagtggctcccacactttccatttaagcaaataaatgagcttctgagtagttgttcccagtttcacccaacattttgtgtttatgagaaacaccttagttcctaaaaacctgtggtagtccagtacctaagcccctaccttgtcaccacccagacttgaggaattgaagggaaaaaaactggccttcccctgtaggatgagtttcccaaggccagatgtgcctggctcactagtatgtctggcctgtgctggcacactagagttgctcagtagttattcgctgatgaatggtctttatgttaattagggtccactctcagagactgagaacctttcactaaggttctttctgaatccttcagaaaagtcagtgttcccctttgtcaaaataaatatgtttttcttgctagaatacatatacgactatatacattacatatacttttactcatgtttcctgaagctcaaactcacaggatgaggcatataagatagcttactgatgatgctgttttaccatcattgaggtgtggtcatttactggtcaaagaatacccgggtgatcgagaagaaaggctgaagaaatatggcggatgggaagggaagggaaggcaaaagcattttttttttttagaaaaaaaagatcgatttctttggaagataatgctggcttcagatgacattgaaaaattgccacgtataggactcatctttcccaaaataatatgcaattaatgtacctgaattcttccatttccttcttaaatttcatttgacatattaaccctgagtgcaaacagggggcaatgccttattaatacattcttgaataatactctgagcaaatcagatcctatgaatttgttttacacagaaaattatttacatttcccccaaacccacaatgcagccttacactaaagaacagttttataacaaaacctttatactcaaatttatccattcgaactttagaataaacatgttttaacaagttggaggagggcaggaaatggccatgagttctgattttcctagttttgtagtattaaaatgtctccacgtctacctttggatgtttggtaggcatacctaacttacagctgatccaaaccctgcaacgacttgattgtaacagccttagattctaataaataaagtaggacagtgttacaaaacttaaaaaaaaattccccccccttttttttttttaagacagagtctcgctctgtctcccaggctggagtgcagcagcacaatctcagctcactgcaaccttcgcctcctggattcaagtgattctcctgcctcagcctcccgagtagctgggantacaggcgcatgccaccgtgccctgttaatttttgcatttttagtagagacggtctcaccatgctagccagccaggctggtctngaactcctggcctcaggtgatctgcctgcctcagcctcccaaatgctgggatgacaggcatgagccacggcacccggcccccactcttctttcaaacagtgtttgaaattttagggctttctgaattttagagctgtaagtttatggttggttttctccaagatttgcctaaacatacttttccagcttactccaatcctgacttacaacaaaaatttatatttttagtgccatgtcataccactctattagctcaattctaactttatggattagagttctaaattttatagatgaaaattctaaatttatcatcagaatgccttttaagatcacgagtttgaaaacagatgggaataaaatgaaatgatatattttctgcaaatgctttcaagaaaggatgagacattttctttcctgcctgcttttttccttagcagaatcttctgccttcaatgttatgaagttcccagtttcagaagacttcttattcatttcagtgtggcatactaaaggcgtcatgtatttgaaagaccacaaatccataacttagttcaactaacatttacagggagagcagagctgacatctcttcctattgtctcctcccagctgggctcctggaagcttgtgggtgagcactaaccaaggtattctcatactgagctgtgaatttccctggacacacaacactgagtagccttaaaactgaaatcaatgcctcctttggttaacacgaattctgtgttttgtgctagtctgtcttcttaaattcaatacacgctttttataactcagcccattgttctgc

SEQ ID NO: 53564 - DNA, 5937 bp, Homo sapiens
  misc_feature (1)...(5937): n = a,t,c or g
ggtagaggtggaggtggaggaaggacgtttcaagggtgaagcttcttcagtaaacactgggaaagacatagaagaactattaagaagatagaattgttttgctgcgcagtacagcaacagtggatgttcaagattaagattagagtcaagttgtgtgattaagacaggagctgtgactgatgagaattaaaggccatggatgaagatgggcttgaattacaacaagagccaaactcattttttgatgcaacaggagctgatggtacacacatggatggtgatcaaattgttgtggaagtacaagaaactgtttttgtttcagatgttgtggattcagacataactgtgcataactttgttcctgatgacccagattcagttgtaatccaagatgttattgaggacgttgttatagaagatgttcagtgcccagatatcatggaagaagcagatgtgtctgaaacggtcatcattcctgagcaagtgctggactcagatgtaactgaagaagtttctttagcacattgcacagtcccagatgatgttttagcttctgacattacttcagcctcaatgtctatgccagaacacgtcttgacgggtgattctatacatgtgtctgacgttggacatgttggacatgttggacatgttgaacatgtggttcatgatagtgtagtggaagcagaaattgtcactgatcctctgactaccgacgtagtttcagaagaagtattggtagcagactgtgcctctgaagcagtcatagatgccaatgggatccctgtggaccagcaggatgatgacaaaggcaactgtgaggactaccttatgatttccttggatgatgctggaaaaatagaacacgatggttcttctggaatgaccatggacacagagtcggaaattgatccttgtaaagtggatggcacttgccctgaggtcatcaaggtgtacatttttaaagctgaccctggagaagatgacttaggtggaactgtagacattgtggagagtgagcctgagaatgatcatggagttgaactgcttgatcagaacagcagtattcgtgttcccagggaaaagatggtttatatgactgtcaatgactctcagccagaagatgaagatttaaatgttgctgaaatcgctgacgaagtttatatggaagtgatcgtaggagaggaggatgctgcagcagcaggacacgcgccggtgcacgagcagcaaatggatgacaatgaaatcaaaaccttcatgccgattgcatgggcagcagcttatggtaataattctgatggaattgaaaaccggaatggcactgcaagtgccctcttgcacatagatgagtctgctggcctcggcagactggctaaacaaaaaccaaagaaaaggagaagacctgattccaggcagtaccaaacagcaataattattggccctgatggacatcctttgactgtctatccttgcatgatttgtgggaagaagtttaagtcgagaggttttttgaaaaggcacatgaaaaaccatcccgaacaccttgccaagaagaaataccgctgtactgactgtgattacactaccaacaagaagataagtttacacaaccacctggagagccacaagctgaccagcaaggcagagaaggccattgaatgcgatgagtgtgggaagcatttctctcatgcaggggctttgtttactcacaaaatggtgcataaggaaaaaggagccaacaaaatgcacaagtgtaaattctgtgaatacgagacagctgaacaagggttattgaatcgccacctcttggcagtccacagcaagaactttcctcatatttgtgtggagtgtggtaagggttttcgtcacccgtcagagctcaaaaagcacatgagaatccatactggggagaagccgtaccaatgccagtactgcgaatataggtctgcagactcttctaacttgaaaacgcatgtcaaaactaagcatagtaaagagatgccattcaagtgtgacatttgtcttctgactttctcggataccaaagaggtgcagcaacatgctcttatccaccaagaaagcaaaacacaccagtgtttgcattgcgaccacaagagttcgaactcaagtgatttgaaacgacacataatttcagttcacacgaaagactacccccataagtgtgacatgtgtgataaaggctttcacaggccttcagaactcaagaaacacgtggctgcccacaagggcaaaaaaatgcaccagtgtagacattgtgactttaagattgcagatccatttgttctaagtcgccatattctctcagttcacacaaaggatcttccatttaggtgcaagagatgtagaaagggatttaggcaacagagtgagcttaaaaagcatatgaagacacacagtggcaggaaagtgtatcagtgtgagtactgtgagtatagcactacagatgcctcaggctttaaacggcacgttatttccattcacacgaaagactatcctcaccggtgtgagtactgcaagaaaggcttccgaagaccttcagaaaagaaccagcacataatgcgacatcataaagaagttggcctgccctaacaatacttctacagaacgtttgtagagatattggccttgaagcagaaaattcattttaaagccaatcagtctcattcacatacaatactgtatattgatttatgctgtgtacaaatagaattattacttctagttgacttttttttaaatatacattttgctcagtagtgtgttctgaattctattcagtttgtttaataaatagggaaaactggcaacatgctagttacttttaataaagtaatccctgattctataccgaagttttatatcttagaattttatatttatttaaatatttaccttgcttaccttgatggtactcttctaagaccattaacttaaggtaactttatattggtaactctgaaagtattcatgttgactcatttttttccccatacatttctcacaataaaattgtcagagacatctactaatataaatgggagattttacagtcaggtctaattatcataacatggaagtcatttacttgtcttgcttaatattttcagaccacttgacagtgaaagtttccatttgagctgttgcgtccctggctttgctgagtaaagagcagtggctgggttcgtgtttacttttcaaatatacttccttttcggctttctttggattatttacatcttttgtccagcgtagcaaacttttagaaaaccttattgaaaaactgtgcttgctcatgttgtattttgattattctgtctgtgcggcttcatcttggaatggttgtgtgctacaaatgacacttactgaggactgcattttggaatctcctagaggtaactcatggcttataggatcttttgcaactttatgtatgtaaatgtaccctgaattatatatatacacatatatatcatgtacctgtgtgtattgcttattttacatatttatacacacaaccccaagtagtagttgtttaaaatctataatgaaaagtattaaatttacaataacatgaaagatccagggatgcatgagagagcattttgtaagtcatgctcttcagagagactactcaggtgaagaattagaaggaaaataaggacactagtatttttaaagagtaaagatattttcttttaaatatctttggtaattgaaacatagaggttaagatgtttctaggtagaatgttttcatacaatttcacctccatgtctttatgtttttctgaaaagcaaatgagtatccagacatgactcccacagttctctttgagaagcctgagagggaactctgtcttacctagtgagggggatggaaaagaagtgatggctctgtggaccagagaacgggtgctaattatgacttcacactcggcaagttcaggctgatctgttatttctcagttacagttagcaaactttaaaaacttaacactcaagttggctttgattaaaaggtaaagatgtgttttaagtggataaggaaagtctgaggccttatttggaacatcactaagtcttccacaaggttttttgtttgnnnnnnnnnnnnnnnnnnnnnnnnnnnnnnnnnnnnnnnnnnnnnnnnnnnnnnnnnnnnnnnnnnnnnnnnnnnnnnnnnnnnnaaacctctgnnnnnnnnnnnnnnnnnnnnnnnnnnnnnnnnnnnnnnnnnnnnnnnnnnnnnnnnnnnnnnnnnnnnnnnnnnnnnnnnnnnnnnnnnnnnnnnnnnnnnnnnnnnnnnnnnnnnnnnnnnnnnnnnnnnnnnnnnnnnnnnnnnnnnnnnnnnnnnnnnnnnnnnnnnnnnnnnnnnnnnnnnnnnnnnnnnnnnnnnnnnnnnnnnnnnnnnnnnnnnnnnnnnacaccacataggtctgaatcagtgtcatacattcataaaacaaactcggttaattagaacttggttatgttaagacgaatctgggagaacagaaaacagtttttggggtcccttcagttggctattggtccgtatgcatctagcacattgtaggagatttagaaattgtcttcccacccgatagctgccttgtcacctcattatggtgctccatcccctgtgtgcttaggtttttacctttcatctttctctttgccattgatgtttgtattcaagagttatatttttagggttagaaatcaaaatatttggtgtttggcaaacctctgaagtgctagactgatttagtctagttttaaaccaagtgctttaggcaggtgtgaactccagcccaaatgccagtcaaagtcaaggcatgggttttcctagcctatcttataggaaattcctgtaccttcttggcccccataatgtgttttttttttttntttttaaaaactaacttacaattttgtgatccgtgattcattgccctgcgattcttgaaagctctgtctgtttttttgtgagaacctttaaaatctcccttaatttttattttcccagaaataatgtaaaaacacttaaatgaaagtggaaatgtattaattttaaatcctataaaattaatacagaaaatataaatgattgggtcatttaactatatttttttaaataaactgaaagataaagaacacaacacttcacacattttatatttctcttacatactctggaatcatacacagttctttttaaagcacaacattaaaacctttaaaaggtatttaagggtttggtcaagtgaatatgataaaacatacttgtctgtataaagagaaaatgaaattgtagtcactgttatgtactgacattagttacaacctagttttaattcttaaaacaattttgattagcaaagctaaaaaaaaatggatgtttcagttaaatgttttaaagaggtacagatttttacaaggacataatataagttattgttctgtagaaatatcctattaaatattgtatgtccctccctctgtacactttgtaaagaaagtaaaatacataaaaagaaaatcatatagggatgtgtgacattattgtaattgtgtacttgagaataacgtgcaaaaataaaaatcagaatattttcctgttattgaatgtttagtctatttgataccagtactaagttaatgctttttctcaaggaaaaaaaatgtacagtttttgtaaacctaataaacatcaaaagcagtggattattttcatccccccatttcttaatttctttttcacagcagtgggaatgcaaagtgcttgattgctttgaattttgtgactcggatggcaaatactggtaatatttcagttctgtggaatttggcaagtaatatttcagaggagttaaggggtgattgggtgagtccnttggatgaggctgtccntggg

SEQ ID NO: 53565 - DNA, 620 bp, Homo sapiens
  misc_feature (1)...(620): n = a,t,c or g
tttttttcttttgctcagtgaagatttattgttatagaaggcaactaatacaatagatttgtgggctcgaaattttaaaaagttctaaaaaggcagttaaagcttgacaataaacttgagtaaggtttacacaatatcaaagtatattagttctttgaaatgaaaaggtattttttttcttcctttaacattgagatgtctgagatgtcaggattttgtagcattcttagaaacaacatccactgtgtgggatactttttttccttctggagttttaaaccagtctgactctttggttgtgcctatacaatgaaaagtctacaaatgaaatgagagaagtcaggatattttcctttgttaaactaagtagctgaataattagaactacctagataaaagactcaaaatgtttttgttatctggttgcctggttaggacatagccaacatttcaatgggaatgtagtatcttgtacaactgcatataattttttaaaaaataaacaatgactttgtttccttagataccatccaatggctgcttgagtggccaagggaaaatgnccaccccttggaaatggtaggtatccgtagcccctttccctccttccaggaggtttt

SEQ ID NO: 53566 - DNA, 411 bp, Homo sapiens
  misc_feature (1)...(411): n = a,t,c or g
tgatgtacttacatttgtgcatcacaatcaagaggttcccagcttggtggaactttcaaagatgaggcagaaaactaaacaggcaattacaatcttacttttcacgctgacaagtggtacggtggctagcccaaactcccctccctgtcccagctacctcccttatagaccattcacgatcacttaggccaggctgccatgtgacctaagagaagacagggagaacacagcatttcttactcctactaacttgcaacatcattctctcaagttgctctcattgggagggctcccaactgcttcaagctggcccagtggatatttgtatttctaaagtgggggcagggcatgggccatttcccaaaaaaaggganacacatttcaggactttgtggcctttttgtttacccc

SEQ ID NO: 53567 - DNA, 404 bp, Homo sapiens
gggcgctccaaagatatccatctccatccttttttctctgtggagatcttctgcaagttttgtcacgctgcacacacacaaggctgggggctatgtatctaggctgatctatttgttttattttggtctggaaaaactaagccaattggggtagaaacatgctttccttcgtagcagcagcctacctcctaccccagctgtctgttgagagcagtgctgaccccagcagttagggactggcttgcatagcatacttgttgggggtaaaacttgttgcttttatgtgtgcttgaaaacatttttcaaagttacacaacagaaatgcaatcatattgtttatttttaagtgttctataatgttaaataaaactttgatcatctgcaaaaaaaaaaaaaaaaaaaaa

SEQ ID NO: 53568 - DNA, 379 bp, Homo sapiens
ggggatgtgtctcctcttttcttctgggatgttatgtgtttagaacttgcaaacctttatttctgtacttctgatgtacctgcctaatgtgtttcttcccaactaccttccccccttcccccctcctttcttatgattgataaggaactctgtaaaatccttcctcctgtgtaccagaaccttctctccattccctccttccaggcttcttatatgtcatgaccaaatcttaccattaatgtatgatgggcagtattcagatgttctgtgacatatcaacatgggaaagtgtggatccccaggattatccgtggggatggggctgggtcttgggatgtcagtgaaagaaggggatcatgtaccgtttagatttcatcca

SEQ ID NO: 53569 - DNA, 400 bp, Homo sapiens
gcttaccttcaaacagtttaatttacccagttaatcacaaaagattaaaaaattgctaaatcagaaattctctacctgtaactgatgttttcattgatgatgaatattagaaacattaactatatcacatactccctgaggacatagagtggtgacttgcaaatgttttggtttggaattgtggcaccttattgttgtccctaaatggtttacatattgcacacatttttaatttaaaaacaagaaacaaaacaaccactttaatttcacggcaagcccttttgtgataactggcaggacatgagtgtcataggaggccaggacccctggacttggctggcccggttaaatggatgtgttcttttaaatttttggccaaaccaatttaggtctttaactc

SEQ ID NO: 53570 - DNA, 204 bp, Homo sapiens
cccacgcgtccgcccacgcgtccgcgtcaactgcttgctgtttacaggccacaacctggccactgtaaacatgacacatccatcaggtacatatatttttaagtgaacatacacatttggtctagtaaacatcaataagtctaaacacctgttaacaagcacacttcattttaggacaagaggttttttgtttttttttttttt

SEQ ID NO: 53571 - DNA, 385 bp, Homo sapiens
gtcgtccgagagtcttaaaatcctgctgtggccggattccagactcgtgggggaaaggctggatcttaatgcaagtcatgaacttgaatgtgccgatgaggcctggcattcttgtccagagacagagtaaggaagtgttggccacacccttagaaaacagaagggacatggaggcagaagaggagaaccaaataaatgagaagcaagagcctgagaatgctggagaaactggtcaagaagaggatgatggtttgcagaaaatacacacatctgtcactagaactccttcagttgttgaaagccaaaaaagacctttaaaaggagtgacattttctagggaggtaattgttgtggatcttgggaatgaataccctacacctcgaac

SEQ ID NO: 53572 - DNA, 1231 bp, Homo sapiens
  misc_feature (1)...(1231): n = a,t,c or g
caacattaggatctacagcgagaccacccctcctggctgagcaaagatgacatccgaagaatgcgactcttggcggacacgcagtggcagggctccggctgtgtcctctaggagcggagccgtttgctggtgctggaggggggcgcacctggcnatgtgctccgctgtggccctagccctgtggcttcgtcaagcagccttggacatgagtgaggtgtttgccttccacctagacaggatcctggggctcaacaggacccgtgccgtctgtgagcaggaaagcagagttcatccaagatggccgcccatgccccatcattctttgggatgcatctttatcttcaagcaagtaaatgacacccattcttctgttaagctcacctggggaacttatcagcagttgctgaaacagaaatgctggcagaatggccgagtacccaagcctgaatcaggttgtactgaaatacatcatcatgagtggtccaagatggcactctttgattttttgttacagatttataatcgcttagatacaaattgctgtggattcagacctcgcaaggaagatgcctgtgtacagaatggattgaggccaaaatgtgatgaccaaggttctgcggctctagcacacattatccagcgaaanatgacccaaggcatttggtttttatagacaacaagggtttctttgacaggagtgaagataacttaaacttcaaattgttagaaggcatcaaagagtttccagcttctgcagtttctgttttgaagagccagcacttacggcagaaacttcttcagtctctgtttcttgataaagtgtattgggaaagtcaaggaggtagacaaggaattgaaaagcttatcgatgtaatagaacacagagccaaaattcttatcacctatatcaatgcacacggggtcaaagtattacctatgaatgaatgacaaaagaatcttctggctagggtgttagatatatttatgcatttttggttttgtttttaaatcaagcacatcaacctcaagcccgtttagcaatgaggcagtgtagatgaatacgtaaaataaatgactttaaccaagtagctataatgggacttagcactgtatgcatacttaaaaaggttttgaaaaacaaactacttgagaaatatttgtttatatttttctctaacatcatgctatgtgtcagtctgaacatctgacaacagaaatttcagttattatt

SEQ ID NO: 53573 - DNA, 737 bp, Homo sapiens
  misc_feature (1)...(737): n = a,t,c or g
gggaagagaggggtcagacagaaaggatgagagacagaagggatgggagatgggtggatagatgaagcagcagacagacagacggacaggacaggtaagaaagcttatggctcaggcatctgagacaagcctggcaggggctgagaggggccctcatctgggtggccccaggctgctcgcagctcagccgtgagccctcggtgcacacaccaccccgggtctgcacaggctctggaatccttgtggccagtgtggacttgggagccctggggctgggatggaggtggccaaggctgcatcgggcctttctccacaggcagaggaggacaaggaggagcaggtagacagccagccagacgcctcctccagccagacagtgaccccggtggctgaacccccgagcacagagcccacccagcctgacgggcccaccaccctgggccccttggatctgctgcccagtgaggagctattgacagacacaagtaactcctcttcatccactggggaggaagcagacttggctgccctgcttcccgacctctccggccgactcctcatcaactctgtcttccatgtgggcgctgagcggctccagcagatgctcttctcggactngcccttcctccagggcttcctacagcagtgcaagttcacagacgtgaccctgagcccctggagtggggacagcaagtgccaccagcgccgggtgctgacgtacaccatccccatcagca

SEQ ID NO: 53574 - DNA, 331 bp, Homo sapiens
  misc_feature (1)...(331): n = a,t,c or g
ccacccggctcggcccgcacaaccaaatcttattaaactcaatctagtctggccctggtgactcacgcctttcnnnnnnnnnnnnnnnnnnnnnnnnnnnnnnnnnnnnnntgaagaccaagcctgggccacacgacnaaaggcccnttttnnacaaaaaaaantacaaaaaaaaagccagatgtgggtgggcatgcacctgtagtttaagctacttggggaggatgaagtggggaggactgcttgagccggggaggttggaagcccgagtaaactgagatcgcgccacagaactccagtttgagcaacagattcaagaccctgcctgaaa

SEQ ID NO: 53575 - DNA, 194 bp, Homo sapiens
gtaacacaaaaactggggtgtaggggagtgttttcctttatcggcagtatgtagtaccttcaaactagagaccaaaactgggcacttacaatgaaaaggcaattttcttatccagctataatcctaaataaggcaggatatatccaccaaattacccacaaaattcagcaaagtaaaatagctcatgggaaaac

SEQ ID NO: 53576 - DNA, 528 bp, Homo sapiens
  misc_feature (1)...(528): n = a,t,c or g
taatgattacctaaccagctactgtgtctggtatatgacccataaaggaaaaaagtggtcacaactgaggtcatctcagaaagaatagttttcctgtgtagttgagcgtaaattgttctccaagatgatatggagaagtggaagaatgtcttttttttggctttaggaaatacattattcattctctacagaaggactgattgacttttttcctgtatatgaggaacggattattagggcaaagatattacgtagtaaagtttacttaaactagggtaagattttggactgtgcctaatgatttggaagcttacttaatcactattctcaatagctacctaatgcccaagagtgtgactttgtagctaggatgagctgtggatatatatacaagtttttattactgcagttgtaaaacaaagactgatggctattttttatgtatcatcacagttaactattttcagaatcttgagagggttaatctcctttctaagcttttattccatttaatgacaactgnttttt

SEQ ID NO: 53577 - DNA, 3362 bp, Homo sapiens
tttcccctccccgcccccaccttcttcctcctttcggaagggctggtaacttgtcgtgcggagcgaacggcggcggcggcggcggcggcggcggcaccatccaggcgggcaccatgggcacgtccgcgctctgggcgctctggctgctgctcgcgctgtgctgggcgccccgggagagcggcgccaccggaaccgggagaaaagccaaatgtgaaccctcccaattccagtgcacaaatggtcgctgtattacgctgttgtggaaatgtgatggggatgaagactgtgttgacggcagtgatgaaaagaactgtgtaaagaagacgtgtgctgaatctgacttcgtgtgcaacaatggccagtgtgttcccagccgatggaagtgtgatggagatcctgactgcgaagatggttcagatgaaagcccagaacagtgccatatgagaacatgccgcatacatgaaatcagctgtggcgcccattctactcagtgtatcccagtgtcctggagatgtgatggtgaaaatgattgtgacagtggagaagatgaagaaaactgtggcaatataacatgtagtcccgacgagttcacctgctccagtggccgctgcatctccaggaactttgtatgcaatggccaggatgactgcagcgatggcagtgatgagctggactgtgccccgccaacctgtggcgcccatgagttccagtgcagcacctcctcctgcatccccatcagctgggtatgcgacgatgatgcagactgctccgaccaatctgatgagtccctggagcagtgtggccgtcagccagtcatacacaccaagtgtccagccagcgaaatccagtgcggctctggcgagtgcatccataagaagtggcgatgtgatggggaccctgactgcaaggatggcagtgatgaggtcaactgtccctctcgaacttgccgacctgaccaatttgaatgtgaggatggcagctgcatccatggcagcaggcagtgtaatggtatccgagactgtgtcgatggttccgatgaagtcaactgcaaaaatgtcaatcagtgcttgggccctggaaaattcaagtgcagaagtggagaatgcatagatatcagcaaagtatgtaaccaggagcaggactgcagggactggagtgatgagcccctgaaagagtgtcatataaacgaatgcttggtaaataatggtggatgttctcatatctgcaaagacctagttataggctacgagtgtgactgtgcagctgggtttgaactgatagataggaaaacctgtggagatattgatgaatgccaaaatccaggaatctgcagtcaaatttgtatcaacttaaaaggcggttacaagtgtgaatgtagtcgtggctatcaaatggatcttgctactggcgtgtgcaaggcagtaggcaaagagccaagtctgatcttcactaatcgaagagacatcaggaagattggcttagagaggaaagaatatatccaactagttgaacagctaagaaacactgtggctctcgatgctgacattgctgcccagaaactattctgggccgatctaagccaaaaggctatcttcagtgcctcaattgatgacaaggttggtagacatgttaaaatgatcgacaatgtctataatcctgcagccattgctgttgattgggtgtacaagaccatctactggactgatgcggcttctaagactatttcagtagctaccctagatggaaccaagaggaagttcctgtttaactctgacttgcgagagcctgcctccatagctgtggacccactgtctggctttgtttactggtcagactggggtgaaccagctaaaatagaaaaagcaggaatgaatggattcgatagacgtccactggtgacagcggatatccagtggcctaacggaattacacttgaccttataaaaagtcgcctctattggcttgattctaagttgcacatgttatccagcgtggacttgaatggccaagatcgtaggatagtactaaagtctctggagttcctagctcatcctcttgcactaacaatatttgaggatcgtgtctactggatagatggggaaaatgaagcagtctatggtgccaataaattcactggatcagagctagccactctagtcaacaacctgaatgatgcccaagacatcattgtctatcatgaacttgtacagccatcaggtaaaaattggtgtgaagaagacatggagaatggaggatgtgaatacctatgcctgccagcaccacagattaatgatcactctccaaaatatacctgttcctgtcccagtgggtacaatgtagaggaaaatggccgagactgtcaaagtactgcaactactgtgacttacagtgagacaaaagatacgaacacaacagaaatttcagcaactagtggactagttcctggagggatcaatgtgaccacagcagtatcagaggtcagtgttcccccaaaagggacttctgccgcatgggccattcttcctctcttgctcttagtgatggcagcagtaggtggctacttgatgtggcggaattggcaacacaagaacatgaaaagcatgaactttgacaatcctgtgtacttgaaaaccactgaagaggacctctccatagacattggtagacacagtgcttctgttggacacacgtacccagcaatatcagttgtaagcacagatgatgatctagcttgacttctgtgacaaatgttgacctttgaggtctaaacaaataatacccccgtcggaatggtaaccgagccagcagctgaagtctctttttcttcctctcggctggaagaacatcaagatacctttgcgtggatcaagcttgtgtacttgaccgtttttatattacttttgtaaatattcttgtccacattctacttcagctttggatgtggttaccgagtatctgtaacccttgaatttctagacagtattgccacctctggccaaatatgcactttccctagaaagccatattccagcagtgaaacttgtgctatagtgtataccacctgtacatacattgtataggccatctgtaaatatcccagagaacaatcactattcttaagcactttgaaaatatttctatgtaaattattgtaaactttttcaatggttgggacaatggcaataggacaaaacgggttactaagatgaaattgccaaaaaaatttataaactaattttgtacgtatgaatgatatctttgacctcaatggaggtttgcaaagactgagtgttcaaactactgtacattttttttcaagtgctaaaaaattaaaccaagcagcttaaccatgaaaaaaaaaa

SEQ ID NO: 53578 - DNA, 355 bp, Homo sapiens
tctgacgcacacagtctactatcaccgacagtttcccctcaaaaaacctataaggcatggaagtattttgaaccgagagtcaccaacagataagaagcagaaagttgagcgcattgcatcacatgattttgaccccacagatagctcctccaagaagacaaagtctagttcagaggagagtagatccgagatatatggtcttgttcagcgttgcgtaatcatccagaaagatgacaatggatttgggctgacggtcagtggagacaatccagtcttcgtacagtctgtcaaagaagatggagcagccatgcgagcttggagtacagacaggtgatcgaatcatcaaggtgaatgg

SEQ ID NO: 53579 - DNA, 1486 bp, Homo sapiens
agtgttctaggcgattgagtcccttcattaatgaaacttgaaaccctgttatgcattggcaaatcacaaaaaaagagaaaagtgttttctaagtctcatctgttggaggtagagggttcagggctgtattcacagagttgctggcagtgcaaatagctttgaattatccttggttctccattctcaattgtcaaagctctttgttgcctttgtgaatagcagtccattaagaggttcgtccctgtgaaagcagactgctgtcctgggacaggaccaaatggaagtgtctttgtaggagaacgggttttaaaacatgtgttttctttcttgtaatttagggatcatagacggtatttctatgtaaacgaacagtcgggcgagtctcagtgggagtttccagatggtgaagaggaagaagaagaaagccaagcacaagaaaatagagatgagactcttgccaaacagaccttgaaagacaaaactggcactgattcaaattcaacagaatcctctgaaacttccacaggttctctttgtaaagaatccttttctggtcaagtttcttcttcatcactcatgccacttactccattctggaccctccttcagtcaaatgttcctgtgcttcaacctccattacccttggaaatgccaccacccccacctccacctccagaatcacctccaccccctcctccaccacctcctcctgcggaagatggtgagatccaggaggtagagatggaggatgagggaagtgaggagccccctgccccaggaacagaggaagatacccctttgaaaccttcagcacaaaccacagttgtaactagccagagttcagttgattccaccatctctagttcttcttccactaaaggaataaagaggaaagctacagaaattagcactgcagtggttcagaggtcagctaccattggcagttctccagttctctatagccagtcagctatagctacaggtcaccaggcagcagggattggaaaccaggcaacaggaattggacatcagacaataccagttagccttccagcagcaggaatgggtcatcaggccagaggaatgagcctgcagtcaaattaccttggactagcggcagcacctgcaattatgagttatgcagaatgttctgtcccaattggagtgactgctccctcattgcagccagttcaggcccgaggtgctgtgcctaccgctaccattatagaaccaccaccaccacctcctcctcctcctcctccaccaccaccagctcccaaaatgccaccacctgaaaagacaaaaaaaggaaggaaagacaaggcaaagaagagtaagaccaaaatgccatctttggtaaaaaagtggcagagtatccagcgtgagttagatgaagaggacaattctagttccagtgaagaggatcgggaatcaactgcacagaagcgaattgaagagtggaaacagcagcagctggttagtggca

SEQ ID NO: 53580 - DNA, 455 bp, Homo sapiens
  misc_feature (1)...(455): n = a,t,c or g
cagctatgcgcgcttcgtcaagtccccgctgtaccgcgagtgcctgctagccgaagccgagggacgccctctgcgggaacctggctcctcgcgcctcggcagccctgacgccacgaggaagaagccgaagctgaagcccgggaagtcgctgccgctgggtgtggaggagttggggcagctgccacccgttgagggtcctgggggccgccctctccgcaagtccttccgccgggagctgggcgggactgcaaacgccgccttgcgccgagagtctcagggctccctcaactcctccgncagcctggaccttggcttcctagccttcgtcagcagcaaatctgagagccaccggaagagccttgggagcacggagggtgaaagtgaaagccggccagggaagtactgctgtgtgtacctgcccgatggcacagctccttggccctggccagacctgg

SEQ ID NO: 53581 - DNA, 2242 bp, Homo sapiens
tttttttttttttttccaaatcaccactttattatgtggcagtcaccatggtgccagcctctgccttccccatgtcaccctcctaatccagggctctccaaccatattcatgtttgcgttttcacaagtcaatgtccattaaggccttgtgctccccttttcttcagtacaggcagggcccttataatttgggtctcaagaattgatagttgtctcttaactggttctggtgaggcgcactcacagcagtgagtggagggtcctgggagggcatggatgacggaggctgcccctagaggagctggatgtaggagcagagacatttctttgatctttcactctgcaaactggtccaagaacttgaggtaggcctgacgctggggtgcagctgctggaatgaagtggccaccagagtgggtgagggtgatggctccgggaaattggctggccagttgcacactctcctgagaggggatgactttgtcagtgtccccaaaaacatggagcgaaggcaatgacaagggcctttgcaggatggattccttgaacccaatgccccggggacagaaaccagacaccaagaggataaaccgtggcaaggggaagcggggatcgcctgcctggcccagggcacacacaagggctgctagcgcagccccttggctgaaaccaagaaggccgtcaaaaggccccagcctgttcagtgcctgtgccaccatccccagtgattcctccaggcccctgcagacggcgggctcttccaatgcggagaaaacgtcggcctcctgctctgaaaaccaccagcctcgaggctggctcctccggagggcaggaccctgaggcccgggagcgcgtcaaggagccagcggcgccaccttctcgtccctgcagctgcagtcctcgcaagccacggccgaagggggacgcgcggacccctcctgcaccttcccccgcgcgggccggcccggggcgtggggacggcggtcctggccgtggttcaccgtccagggccccaaggagctgccagcgtagaagtccatcgggtagggctgctgccaggaaatgtccctcagagccacggccgcctcatagggtgtcagcagcggcttgggggaggctgtgccccagtcaatggagagacgtggaacatgccacctgcacccacacatccacctcgggaagtaggctaagcttgctggggaagatctcagagagcagcagcctcacaaaaggaaaggcccaaggctcggagtcgagattccaggtgctcccaggatcttaggactgccctggcggcccaaagtgcccagaataaggccccaggacttagctgagcgggcagtggctatggcttcttggcgagcagcctgcatgcgctggtggtcatagtgttctctggataggactttgctatatgggtcataccggtaagcggggacattggggttggcaatcatgacagactccagatggaagcggccatctccaagatacacaacggcctccacctctttggacagtcggggggatgtgcagcccaggatctctccaggggacaggggcttgcactgtgggacactcacacgatactcggctttcagctcctgggcggctgcctgcaaggtcgacacaaactgaatggtgctgaccagggcaagggcagtggctgggggaaaggtgaggcggagagagtccaggaggtgtgtagtgtctatccggatgtccacaaagacgtacagcacccggaagtcttgggccgaggtgtccatgggaatcaggcaactgtggccgtagtgcaccaagaagtcagctcccagggccctcgctgtgaagtcatccacacagcaagccccgtaggtcacgtcacccatcaccatcacttcggcctccgtgaacctttccaagatatccacaatggtacaggcaaagaggaggaggccttccggcatttgcaaggccaccttcttggcctgggcttgttggatcctccagatggtcttggggatctcaaagttgtagttggaaggcaggacccggattgctgcctgcagctgagggttcttcaggatctcaggggggatctgattggccacgcggcccgaggggcccgacctctgccagggccgtctcggcgccctgctccgctgccccggatacgaccagcgccgccatcacctgcctgcgcatgtggtactaaaaagacagcgctggaagaacgcggagagcgcaggctaattcaagc

SEQ ID NO: 53582 - DNA, 760 bp, Homo sapiens
  misc_feature (1)...(760): n = a,t,c or g
ggctcaggacagcgtacgggcaggagggctgtaaatcatcccaggctaagcctccgtgggcactggctcctgccgcagcctggctatggactcagttagaaccaggtagaaagtcagcgacaccccacagaaggccactgcggctaggtaaacacctgagaaagaaactgctccagaagagatgacgtgggcttccaggagcatggaggaggtggcacttgaacttttaggaaactccttagatgagataaagtgggggttggaggtggcgaaaagagggtaaccctgggaaagtcagtcagaacccatggcagaagactgcaggagaggcaggggaggggcttcggggaccactgtggacagagctctgaaagcaccctggccaaagcccctcctgaggtgacagagcgtgggaggaggctgcactgggcctgcgtgccatcctcacccctgttccccgctggcgccaggccctgccttcttggtacctgtgccaacaggaggagccctcaccagccgatcttgtcactctccgtggtgacagtgtcttggccagctgtggcccctagtttctagcagcgtttctcagtgtccttggcccttctgagaaggcaggcgggaggcacacggtgccttgtttctttccccattttgtccagttgctttgcaaagaagagaaatgagtaggagtgaaanccgagtgaccttcacccgccctgtcccccacggtcaggacagggcttgaaggcctcttctgggc

SEQ ID NO: 53583 - DNA, 1378 bp, Homo sapiens
ccaaagtccccagcagtggcaggtgtacactgagccctggttgctggccccggcccggtcacattgactgatggccaccgcctgacgaatcgagtgcctgtgtgtctacctctctgaagcctgagcaccatgattcccacagccagctcttggctccaagatgagcacccacaggaagccgacccaggcctgaggggccaggaacttgctgggtcagatctgtgtggccagccctgtccacaccatgcctctcctgcactggagagcagtgctggcccagcccctgcggcttaggcttcatctgcttgcacattgcctgtcccagagcccctgtgggtccacaagcccctgtcctcttccttcatatgagattcttgtctgccctcatatcacgctgccccacaggaatgctgctgggaaaagcagggcctgccagcaggtatgagatctagcctgctttcagccatcaccttgccacagtgtccccggcttctaagcctccaatatcaccctgtgagcctcgcacagctcagccccaacacagaggtgagaccaggaataaggccacaagtatctcactttctctgcagaaatcaatctttacttcatcagagagacctaaagcgattcttacaaggagcttgctgcaagaaacacggtcattcaatcacattgaggagggtccacatggcattgagagggtgctgcccgctcaatgcccagcagcagctctggaaggcagtgctcagccccatcaccactgtcccgtggatgcctgtgtacctcttgccttttctgggcttgcgtttctctcctctagtgggtggggatgactttcaatgactttcaatacttcccctgaaggaagaatgataaggagaaatgtctgttttgaggaaagggctttgaattccccagatactgaacaatttgtgtttgtgactgatggagaatttcaggaatgaatgagaaagcctttgcgaaactatgcaacagtttacatcagtcatgtgaagtatttgtctaaaacagagcaaactgaagaccaaattattctcctgttgaggtccgtggatggcagatttaaagggaagaaccacaaaggcttgcaaagataggagaggctccatctctaatgcatgtagaagctccttacgggtgcccatcaagagcatagcttggaagccaccatgctgtgcggaactgcgtcagggcaaatgtcacagcaggatttccccaacccagctccatcatcacagacacagagagctgcaggggaggcctgcccactgttttgtcgactctgccctcctctggcagcatagatccttaggtgctcaataaaggtgtgctgtattgaactgaaaaaaaaaaaaaa

SEQ ID NO: 53584 - DNA, 132 bp, Homo sapiens
ccccaaatagtgctgaatatctcaaagtaatttgcagtcttattctttaaagaaaattgccatttgtcctctgagaatcacaaaattgaaaagcaaagatacctctttggctttgtaggtgctggtttgcta

SEQ ID NO: 53585 - DNA, 2107 bp, Homo sapiens
ttttcaaaaaagacaggccaacaatgcctaaactctttatttcaccaaccagtatttctgattttcttcttgatactggattttaaaaccttagaagtctataaatactgcattcagactttccacatcaagagaaaggggaccagggcagaagatgtcaggccccatgctgttttggggtgggaaaagtggcaaagaattctcaacagcctgtgtcagttttctaacttaattgaaacacctttaagctctccttcatccccaaactttcccctatggtgtctatgatagaaaaacacttctctctcatatatgtcccatcactagggagccagggggaagggagtgggcattacacaggcaagccaaactttttattcagccagaaaatggatttctgattcagtttaatggtaaggagttgtgtaaaaccgtaccaagtcctgcttcttcctcagagtgagctggggctgcatttttgtgactggaagcatttctcataatggtgaattaagcactataaaaaaataaagtcaatcccatctctatgagtagcataagagctgcttccaagaacccagggatgcccacatcccataacccacccagacacggccaattcctcatagacagctacataaaaccctttcgtcaacttgttttggggggtgagagagaggcagtgcttagggaagatgtaggatggattttttttattcctgccactaccaaaaactataaatctacacacacactcacacgcacatacatgtcccatttttaagaaagcttttcctccctgtgactacaggaacccagaatccagcctccctcaggctgagagacgatgcctattaacggcacagatctagcatatcaacatactatagaaggctcctgtgttgtctcacaagctgagagggcagggcaaagaagtggacactcatgggggacttgctttttgtcttaaatccaatctactcagtaacacttgcaggtccaggggctgggagaggttctgtgggcacaacgtggtggacgacctgatggtcccagcccactgtggtaagcagggagtgattgagcggggaccaagtcgcatctctcacaaagtctctgtgggcttggcttctaaacaactcagaaaggcttgagtccagcacagcaagtgagcagtcttcactgagagaggccaggaagggaacactgtgtggggagaacaccagcccagtgacacactgggagtgtacagctgagctcaggacacagcttgtactcttggtgtccacaagggagactgtcccattctcatcaccaaagacaaagacttcactttgctgaggatgccaagccagcgaggtaggaaggtagccaggcgcactgcagccaatctgtgatgctggcttgggacagcgggtatcccagagtaaaattctattgtcctcgctgcatgaaagaaacacagagtccttgtgaggagaggcagcaacacaagtgacctgagcagcatgagctcggtatgaactcagtaccacctgctgagcaaggtcccaaaccttgatgcagatgtctttgctaccactgacagcttgtgtgccagagctcaagacactgactgtagacacaatgtccatcatgctcatacttgcaaaaacttgctgaaaaataagtgtctcattctcatctaagttccccacaattcaaacagcacctgaatcggaggcccactagaatacctctctccccaacccaagtgaggtcagccactccagcctccgtttggactccggcggagcagaagccttcgttgggggcggcacaggggtccttaaaaagccagagggagccggcccagcagcgcccactcaggctggaggccccgaggagaagcgccccatcggaccggtaccgcgcagcctccaactgccgttccatgcaggcgggcgcatttgggggaagattccacctcccgggccgccgggggcactagggggggtggggtttccttccgcatctccacggttccaactccaacctagactcaaactggaacgcacggggagactccgctccggcagcaaaccccacgtggtgcacctctgagcct

SEQ ID NO: 53586 - DNA, 628 bp, Homo sapiens
gccttaatagcaaggggggctgtgggacaggaacaagccagttttgttagaggtaactcattttccatgaccaaacagactcaacagattcaagtactctgcttactctaattgactagactctaggttttatttgacatcatagcattacataaatcactctgataacataagtgcacagtaatatgcctgatctcttcctttttaaaagccaacttgagttcagtaccatctgaatacacacacatgcacatatacccacacacgcatacacacatactcctgtggcaaacataataatgtatttatttagaattataatatgaccatcatgttaattattttttacctaatcagagttgttattgacaaatgtcataagtggaaagtattaattcttattgtcatcagtatttagccattatttagtagctcaagaatatctttatgtgaatgtctctgtaacttggaattgcaatttcactgtgttaagtaatcagaactctgcttataagatttatctgtatcttgtttcataatttaataatgaaactaaattcaagttaatgtaatgttgatctccgtcgaaaaataacttgtgagcattaaaatatctgtatggcattat

SEQ ID NO: 53587 - DNA, 595 bp, Homo sapiens
  misc_feature (1)...(595): n = a,t,c or g
gcgcacacacacacacacacacacagaacttaacagcagtgatgtgtgttgtaatatgcaactttgtaagttacatatcactccccaataccaccttctcagtcacggagtagagatcttacttcacaagaagtgagactcagagaggtgaagtgacctgtgcaaggtcacctattacagtgccagagttggaactaaaggaacttcagtctgtgaacttcagtgtctttccagtagcatatttgcagcagaagagtcaagaatgttgtgagctgcaactctcactagaaccaaatgaccttattgggagatgttagtccagccttaaaaacaagctcttcacctccatgaatgggcaagtgtctgccctcttcaggccaaatcgagaatgacatctattaactgaggcaaatccttcaggaacccaagttcaggaccttgggattatttgctttttcagtaagttctggtcctggctgtgtctctaactcttgctgtgggnaccctcagggaagctacccacccccttcaccccacctgaatgagatgatttctgaagtcctcagcagccctgattctaagcctcataagggag

SEQ ID NO: 53588 - DNA, 205 bp, Homo sapiens
gataactccagggatgattctagtagccacagtggatctgaaagcagctctggatctgactcagagagtgaaagtagttccagtgacagtgaggcaaatgagccatcccagagtgcatctcccgagcctgaacccccgccaacaaacaaatggcaacttgataattggctgaataaagtgaattaagcgtgaaaaaaaaaaaaaa

SEQ ID NO: 53589 - DNA, 384 bp, Homo sapiens
ggccctttcctctatattgtactgcctccttaacaaaggaagattgattaagcccctactttgtgccagtctctgttatcaagtccgttaaatgcatttaacgttaaattttttcttttttggtttaaaaaactctagtttcttaaactactagtttttagtgtcttgctaaaactatgtgctcttgaataggctacaacttatttcacactatctcattgaactctcctggtatgtgatagtgttataatgaaaaattgcataccaggacagctaagtctattttgcaaccatacagcgtttcataatttagcatttaaaatacagacagtccccgacttttggtggtttgatgtgggatttttggtggaaaagcagtataca

SEQ ID NO: 53590 - DNA, 964 bp, Homo sapiens
ttttggatttctattcatttttattcattcctccaaagagcaccacaggccaaccacacccttgatgtgtccttcatggttccccactgcagtggacacaaatccctccctcattatccaggcatggatggaactctgctgtggtgaggaggttgtctcgcccactcacccaagttttccatgcctgttctgcttttgatggcaatgccaaaattcatcatacatttccttgaattcctgccttcaagggtcttccagccctgtggtgccatgcagacacacttcagtggcggccagtgatctgtctacaagggagtcttagtcttttctgcttgggatgctcccagggacagatgcctgccaacaaccttatgtcttcacaaagactaaaatggaatcccattaaaagttatgatttaaaaggcgaccacccccaaaagaagtcataacactcaagggtgtcaatatatacaactgtgtaaacacaaccaatctacaactatatcaacacaaccagcactcctctatgggcacagacacacacacaaaattgtcttgctttctcagatatgatctctggcatgactcctgctggcatgagggcagaggaaattgagaggagcaaagcatatagcagtgatgtcagacaggaccaaatcagagacagggtcaaagtggcagaaaaatgaggagcacactccgagcaaaggcatgggggtgagacaaaggcacccagactagagccatcttggtgctgcccaggggtgggtggcactcatgtttgagctccatgtgtcaggcttttcaggaaagggtgtactatgttatgtgtctgtgtgcatattgtgtgcctgcatgtacatacatacgctgaattctcaccataaccatgtgaggtagatgccatttgtagagtgacttgcccaagtcagtggaaggactatctgcccctagagctagactg

SEQ ID NO: 53591 - DNA, 547 bp, Homo sapiens
caaaagaacagaaggctttttaaaagtcatctattgtttagtgattattaaaaataagtcttctgatgaggattacatgtatctaactactgtaaaatagatttcatgtcagtgctacataatcagtatctaggttcagtacctgaaagttcatttgaccatgcctttttatgattttaatcctaccatagtcatttttgtcctatttgccgttcacggaaaactttatcagaatataagtaaatgatcttgaaaacattaatatttatcttttttgtacatactatacattttccttaccatacatattatatgttctctgacctctggaacattaactcacaaatttgtttcccgttttcctttacctagattgcatgtaagatgtccaaactgtgcaagcaccaaggaaatgctaaatggttgaaggaatggtcatagacttagcaacccacatatactgagattgtttatgagagccatttgggtccggagtaacatggtataggggtatgactaaagtaggtggtaaggccaaaaagagtaa

SEQ ID NO: 53592 - DNA, 767 bp, Homo sapiens
  misc_feature (1)...(767): n = a,t,c or g
tttttttttttttcagaatgtctcatttattgagaatattgtgacaatcaaagaccttaatatcagccagatgctaacaattgggaatagggcagaatttaataatggaatgtatgggattctcatttttactcaatcttgaatcatctgagaatgttttctattcaagccagtatttttagataaacacagatatagatatcgctactttgaaaaaaatcacttattttaaactcagaatttcttagtactaaatgctaaccaatacacattttatacataatatgtacagactttgttaccaagcgccacacaactaggacatacatattagttaccttggttttcaaaggttgtcaactctgcatattgtgtggcaaggagatactatcaacatttttttttgcataatgtgcaagtattatatggccacagagtgtaatacaaattagtggcaaagtgctgagtgaagggaatccatgacagattcagatgcacaaggttgaatattacccgtaaactacctgactctgctaaggtcttaacagcacaaaacgctatgtcatgcccagcttttaaaagtctctgaaatacttggacacaatgaagcttgttaaaggaattttaccatagccacaggtaacaagaggaggattgggcatgagcgataaatgacattgggggagcaatatggaagatcatctgggcaagtcttttctcaanatgtggcccttcttcccctggaaaacaatttttgncttcactcc

SEQ ID NO: 53593 - DNA, 1514 bp, Homo sapiens
taaagcagacgccgcgccgcgctgcgacgctgtagtggcttcgtcttcggtttttctcttccttcgctaacgcctcccggctctcgtcagcctcccgccggccgtctccttaacaccgaacaccatgccttcaattaagttgcagagttctgatggagagatatttgaagttgatgtggaaattgccaaacaatctgtgactattaagaccatgttggaagatttgggaatggatgatgaaggagatgatgacccagttcctctaccaaatgtgaatgcagcaatattaaaaaaggtcattcagtggtgcacccaccacaaggatgaccctcctcctcctgaagatgatgagaacaaagaaaagcgaacagatgatatccctgtttgggaccaagaattcctgaaagttgaccaaggaacactttttgaactcattctggctgcaaactacttagacatcaaaggtttgcttgatgttacatgcaagactgttgccaatatgatcaaggggaaaactcctgaggagattcgcaagaccttcaatatcaaaaatgactttactgaagaggaggaagcccaggtacgcaaagagaaccagtggtgtgaagagaagtgaaatgttgtgccctgacactgtaacactgtaaggattgttccaaatactagttgcactgctctgtttataattgttaatattagacaaacagtagacaaatgcagcagcaagtcaattgtattagcagaatattgtcctcattgcatgtgtagtttgagcacagatcccaaaccttacggccaagtttcttctagtatgatggaaagtttcttttttctttgctctgaataaaactgaactgtgggttctctataagtggcattttgggctttccctcttttttgtaaagcaatgtctgcctagtttattgtccagttaactttagtgaccttttaaaagttggcattgtaaataaaacaacttgcaaaaaagttttctggaatagaattaacaaaatattatctttattcatgagttggaaactggaaaaaggcttcttgaagtaaatgttctgagtggagctactaggatgtcttcccagcctcctgcagtcaaggagtaccactgtattgattagcctgtatgtagcagggctcccttcattgcatctgaggacttgttttctttttctttatttttaatcctcttagttttaaatatattgcctagagactcagttactacccagtttgtggttttttgggagaaatgtaactggacagttagcttttcaattaaaaagacacttaacccatgtgggatgtcatctttttataattagtgttcccatgtggagaaaattattcacactacttgcatgtaaagaataatttaacttttaacattaaaatatgtggtaaaacccagaaagcatccatcatgaatgcaagatactttcaataaaaagtaagttatatagtaggtagttaagtttgcttttgtggaaaaaaaaaaaaaa

SEQ ID NO: 53594 - DNA, 496 bp, Homo sapiens
  misc_feature (1)...(496): n = a,t,c or g
gtgatgggaacgtggatcatgcggccactcatattaccaaccgcagagaggaactggcccaaataaggaaggaggaaaaagagaagaaaagacgccgcctcgagaacatcaggtttctgaaagggatgggctactccacgcacgcggcccagcagattctgctcagcaatcctcagatgtggtggttaaatgattccaatcctgaaaccgacaaccgtcaagaaagttctttcccaggaaaacattgaccgagtgagtgacaggcctttgtgccctcagcttggacagcctcgggtggggttgcttggggtaacccgggtgaatcaggcagcaggactgggggagtccgtgctgaaaccttggctcccaggctccaggtgtaacctgcccacctcaaaggccacccacgcagtaacagagggcaggggaggcctccttggaaagcangaaaactggggaagtgtcaggaagttctctttaggtttgcatgcctttg

SEQ ID NO: 53595 - DNA, 806 bp, Homo sapiens
gcagccgctgctacacatactcacaacgctgccgccgcgctccgtgggcaactcctactactgctgggctgggctgggctgggctgggctgcgccggagctcgcctgcacagatcagctccggagaggggaaaaccacgctcctcggaccaagcctcgggagctaagccagatctgccagtgagcctcaggtttaggaactgaagagtgtttctgaaagatctatccagcactccgatggccagcaacaacaccgccagcatagcacaagccaggaagctggtagagcagcttaagatggaagccaatatcgacaggataaaggtgtccaaggcagctgcagatttgatggcctactgtgaagcacatgccaaggaagaccccctcctgacccctgttccggcttcagaaaacccgtttagggagaagaagtttttctgtgccatcctttaagtctttgagaggggcctgaagagcctccgggctcctgggacattgatgtagagtttttagtgaagtgggcacctttctagtccacggcatttgaagagagcgaggagaaccattctggaaactctaggctatgcatgtttaaagatctggtcccctttatgagaatgcaagccgatccacatcctgacttaagagatctgattctgacgaactgcctggaggaggggaatatataaaaataaaattggtgtcacttcttttctgctatcccccagcccccccccccccaaaatcctcatgtttctgcttcatattttgaaaaataacaattaaaacagacagctgtactgaggt

SEQ ID NO: 53596 - DNA, 742 bp, Homo sapiens
ctgttaccctctccttttcactctctctcattccgttccctttcttctttcaacatctaacatggtaaagttttgtgctaataaccaaggcaagacaaaacttatattcatgttcttccataaagaatctcatatcatcataggaaggccaagggcccaaagggaaaagaaagagaaagaagaggggaatccaaatgaatgtctcctagacgcctcactgcgcacgggcttttccggacatcttccactccttgtctcgaagcttggctcgttgaattttccctgtgacagtcttgggcaggttcaagacaaactctatctttcttgggtacttgtatggggctgtcactgacttcacatgctgctgcagctccttggtgagctgttctgggtcatgggacaggaactgcgaggccaggaccacaaatgccttcaccacctctcctcggacggggtctgggctgctgatcacagccgtctcaaccacagcagggtgcttcatcagtgcattctctacctccgagggtccaatccggtacccgctggagttaatgatatcatctgcccgtcccataaactggaaatacccatcttcatctttgattccccggtctccaaggagccaaaagtctcctcgaatgttggctgctgtcttgtcgggattttccacatagccagagaagatgcctataggcctgatgggtttgacccctgatgccaatgtctccttctgtgccggggg

SEQ ID NO: 53597 - DNA, 837 bp, Homo sapiens
cgagacagggatctgaatgcacttggtttattgttgggggtgctctcagaaggaacctgtgaaagcctttatcagtcatttattggctgtgagaagttctctgggagtgtgggtacatttgaaggcaagtgacttcagttgagggcaagtctctggaaaagaggctgtaggcatctggcagctaccatgcatggtagtgtgttgggggtgggggtcctgggcactggctgtgtgaagggatctggcagggcaccacagcgccccctactgaaccatcagcatgtcagtggcatttaaagccatgcagctggaggggccactgagattgtctctgagtattactgagaagcaacagaaaagagccatggatggagcccttgggctctctgggaaatgggaaatcagccaaaggactgagaaggagttaccttaaggtcagagaaaaccaagagagtgtggtgttctggaagctgagctttctttattcaacctcattcccttctccaaataagccacttgtgtagttgggcccctccagggttgaaggcaagaggagaaaggcacagcgtttgggaaacaagacttttcctgcaatagcctgggaaggaataaaaggatagagtgtttgggtttttgtgtaatggtggttaattggggtggacactcacacgttgtgctttttctgggcttcccttatcccccagaacactctaccaacctcggggaactcgggcacatccttctgtttctccttcagctctaacctgctttcctcatcccttctgacaccacgtgctcactcacctgcacagagtccctgcacagatctctctgagg

SEQ ID NO: 53598 - DNA, 422 bp, Homo sapiens
ccggttgttcttctgtgccgggggtcttcctgctgtcatgaaggacgtaccgggcttcctacagcagagccagagctccgggcccgggcagcccgctgtgtggcaccgtctggaggagctctacacgaagaagttgtggcatcagctgacacttcaggtgcttgattttgtgcaggatccgtgctttgcccaaggagatggtctcattaagggtgaatcctctgtccctcgtggaaatcattcttcacgtagttagacagatgactgatcctaatgtggctcttacttttctggaaaagactcgtgagaaggtgaaaagtagtgatgaggcagtgatcctgtgtaaaacagcaattggagctctaaaattaaacatcggggacctacaggttacaaaggaaacaattgaagatgttgaaaaa

SEQ ID NO: 53599 - DNA, 2044 bp, Homo sapiens
cagaatgtttaaaggccttaggtgatatggagcgagctgctgaaagctatggcaaggtggttgatctggccccactccatttggatgcaaggatttcactttctacccttcagcagcagctgggccagcctgagaaagctctggaagctctggaaccaatgtatgatccagatactttagcacaggatgcaaatgctgcacagcaggaactggaagttattgcttcatcgttctactctgttgttttcacaagggcaaaatgtatgggttatgtgggataccttacttactatgttaggccatggcttttaaaggtagcaatgaatcgagcccaagtttgtttgatatccagttccaagtctggagagaggcatctttatcttattaaagtatcgagagacaaaatatcagacagcaatgaccaagagtcagcaaattgtgatgcaaaagcaatatttgctgtgctcacaagcgtcttgacaaaggatgactggtggaatcttctgttgaaggccatatactccttatgtgacctatcccgatttcaagaggctgagttgcttgtagattcctcattggaatattactcattttatgatgacaggcaaaaacgcaaagaactagaatactttggtctgtctgctgcaattctggacaaaaatttcagaaaggcatacaactatatcaggataatggtaatggaaaatgtcaataaaccccagctctggaacattttcaatcaagttaccatgcactcccaagatgtacgacatcatcgcttctgtctccgtttgatgctgaaaaacccagaaaatcatgccctatgtgtcttaaatggacacaatgcatttgtatctggtagttttaagcatgcgcttggacagtatgtgcaagcctttcgcactcaccctgacgaacctctctatagcttctgtataggcctaacctttattcatatggcatctcagaagtatgtgttacggagacatgctcttattgtacagggcttttcctttcttaatcgatacctcagtttacgtgggccctgccaggaatcattctacaatttgggccgtggccttcatcagttggggctgattcatcttgcaatccactattatcagaaggccctggagctccctccacttgtggtagagggtatagaacttgaccagttagacttacgaagagatattgcctacaacttgtctctcatctatcagagcagtgggaataccggaatggctcaaacgcttttgtatacctattgttctatataaagcaccgcaactgagaacagagcaatggcagctgctgtgtgaggaccagtgtcttctgtctcagggcttattatttgtaactcccaaaatagaaatgacaatttcagaattacctaacaaacagtgtatttatttttaatatgtgataatgatcttgtggtatatatgcaaaattattcctacaaaaatttgtatattggtctgtcattttcctttcacattctatagtgaattgttcccaatgttgaaatggacgtgtaagcctttgagctagcttggagtcgaatacactatttttcactcacaccatttattcatctttgtatttaatactatagctctgtcaatatcacatgaggcagtttttcaaatacgtataaacagaggttgcttattattaaaggaaagacaaagtgggactctttatgatgtcatgacccatgataactaagcacctaagaaaattatttaaaatagttatgtggtaggcagaaagacaaataatttagttttttacttttcaccagcatgtatcttagctacctaaactgaaacatgggaggctgggcttaattcaaaatatattgctccaaggcaaataaaaaaatgctttatctatatttgtggctttctgatgaaaaaatagagaagagcttgttcaataacaggacatggtttccatttcaagatcacaagtaatataagactgggcaagtagtacgtatggaataaaggacatactgctgattgataaagtaaaaaaa

SEQ ID NO: 53600 - DNA, 750 bp, Homo sapiens
  misc_feature (1)...(750): n = a,t,c or g
tgctgactgaagtgcccttgggctttgagtgaacatcagtggtagccaggcagtactcgccatgggtctggggcaagggtggccacaggcagaaactctgtgcttacagaaaagggagggaagagtgtgaaggacttagtcttgtggcttgggtgccagctcagccacagtagaatagagcaacaggtagattcctaaggtttctgacttaagggactgcttctgaaaaacatcgctagacctgactggtgctggaggaaactcaccattctgaatggaaggacaaaagccagagtggctttgtcacctgatgattgtagagccctagggatttgggtgagcataggtgatagtcaggcagtggtaaccacagcccttgggtgagacccccagtaccatactagtttcaggtctgaccccagcacagtcctaatagtggtgacaacaggagtatttgtgtcacctctcttctagcctagttagctcagcacagagctgagctgtttgggagaacgtaaggaaagagaacntgagtcttttcnnnnnnnnnnnnnnnnnnnnnnnnnnnnnnnnnnnnnnnnnnccaagaagtatctctataagtctgcaagaaccatattgttactggggcttggggggtgctccctaatacagatggggggctggcagtggaccaggaaacttaggaggcacaacaccccaagtggcctttggaatgcttgggaaagcctttccaaagaagggacaggt

SEQ ID NO: 53601 - DNA, 394 bp, Homo sapiens
ttttttttttcacatgggaaagtcttagattccagtagatggaattgcaatcctttgcagtttgttctcattacagataatcaacatttcttttgtataattcaatacatgatcatcaagttaattggtaaatttttattgaaatttaaaacttgcatttttatatatgtgtatgtgtacacataaaaatattttttaccatatgaaaattgcagtagctaattttctgatttcctattttataatgatacatgggctggaaaaatgtagaacgtttttatattctagaaatttattttggaagtacatttttataagggtctaatctcacttttggaaaatgaaagcacaggaatgatggggtctggtttatgtgaacaagtgagtagaaacc

SEQ ID NO: 53602 - DNA, 1309 bp, Homo sapiens
ttttttttttttttttttaatttcagcagcatctttattgcaacaaagaacctgtaataaaatgcaagaaaactaatgtttcactttacatgattaaaagccatatacctaaaaatgagaaaacccataagcttactggagacatgcaattctttttatacaagtcaatgcttaaaacagcaggcacttcatgttctaaaattaaacacctgaattccaattttgctgaatacaatataaatttgttttggggttacttaaaaacaaacatacaaacactactttttctttatctgtaaaggacttatgaaatgatcacctagagcccaggaccttgcactaacatctctatatttgaggctggaagatggctaggtgaggctgggaaggtgggaatcaaaaaagtttcctttttcctttatatctgctgggaatagacacactcaccttatatagtttagaaatggccatgtctcttttcttacatcaaatagctataaagatgggctcccaggcttaagcaagcactctactctatattccaatcctcaaatcctccactataccaaggaag[450 bp omitted]aaggaataaaacaagtagtaaaaaaaaaaaaaagtaagcatcggtatcaatatcgcattcttttaaaaggtaatgcatgcattgtgacctaatcctcttgtatgaggctttggaaaagaaccaggaatggcatagagagaaaaactttcattccaaaattaatctccagacaaaggggatagaaacaaagtaaacaacatctcctgctgctttcagagtgagacggggccaaatagttaccacagatgagcagcttcatggactactgtttaggttcttgtgaat

SEQ ID NO: 53603 - DNA, 535 bp, Homo sapiens
ggccaatgagaatcacggcagcccccgggaggaagcgtccctgctgagtcactccccaggtacctccaatcagagccagccctgttctccaaagccaatccgcctggttcaggacctcccagaggagctggtgcatgcaggctgggagaagtgctggagccggagggagaatcgtccctactacttcaaccgattcaccaaccagtccctgtgggagatgcccgtgctggggcagcacgatgtgatttcggaccctttggggctgaatgcgaccccactgccccaagactcaagcttggtggaaactcccccggctgagaacaagcccagaaagcggcatcctgcggaagagcagccaagcggcaatggtgtgaagaagcccaagattgaaatcccagtgacacccacaggccagtcggtgcccagctcccccagtatcccagggaaccccaacgctgaagatgtgggggtacgtccccttgaaagattaaacagcaggcagttttcctaacggacccattgaggttttatttgg

SEQ ID NO: 53604 - DNA, 501 bp, Homo sapiens
  misc_feature (1)...(501): n = a,t,c or g
tgaacagttatcctatctgatctttttatatgcaggatagtgattaaatcactctacaaccactttcctctaatttctcctcataagcctaatcaaatgtatttgccttacttcctaccattctgttgaagattctccgaaaattggagaaagcactaaatatggtaggaagattctcttgaagttcctgtgatcttttgaaactgcattcctgagttctatccttacttccttaaagcagcatgcacttttggtttgttgttaatcaggggtctcctgtgcttggtgtgtggggtaggaaggcaggtgatcacctgcaacaattcttcacagattggaagttaaacatgaaaagcccccggagaccccacgaactagatgccagaaagttctgcagtcattgactgttaactgcaattccaactatacggtcagnnnnnnnnnnnnnnnnnnnnnnnnnnnnnnnnnnnnnnnnnnatggattgaaatattccacaaaac

SEQ ID NO: 53605 - DNA, 47 bp, Homo sapiens
aaaggaggccgctcccaagtccgtccttgcccgtggccttcctgttc

SEQ ID NO: 53606 - DNA, 691 bp, Homo sapiens
tacaaattgcagtttattaaggctccagagtgagaaatggcacttggttctgggcaggggcaggggcaggggtgtcagtggaacccaaaggagctgggtccaaacatgttggagggacctcctccatccccctacccccaataaataaagtctcagctccatctcagggtgctggtgcagggcagggatccctcactgaggagaacccagggctgctacctccttcatatttctccccacattggacctggtcacaggtcagtgagcaacagggcttctgtggtcctagtactctgagggggctggggagttcagggtggagagctggggcctggtggtggcctccccgtagccagtcatagtccgaggctgcccagggcaggctcagagtggggcctgcgttggggacactgtgcgcatcccaggtcggggcccagcctgggccacagctagatgtgcagctccgtgtcatcaggtggctccaggccagactctgcgctgagtgctgaggctgagggaccctgggccaccccaaatggtgagacaacgggtgagcgagcagccagaggagacagagagggtgagaagctgggggacatggcagctgaggacagggagccttcatggctgatgggggagcggtgagaagctggtgggaagatggcccgggctgcagctgtgtttgctggct

SEQ ID NO: 53607 - DNA, 350 bp, Homo sapiens
agactcagttcaagtctgggttttctttgctagctgtggtaatccagcacaagttacttaactactcagaccacagacatagcaataacgaccttgagaggttgtgaataaccttggtgcccagtgaaggtctactttcctctaccacgtgcagcattctcaagaaaccattgcttggggtttttctgcagcctctgttgccaaacttggacaggaagaggtgggacggagagatagcagaggggcctgagggggctaccctggcatatgcagctgcaggcacccgcagactgacctcttaacatcccagtttatacttagcaaggattaggtgacatgaagacgatcct

SEQ ID NO: 53608 - DNA, 895 bp, Homo sapiens
gcctggcagaagctctgtggttggagctgggctccgtctccaggtctggttcagggggatcaggaaggctcttttccacctgtggcttcactggccctttgagatttcctatctcaccgttacttcagttacccttgcagggggccagggagtcaagaatataccgtgttcctccagggtttaagccggccatgccttcccgagagcataaccaacttgacagggggtgcccagttaccccacaaactgaaggaaggagatccttcccccatccccaggagtgctctcaaccagcctcagaaagcttgagaagatggaccctttgcccaccagggttaattcctggtggggcagctcggctgtgatcagggcaaccaaacctataggaagccttccagtgtgagctggaattagactgaacatgtgcttgggcctgcctctccctagacgcagttgcggggcactccagggaatgaaccagctcaagtgtgtccctaacagcagcctggagctacccccaatccctcacagcctgaccctcctcattccatcagatgcatttgtagaatcggggcaaatttccttatttatttatggcccatgcctttccccctcttcatcctgatcccgttttgctttgaagagaccccagtaaccaaaaaacagcctccagaagccaaaaccatgcctggatctcccatagcttctcctttgcttccaggagaaagttcactgaaaaaaaaatatcttctggcttcttgtgtgtacagagacaacagaactcggtggggaaacgggaatcttttctgcaccaaagctgcttctaaagcagaaagcagtggggctcttggtgtttcatgctgccttatttatattaaaggaagaattaaatctt

SEQ ID NO: 53609 - DNA, 1147 bp, Homo sapiens
tttttttttttttttttaaggtatgcactaataaaaatttaatatcagaaaacagcatttttttaaccattcacaattaaagtggaaagagacaaaattataaggcagccatccatggaatgatttcatgtttacaagggatccagaaaaagggacatttaaaatcactgttccagctactgaaccaggggaactgcagtcttatcccatgagacttctaacttgctggaagatgccacaagaaaaaaagatcaaagccaatctccttgtgttaagccactgggttaggctgagtatatctagagaattcctaaatggttgtctagttctttcccacaagttacacatttccttcaggcctcctgaggtgaatctagatgtctcaggtacaaagaggttttaatttcacagcatctccaacagtgcactttgggtgatgtggaccattctgtattgagcagaaattttctaatggaaggaaggttcctctgcagaacaactacagaggattttcacttaacactgcagcagttctggatgaatctggtcatgattctcagtctcccaaggggctcaggggcccacaaggcaggaacatcctttgggggtttgtgctgctgtcatacggttcctgtgttcagtccctagctaccatgtgtttcaggggcttaatacactccgatgctggtgtgtcctcttagttctaatccttgaaaaagagaaaaaccaggcagtgacacttagaagtaggctggtaaaaaaaaaacacaatcacattttctcctttctgcaaagaaaggacaactcaaaacagcaactccctttcttttctctaatgattcaaaataccagaacagggctcacttggctgttttgaattgggaaagaaagaggtgaaagcggggagaaagagaaaacacataacctctaggtaggtagtactgtttccaactgtctacgttccagtgcagaatctttgctaaaaaaaaatttggcaatagtgtgcacaggaaaactgaatcaaacctggaacatcactgctttcttgaaatggaactgacaagcaattaactggagaataagtgaggggaatggagcagtagtattctttaacttaatttgccatttaagagagcacttggaatct

SEQ ID NO: 53610 - DNA, 787 bp, Homo sapiens
ttttttttttttcaagcagcacaaatcccttttattaaccatcttccctttctcgagtatacacaagtagaaaagaaacagtgaagtaccccgatagcgagggtggggagaggatgggagggggctcctgaggttaggacaagaggccagattccagctccttctcctgactggtctgtctctgtgcaatgactccacttacatcccttgacccccgaaacacggcactgggggactgcagccctgctgaccaggctgtcctcctagccctgtcagggactggtgctggcagagcttggtgctgtgccacagactgacagaaaacagcacagtgggtctggccccgggggcagagaagatcaggcaccaagaggggatgtgagaaaaggcagtttatccatctggggactggacagaggcccagccagcctccaaccagcttctgcttcttagatcggactgccctgagtggcgggcggctcggcagggggtccctctcgtaccctttacagaggttttggggaagaggggacaaggaaatgctaggggctccaggtggaggaggaagtctgattggtgcctgggattggccaaagtgagagggggcagctgaggggctgaggtggtcaaaacgggaatatagtggggagtagggtgggaggtggggagatagcctatctcttcgccctctctggggtaacaattccagtgtgacatcaatgtggctggccactgaggccaggcctgatggacgtgcgttgctgaggaggctggtaagagagccccc

SEQ ID NO: 53611 - DNA, 437 bp, Homo sapiens
tggcctttgatctggctccaataaatataccccattcccttattcagcagctctttgaaataaaagtgattttagttcctaggactatttgttatacttttggagctgtctctttccctccctcaggatgtaaaatgtatttcctgtttgtatataccacttcatttaaaaatatttttccttgaggctcaagacagtatgagtaatgataatttttagaggcattaggatcttgattgaaattctggctctgttgtatcctgttgtgatgtcactgtaagaattgtgcatttaatattgatcttcaagcatagttttgcatattttaacatctgaaatcagaaagtgtctttactgggtttttggttttagaaacataaaaataaataatgtatgttaaaattggatgggcatttttggactcgatgatatatttg

SEQ ID NO: 53612 - DNA, 298 bp, Homo sapiens
gacattcccaagaatggcaagttaaacatacagtcgcctctgacaagccaggagaattcgcacaaccacggggacggtgcagaggacttcaagcagcaggtgccgtataaagaggacaaaccccaggtgcccctggagtccgattccgtggaattcaacaacgccatcagctatgtgaataagattaaaacccgcttcctagaccacccagaaatctacaggtcattcctggagatcctgcacacgtaccagaaggagcagctgaacacgaggggccggccattccgaggcatgtctg

SEQ ID NO: 53613 - DNA, 532 bp, Homo sapiens
ttgttgtgaacttattgtttagctagtagctagtttaaccaggattaaacaagtttaatcaggattcttcatggatgtactttttagctaactacagtttttcacatggaaatgaaacttacagtacacacttaacgtaccacagaatttttttctggatttcctgtcctgaagcatgaagtgtactagaaaccaattcttcctgcgctacttgtggaatctttcttactggatcataatcttactttactttatacaatagatgcttaatcagtgcctttaataggaagttagaaactcccaatccaatcaacaaggctttgattctacctcctaagtactacccagatcacagacaatccaaatgtcagaactagggggctgggcagagaagacaaatcatctattagggagtggaacagaaagtggaaacattacaaaggagcaagtaggctcagaacagaggggagagtagtactggggaaactccctactgaagacagatttgccacagtggatatgtatgtgatgc

SEQ ID NO: 53614 - DNA, 405 bp, Homo sapiens
gtaccagcaccgaacacgaaggattcctaggaaatctgagcgcttatttcccaccccgcctccccaactatcatggaaaggaacatgggactactgaatctgtttgctgtgttgtaacgacagtgaaggccgcgactttcttgtacttagggtgctgaagtaatgatctgagggatttgctcgtcatttgctgtggcagagatgatgttgacaccctgggatgctgtgggagggacaaaagactcacgtatatgttctgtcaaatcggagaagtaaataatccattgggatgccaggatactttattctacagcgaagttaattttgtatccgtcgaggctacagtagaggtaaaaatgacattgagttgtactttgctttgaattaaagttgatgggtagcagc

SEQ ID NO: 53615 - DNA, 377 bp, Homo sapiens
atttatcctacaggtccctgcctcctggcagtgccatggtatgtgtgcatggatataccagacacagtcaccatcggccatcagtagcagcccatgaacccacgtgcacatcctgcatcttgctcttctgacccttcattcccacttgtcttcaggcaggcatttctgggatctaaactagaaatccttgaaaacaaatagtaccagccactttgaggaatgtgcattcactgtagtgggttattatggggtctctgcctcctggctgtgttatgcggagcccaggagtggaggagagccgtggaaatagacagggagaggctggtacttgggttgtggtaatagtcaggcttgccacaagagggcactcatagatt

SEQ ID NO: 53616 - DNA, 393 bp, Homo sapiens
aaaaaaatcaccttagctttttctcttagaatcttctctaaaatgtattctttgtggcattctgaaataggattcatgatgatgcctgttgatcttagggacactacctcacctgccagtatctttggggctgtgtccttcaaggacatgtccccagactgctgtgcagtgtcattttttgtgtttggtttggtggtggcttcttcccccttgctaggctatcaacctcttatcaccacttgttggtgtcagaactaactgcttctggtctggagagggactgaccgatgcctttggggtagagagaattatgaaagaaattttggtatttttctactttatattttctgaggtttctgtaataagcatatttcacttttccaataaaaaaaa

SEQ ID NO: 53617 - DNA, 1501 bp, Homo sapiens
aaaaggatttaaaaattactcttttacttttattacaataaataattatcaataatagaattaaacaattttcaattaaaacctactgcattactttggggtttcacagcagcagaaacaaacataaatccagttgaaagggcaaggcttccagaatccagtgacaagaaacagtctggtcttgattattcgggctagcaatgggaaatactggatacaggataatgcaaaaacaatgaaatgcatcggcatactctctttgtacatcacattatctgacactttaaaatattccagctaagtaatttaagcaagccatgaagctctgtttctgcaacagttagagttctcccccagcaagcccgcagcacaactgctcccagagccaccctctggccagaaacgggccccatcatcatgcagacctagaagcctccaccctggtggaagcagccatctttctcaaagctctttctggctcacacaacccatggttaaaggaaaatgggaaagtgacatatttaaagggcctttctcgaggactgagatgaactggaagacagacagactgtggctccagatcaggaagaggcttcagagtaagggccacatgcagatgaactccacatgaagaaactatctgataaaggctgacccattttgctgataatcaagcagactgcatgtatatatgaatatatcatacatacatatgtagtgaatatatgtgtacatattaaataggcatacacacacatcacacacaaccagataaaataaatggtacatacattgctactatgaacactgcacgtcccagacagaccaatgactaatatgttcaattaaactacttgaattaaactactcttcctctccccaaaatattctgcttgcagcaaacatattccagttggctcaagcggtgttgtttctaggttcctgagaaggaatggaatcgtcctcttgtttcagaacactacagaaagccaactgccaacaggacccaagcctaaaacaaattccatatttgatttggccatgattcctccacctattccttagtcacagggcatgaaaccttactcagaaagatatcaatttctttttctacaactggctacaaatttactgtattatgttagatggaggggactgggggaaggcgggcagcagggagtttacatgttggcaatcattcattgcctttccctttacccagagaaaatgctactttaaaaaaaaaaacacccagaaatttagagttcaataatgaattttgctttcttggcacatttttgaaatgatcatatcattacatgtagctaggtctttatctcctgaatgctcctctagggaggcaagttatctaaacaacaaaataacctacaaaaaaagttaatattgtgagcagtctcaatttgtagttattaaactcaaagtctaatgctgaaaggcaacagtaatttaaacagatttgtttatttttattattattttt

SEQ ID NO: 53618 - DNA, 2038 bp, Homo sapiens
gtatttaaaggtagaaatattaataatttttcctaaaacatctccctaagaagtcactgataattataattagtttaaatttattcttacactacttaagaaaaatttcatttagaaaaggctaccatgagatcttttgactatatggagtagactgcatacagatctctttatttctattatgaatattttagcgattataatcagctattccactgagtattagatttggtcactaagtaactcatgtttttctttagtcaatcattcattcattcactaaaacatttgttgagagttggctaaactctagattctgtgccaggcactgtacagggtgatggagatcactccataagaaggcctcttggctcttagccagatcatatgtaatactaaatttaaattttttgcattaaaaggctaaaaaatcatttgtttttgttaattatatactggttgatttatagatgtaattagcacatattcataagagacaaatatatacaatgagttactatacatatacaaagtgattttagctgtataaacgtgatattgcaaaaaactacagctaatgtttcttgctgggtaattattagcataaatatcaggttcttagaggtctttaagagaatactttagagctaccaaaattagcagcagtgatgtaatatcaccctgaaataccaggagcagaggtgccccagagtgcttgcacagctatgatcaggaaacttgacctgccccattggctacagcaacgggcataaggactaggaaggttccactagctggggaggtcttgggaaccctccgagccagaaagaagcattccagcatggattcctcaggatggcaatgaggaaggtttacagaattttcacagggcaacagagatcaagtggtatgaaaaggtaggagttttaagctcaagtctcaaagataacctacctttacattctcagtcagaatttgacccagaaagaggaagtttcttcaggaacagaccgtacgttgatgaagtagaagtcattttcagtgaaaaacggagtacagaacttggtcataatatcttgcattttataggtttattaaaggtttagttttcaggtttcacattcgctattcagttgtaaaccgaatggatgggaggggagaaaatacaagctctccacacaggtatgctcctctcttttctgagagagaaggcatgggattttcagcataaattccatgttatgtgagtgctgtttgagttctgaagttcctatcaatatctgttcctgcaagtgatctctgtaagaccaccttacatgctggtcttagttattgttaaaattgcaaggtttcttcacaccctctttgataagaagtgtttagctggcagagctttcccttgacttctgagtctagtgtgggttggcccatgacagtgggaagaaatccaacatgttacatggagaccttgtatgtaaacaaactctgtagcctttgaaagtggaactgctttttacagttaaagggctgctaaatggcttgcagatgagatcttctggctcaccttgatcttcacatgaacccattgtgacctatctggatttcctaggacctgtagtttccatttgggttatattagtgcctcaggaatgtgtcactactggtcaagcaatactcagaaattcaggctgtgaggggttagattagaggaaagtaatttaggtgagctatccagagctttcaacctcagggtttataggaaaaaaaaaacaaaatacaaaaacccttaggacttctcatactctagccctgaccttgcagtctcctctgaggggcctcctaagacccttaaaataatattacaataggactttgagtgtgcatttcacagtggaaactacgctctggctagcattacttccaaatgctagttccagctaaaaacaagtactttttattagtttcttgtctttcaacattctgccatcaaaatatattcattttattaacttaccgattattgggaacctgcaaaaaa

SEQ ID NO: 53619 - DNA, 373 bp, Homo sapiens
acaaatgacattccttaagggccagtgacctttattgtttagtcccaacatatttggtgatttgggggcgatagccctactttgaattgaaaacaatttgagtgttaactgcttgcaaactgtcatgggtctcaatctccaacctctggggactgtaggggagtcaggcaccatttggcctcctccccagctctgtgatgtgctgcttctctaaactgcaggcaccacctgtgtgaaccggacatgaaactggggtggctaatgccaagctgttgcaggcagctgcaggtgcatctgcccgggcctgtgactctgtcaccagcaatgtactgcctttactgctggaacagttccacaagcacagtcagtaccc

SEQ ID NO: 53620 - DNA, 919 bp, Homo sapiens
tttttttttcacgtttcatttttattgtgctgggggtcaggcagcagcccccactgaggccccacccagcctccgggctgcctggcctgtgccatgggtcccaggctccagcagggagctcgtaccttccctcagctgagggcccacctggccttgggatgccgttggggtagcccagggtgggggtagccaggggtggattcacagagaagatcccagcccatcccatgccagggtctggggagcctcccgaggaaggggaggaggaagaggaggaaggccctgcctggccttccgctcagtcaccccgaggtggcttctggacccccagcatgttgggcaggggcatgggggctgcagggcggcgtgaggggctcagtccagcctggggcgctgggcagtcacgagtctttcttggaaggagcaggaccccagctgctcctccaggaaggaaatctgctcgctcagggagtcgatgcggccgagctgctggaaggagtgcaaccaggaggctgccggggtccgggagcccatgctccagtgcctgcgaggccaggctgtgcagtggggccagcaccagctgcagcttctcctccagcaggtccaccctggactgcagcctctgcacttcttccttcattgcactgtccactcctgcgggcagagccaggcgctgggtcacggccggccggctccccacccacacccccagggctccctcctgtccccaggggagaggcagagccagaagactcagcccaggcctctgccacccccgctgcctgcctggcgctggccagaggtctcaggctatgccgcctaagtacgtcggggcgggtggctctgcgcagaggctcagggtcccggccacgctgagggaggtcaaggctgaggtctcagcggcgttcctgtgccgaat

SEQ ID NO: 53621 - DNA, 867 bp, Homo sapiens
  misc_feature (1)...(867): n = a,t,c or g
gatatgatggcactgtggtcagttcaccaagagcagcactgagatgggtggatccaggtgcaccttgaaaagttaattgcacaaacctttgctttgaccccaaatacgcttgctagtgcccttccctgcagcttcccagacaatcagcagggtccatgggggcagggcctgggcacagcaatgccctgcttcctgtctgcatccataagaggcccctccacaccgaggctgctttaggttagccaaccaggtgcaggggaggccccatgcaggtgccattataccaacagtgaggcaagaaatcagaaaaaagaggactgccttatgttgagaactgaccagagattgtgctgggccagtgtcactaggagggagaaacagatgatgcaggtcgggatgaggcccctcccaggntntgggacactgtccactccctgctgccttagctgccgttgccatagtgtcccctcctgtgcctggggagcttctagcccagggtgtgggtgttctcaccccacccctgcagacttacagaacttgtaaatagacagcaccttgagatttcatcactttatgcagatttcccacttgggtcgttgggggacagggtccttggcctaacagccgtcctcttgacatccacaggctcccaccacaccacgattgcagtcatcggggaacttcttttggtgtcaggaatgattggcttaaattaacatttgtttgcaagatcaattattttttagcatatagtttctctccaaagaagcaactaggtctttaaagatgtcccagtgcttctgttagatttttgactcttacctgcataatattccaaagcactcagatcaaaataagacttttccc

SEQ ID NO: 53622 - DNA, 521 bp, Homo sapiens
ttttttttttattactataccatttatttgatgaattaatcaatgttcaaatggaagaggttttgacaatgtcactatgtttgatgtttatacctgccctgaatgcttgctcagaagagaaacagatttcccagtattttttataacttactttcccattgtcttcaattaatttgctattatcccaagtagacagacaacttcagtagtagccatctccctacatttttagatcactgaaaaaaatggatgagcaacccatgaaaataactagcttactgaaatgcttgtcttttaaagaaaagttgggattatttaaaaaaaaaaatggcccaggaccagtagctaggagatctgggagagagaagtcattgccttggttctgacactaagtaacccttttgccttttgcaggtaacttctcatctaggtcctcagcatccttctctgtaaactgaagagtttaaatgactctaagttcctctctctctctctagatgttctctaacaccaagtttatg

SEQ ID NO: 53623 - DNA, 176 bp, Homo sapiens
atttcataaaatgtttattaagcaagtgactggctttttaggtcttctgttatcaaggcttagaaggggacatggctgagatctagaatgcagctatgaggcatatcgaaagtatagcattatgtcccacactgtgaatttgtaggaattactgtaataatttttttctaattgtt

SEQ ID NO: 53624 - DNA, 1446 bp, Homo sapiens
gacggtcacccgttgccagctctagcctttaaattcccggctcggggacctccacgcaccgcggctagcgccgacaaccagctagcgtgcaaggcgccgcggctcagcgcgtaccggcgggcttcgaaaccgcagtcctccggcgaccccgaactccgctccggagcctcagccccctggaaagtgatcccggcatccgagagccaagatgccggcccacttgctgcaggacgatatctctagctcctataccaccaccaccaccattacagcgcctccctccagggtcctgcagaatggaggagataagttggagacgatgcccctctacttggaagacgacattcgccctgatataaaagatgatatatatgaccccacctacaaggataaggaaggcccaagccccaaggttgaatatgtctggagaaacatcatccttatgtctctgctacacttgggagccctgtatgggatcactttgattcctacctgcaagttctacacctgggctttggggggtattctactattttgtcagtgccctgggcataacagcaggagctcatcgtctgtgggagccaccgctcttacaaagctcggctgcccctacggctctttctgatcattgccaacacaatggcattccagaatgatgtctatgaatgggctcgtgaccaccgtgcccaccacaagttttcagaaacacatgctgatcctcataattcccgacgtggctttttcttctctcacgtgggttggctgcttgtgcgcaaacacccagctgtcaaagagaaggggagtacgctagacttgtctgacctagaagctgagaaactggtgatgttccagaggaggtactacaaacctggcttgctgatgatgtgcttcatcctgcccacgcttgtgccctggtatttctggggtgaaacttttcaaaacagtgtgttcgttgccactttcttgcgatatgctgtggtgcttaatgccacctggctggtgaacagtgctgcccacctcttcggatatcgtccttatgacaagaacattagcccccgggagaatatcctggtttcacttggagctgtgggtgagggcttccacaactaccaccactcctttccctatgactactctgccagtgagtaccgctggcacatcaacttcaacacattcttcattgattggatggccgccctcggtctgacctatgaccggaagaaagtctccaaggccgccatcttggcccaggattaaaagaaccggagatggaaactacaagagtggctgagtttggggtccctcaggttcctttttcaaaaaccagccaggcagaggttttaatgtctgtttattaactactgaataatgctaccaggatgctaaagatgatgatgttaacccattccagtacagtattcttttaaaattcaaaagtattgaaag

SEQ ID NO: 53625 - DNA, 1243 bp, Homo sapiens
  misc_feature (1)...(1243): n = a,t,c or g
ttttttttttttccaagcacatccacccatggtggctttattcagtcacgtccccacgcccacggctccctccaccaggcagacagaggggaggccaccccactgcaaagggtcccagccagtgggcaccaacctcaggaagacgtggtccccacctggagcttccctcggctgccctggcccttgagcccgtcctgaggatttgtgctttgactctgacagggagcagcaggaagctgccagcccactgcctccatgcgggtccttggagggcagacggtggagcggcgcttcctcagctcccgcggtcaggccccatcagggatggtcacagtccagccacaggggcgactctgcccatcagtccccctggggcagcgaccagatcctggctggggcagcaccgggacaggccctctctatgggcctaaggtcaatgcaggtgggggctcgctgggcccaggccaatgaacccacccgtaggagccctcactgggcagcagggcccaggagggcacccagggactggccgcagagtccactcagggcaggcgtctgtggcttggaacctgccctcgccaaggccactggggggttaaggagcagatccctcagacggccttgggccagaagctccctggagagctgggcacctcgaggagcgtctgggagcctcaccctgtcccagtggctcctggcacccctgggagcgtcagcaccaccccaaagctgggtgcctgtgtcgccactaaacagaagggaaaccgaggcaggggggccggctggcagtggagcattctggcagcgccgggcgaccaagtcccgactggcagcggctggagtttggttttcagaagcgaaggctggcgttggcacacagggaaggctgcccgatgacgtgcctcgactgtgttacatttactgaaggagagcggcctccctgggcacgccactcaggcacggtgaggctctgtggcaccaccagccgcatggcagggcagagagtggcgccgtcctgcatgccccccacagcagaccagagtcccgtcctcacgctgcacagtgggtgatgtgagtttcaaaactacgcctccagaccgagaaaccctcccagctgtcagcaagccgtggcgccgagctgccgggcacctgctggctgctctccagtctcaaggagctgggacagcgggcatggggaggatgcnttacgcacctgctgcaccagctcttcctgcttcctggg

SEQ ID NO: 53626 - DNA, 371 bp, Homo sapiens
tcctctttttggaattaattagggcttgttaatttttttaaattatatgttttgtgataaaacatttagaagtccatgttttttattctgtactgtgtagcttaagaaatgtcaaaaccagggagtacaggcttattgggcacactagaaacaagagtgggcaaaggttaattcacagacctggccagtctcctcctgtcttcaaggcgatgatttaccctgtgattctcagacttcacatgtaccagaaatctttggggcaacgtgctaacgtgcaggttctcagtccctttccccagcgattctgattcgtgaaaccccagttgatcattcaggacacagtataaagttcttatgcagagagaagctga

SEQ ID NO: 53627 - DNA, 573 bp, Homo sapiens
aaatgagactcaaacctagagcgcggtaatgaccttactaagaccaaatggctggtgaattgggcttcactagaatccaggcttgctggctaacaccaatgctccctccatcatttcatgttatgttttcatttcccctctgtctgagagattgctctgatgtctttccttccataagtcctacggagatcgagcttacctcatttttctcccaggcctaggagctcaattaccaggatcactttcttccccagggtgtactacagacctccacatgttggacagtaggattcagcagagaatgagtcccacatcctcttttcatccataagccactcttcccaactactcttccgccttccattgtccctatgtctactttacgtgctcaatctggattttggggaacctcctcccaaaaaggcattagaaggaaatgccaagcaccgaaattttgtcaagaagcaggaggctcttagaacggagaggctttctgagtaaaaagaaccaacccccctagcaaaggcgcctaagtttgcactcttgaaccttcaaagtaaaggggtaacttct

SEQ ID NO: 53628 - DNA, 444 bp, Homo sapiens
ctcagaaagcgaggagcggcctccacggaagccaagctggccgagtgcttttaggaagaagatccttttattgcttttgtacaagaccagacaggatctcatttgttaaacgtggtaccaattgggtgtcttaacacaggagcagaacttcctagagcagaatgatgatggtagatctgaaagtggctgcgtacttggaccctcagatcagggctttgtgggagaccaaggggcctgcaagagagagctccggtcagagtaaaagatctcctcaaatggactgtctcgatcctaagagctcttgctggcacttccggaatttcacctatgatgaagcaggtggaccccgtgaggctgtcagcaaacttcaagaattatgtcatctatggctgaagccagagatccactcaaaagagcagatactggaactgctggtgctggagc

SEQ ID NO: 53629 - DNA, 2816 bp, Homo sapiens
actgccatggggaaaagaacgctggaattttccaaacttaagtctgtaaatatgctcatcttaagttcatgtaatgtttccgctaactcaccaagaataagctgacaatttaaacaacttttactgtgtaaaaatgaagtgcacggcatggcatcacagtatcttgacatttgttttgtgtcatttagctactttagaaaatagtttctgaactctttccccctttatactgtattaaggcaaaaacaaaacttctgaagcattaaagatcttcaccaaaataactattggtaacttcaggaatttgtcagttgccttatgtgaggatgaatagatccaccaagcacgcctataatacaaagtaaactatgatttttattgtgaaattttcatagatggaaaattgaatattctgtccatttcattttacaattatcttaccacttatttttgtaccatgtatttcaattgcctgtttagtgaaaaataaaaattaaaaaaacctattcatttttggcttgtgtttagcttaaattttatcattaaattaaggagcccacaacaaaatgtgttgccagcagccatatcccaagcccctgcgtgaagaatgttttggctgctatttcaacctaaggaaacaacgtttgacctcagtcaccttaaaatgccagtgtgggcagaagattttttattcctcacaattaaaaaccaaacaaaaccccctaggatcttgaaggtcctatttcagaaaatcttcatatatgcaaaatgtcaccaaaataaatacatttgcctcaattatcattaccacccagtattcatgttttaatttttagggatataatttctaaatttagagcaatcaaatttcctgcttcctatcttaatgcttaaaccctcctccaacaccaagttaagcaactgtggaggataaaatagttgaatctgactgaaagcatggaagaaaaacattagcacacattagtctgatcatttgccaattaggaaaggtgctgctttctacctctaccacagatgcatttatgaaatgttgatcaatgaagctatttcaaatggttttagagaaggatcagagataacgggctagatagcatacattctaaacttgttttacatatagtttgagctccctgaaccactgaagttggttaaatccctacacagcacagaagcccctctaggtcatgttattgggcatattatctagaaagcaaatactggatgctgctctaagataggtctagaataccttagtttgcattgtgcacacacaaatggctgtgttgaatataatgcaaggctctatttccctttaaccataagaatcaaaacaatacttatcaccatacagtttgatattacttccaataagtacaatatttattaaacatatcttcagttgttttgttacatagtgtgcaacaaattacaatattctgcagccacaaattatatgcagagtatgaagaaactattaatcagatagtgtaatctttccatttataactctacaaggaagaactagcaaatcagatcttacatataacatctcactaaactttatgcatggaaagtgacagacactgcttgtgctgtttgatacaaaatggctgaacttcatcttcagaagactaaacctgacatctaaacatgccaatataaacatcaaaacaaaatatattctaaccaaccacgggaaacagtctggtatcaggaaagcaacaaggattacacacattattttataaaccagcacacaaaggtttaaaacagttcctgaaaatgaagttagctgtcttgagtcaagggaataaaaaaaaagtcagtattgaccatttacaatctctgacctttgtggagacggtaagaatctgttgtagtgcagctacatacagtacaattcaggcaattttgttttttcacttgggttcagattgcaaattcattgctgtgagaaaaggatggaggcaaattttagcagcaacctccacctgactgcttgactggagtgctctgaattttaacattggacttctcagcaccaccagctgttgctccgggacccattcgctttttaatctcagctgccatcgtcatgaaagactgttctacattcgttgcattcttagcactggtttccaaaaacggaattccaagggaatcagcaaattccttcgctgttgtgtagtctactactttctttgtggtcagatcacatttgttccctaccaacaatttgttgacattttcactggcataacgatctatttcctgcagccactgtttaacattattgaaggactcctgatctgtcacatcatacacaactatgatgccatgggctcctctgtaataactggaggtgattgttcgaaatctttcctggcctgctgtgtcccatatttgaagcttgattgttttcccgtctaactctatagttcttattttgaaatccacaccaattgtgctgatgtagcttttctgtatatgtatcatctgcaaaccttaagaagaaggcaagacttttccaaccccttgagtcgccaatcagaagtaacttgaataaataatcatattcgggattcatgctggacatgtcaactgcagctgccgccgccgccaccgccgccgcttgctgccgcagccgccgccctgactctccgcgccacgggtaatcgaaagaaaggaatgagataggctgttccgggagagcaaacgtcttcccctactccgtcccctagaacacaatcagcagccgccgccactccatgatcgcttccacccaaaatggccct

SEQ ID NO: 53630 - DNA, 2085 bp, Homo sapiens
ttttttttttttttgacagtagacaatgttgttgtttatttaaaatgtttactccaagaaatatatatataaaaaaaataataagacaattacagcactaaaccaggcaccttcgaccaaatcacaacctcctctttgattccccttcacgctaagcctctttcaaattctttttcctgagctggaagaccagtcagatgcccgcaggttcagcgccaagcacattccccaaccgggcaactgtgtacctttctctaggagtgcacgacacccttcccccacaactccttgttttaaaggatttaacccattaggaagcccatgtttcaatctaagccagaaggagctgcggggacaaggcagtcttcactttgaaggtccctttcctgctccagtccctgggctagggttctagaagaggctggctgccacgtttacatgaggccaccgaagatctaagtccagctaagcccagggaggctcctgcaaaggctgggacctcgggtgctgcgtcctcaaccctctcggtgaccacggctcaaaggagagacctcaagggtgccaggagcacaggtgcctgggctgcattccaggaaagagacctgtccagggaaacggatcaggctgtcgcatggaagcttacgtcagagatggtggttttggggtgatttggacaaattaggttagtttagcaaagctctgaagtagcagaagcttctcccctggactactgattgaacacagaacaagagatgcgcgtggcgtcagactaagtccttagagagatgcaggccagtctccctcccacagggccttgggactggcaggacagacactgctacatgccctccaagggccaggagtcacggtaaggagcgactggggtggaaaattagggaaaaaagcaacaacaactacatcatttttggcattttaacatggagacagtgacaagtggtaacaaagcaaaagaaaaaaaaaacttgaagagaccaatatttaactttcccatccacccaagtctcacacttaagttctagtcccatctcccccataagcaccactgaactaaatatctattttaaagcacccaaaccagtcccagaccctctggaaaccaagagcccccagccgacagctgtcgcctctcttgggtccaggcgagaggagggttccgggaaaggcacctcataaactcacttcaagcgcagcagcacacggcggccgaacctcgggccacttgaatgaggaacgcaggtggccagtccacagcatcccgtgctgaacacgcaaggaaaggggaactcttcggtaatccccaactatttggtaccagaagccaagcaaacgtgaactaaagggaagctgggtcagcagaacggtaccccgagtctcagcaacaggacggcccgcgcgaggcaggatcccaggcgggggggagaaaaagagaccaaagcacaaggcgatcgaggctggcacagaaagggctgatccttcttgcaaggactggagaatgcacttgactgctggctggtccatctcttaattggcgagtgcgcgtgacaaggctcagccctggctccacagggagccaccaagctgactcaactgatacaaatgttcccacctctgccccacccccaagtccccatggttccacaatcacctgattttcatttggacctctttaacagctaaagtagatataaatggctaaacatagatccccaatcccccaccaggggggacacggccgattctataatgtcgcagccagaaggctgtgggcgtacaggcagccaaggggagaaacagaaccgacaccggcctaggcccatctgcaagaaaaagcggagaaggagtgacccggatgcttccgaagcacgcgagcgtgattttggatggaggcgggccggtgactgcctagctgctgccggttcctgtaagggacattttttctgagtaaatggcgattcctcttccatgtggcatctgcttggatcacgatgctaattgtaactggaaaggggtgttttggggagtgtattcaggaaaggaagaaagaaaaaacttaaaaaaaaaaaa

SEQ ID NO: 53631 - DNA, 394 bp, Homo sapiens
tttttttttcactatttttaaattatataatgaccagtagattcacagtagcatgtacttgacaagtgccatggatatttaagaagaaggtaaataattttaatattttttgctgtaattttataggagcagtggactgtaagagaaatatctataaatcagagagtatttaggaaactttgtattttataggtggtcattaaagtgatcttcaggatataagatagtttacacaaactttattctcctgataggaaatttttattcattttcctaccactcagcacttttgttctgccttgtactgcttatgaggattaatgttttaaatttgctttatttgtgcttttcagagagttgtcataattgtggcagttgtgtttgtggcactgta

SEQ ID NO: 53632 - DNA, 353 bp, Homo sapiens
gcacagagatgtgtgtgtgtgtgtgagtgtacgcgtaaaagcgcacaagaaagaaaatgctttcttccttctttcaccttaaactctcattctgcctcattcacaaatatcccagaattccagcactgttgttttacaagatccatctccccacgcccgtcactctgccatcactgtccacgctcagggtccagagcccaacccttcagggccatgagggtggacctcagcctgcgagccttgtctggccagggtgctgaccggcagtgtgtctgcgtttcaggctgagcagcaagtctctgctgacatcagatgattatgagctgggagcagggataagaaagagacacaag

SEQ ID NO: 53633 - DNA, 592 bp, Homo sapiens
ggcgagggggcccggggggaggggacagagctgaggatttcctggagtgccctgcaggcacagaggaggtcagcaaaggtcttgaatagattttctctggaaataaagaatccttagatgcctaaaaattcccttcctgttccctcctggtcctgggacacctcccagggggactgttccttatttctctctcctggtgtgggtaaagggacagttacaaaccaggtcaccatcctcagaggctgagccctgtacccaccccagcacagcccacctccgccagaccccgtggctctgggagagccagctttgctattcccattgtgacagcgatggcaggcctgacccacggggcagttagagcagcctcgtggagctcgcccctcccctcagcctgcccacctctccctgcatcctgagggccagtggccccgggctggcacagatacctcatcatccacccgctgcccctccccgtccctgtcccccagcatcggaggcctgcaaatctagtgccgaatgactatgtccagattggtgacgatgggtgttgctgtttttcttgtcgtttgtgaacgctgtgatgctgtgt

SEQ ID NO: 53634 - DNA, 367 bp, Homo sapiens
gagcaactgttctttctttttttttcccttcctttttgcaggcccatggtcagctctggtctagatgtatctaggcttagggagccctgggaccctgccaagtctcagttcatctcttaccaaggaagcaaggccctctgaagcatgggccgtgcaagctgtgccctagtgataagggtaagaggagagatgtcaggctcactgcccttatttctctgcccatttcattctaggctcacactgtccttgtcaaggtgggcagaagagcagaggtcttctctgcaccaaccactctctgcagatggctggagaaagggtgtgccaactcttcaccttctttcctcagctacgggtttttttttttttt

SEQ ID NO: 53635 - DNA, 934 bp, Homo sapiens
caggctactccttcctgtagagcagaaattgtattttgcacgaacatgcagttattgaagattaggatcaaggatagacaaggtatagtagttatcttaaaatatacactcctaagcagtattattttaaaatcctttaccctggctacctcccctacccgggttcccctctctttaatttggagacactccaccacaaacttttcactttagaggtagcttgccatctctcaggagccctcaccattgtgtccattcactgtgtatagatggcagaacttttgaggtgcaatgtttaattgttaaaaatagtagccacgactttatcaggcagccccaaactggtgcataatgcatggtacaagaaatatttatgtattttttggaattttgtaatatttagtaagagtatatgaaaggattgctactgtatcagaaatattgtttcaatttagtctatcctggatatgtactaacgaatattaccaccagagaagagagctttctacaaaagtcactacagattttgctatattgctttgtagatagatttttacttttgcctaaaagcatttatccttcataccaattgtaacatctgacaccatgtagaagctaaaagtttagagggagtgagggttttctcaagaccttcctcaagcattttatctttagaagagaaactgatgggcacctgatactctgtctaaatacgtttgttatatgtgttttgccctgtgccattcatttggaactttattgcattctttattttaaaaagcttgtttttacgtaatcatagagcttgctatttgtacatctgttgagcaacactacataactgatttttagttgacttagctatagcagtacaatgattagtaatgtaaaaattaacacagaaattaacctaaggaatgaagggtgggtttgt

SEQ ID NO: 53636 - DNA, 690 bp, Homo sapiens
tctgaagttcatcaacatcttaagatgcacttacttgaaagtttgagattctgtttatcatttgaaaacacattttgctttaattctttctttgacatgttgttttttcatatcaagaaatatatgaacaaaataataaccttttgaccctgaccttgctgggtgaattagctctgaaacactctctacaaccagtaatgcatttgtcccacatttcattctgatagaaaatgaacaccatagcaccaaacaaaaatccgaggcgttagataatgtctggattaaataatttaagactctctaggattttggttgtcattttttatttataacagactttaagtcactttctgttgcctcataggtcacattttagacaggtttgtgtctgttccttgcatctgaattcctgattgtaaagacacctatgaggtctcttagtttttgtcattcattttcttggtttatcacccctcccttctttttgttgtttttccctgactgttaagcagtttcatctttgcttttgttaaatatttgacagcagttagtttgtgttaagctcttgaaacttgtgattgtactttctgtgtagatatacatgtaattattttttatttttcaatcatagattcaagcttccttcttttttaccacaaatcattaaagttatttgtgtttccataaaaa

SEQ ID NO: 53637 - DNA, 410 bp, Homo sapiens
acactttgatatctgctccggggacagacgaggtgagccggatgccattggggtagtactggttctcgaagagcaggacctgcatgccgtacaaggagaaggactgtcggaagctgtacgtcaccgagttcttcttcttctggaagatcttggtgaccaccaggaggtcgttgaacaggaagatttctcgctggtgtagtccgagtttctggggcttgtttgggtctggaacctcaaagagccggcagtagcagaccaaccgacggtggggcagagagagcacacagccgagcccgggatgcagggatccgatcggctttttccccacaatgagcttctccaccttctgcacctgggacacatggtcctcattggtctttagctctcgcttacggatccgttcatagatc

SEQ ID NO: 53638 - DNA, 746 bp, Homo sapiens
actccttgatgaatccataaaaatacagcacaactgtattcttacagtatgtacaaaatcttattttatccttttattttcacaggcaatgcataattaggttgtttttaaatgagatattatgtaaaattgatagcaataactgtcacacacctctattgccattgtagggtttttctctttctctgatacttttttgtgtgtgtttattcaacatttatcaataagaattttagtgcattcactaagagccaagcaccgacacatcctgatatgcttccatctaggacttttagctgcttaaaaacatttaacatgcttcttttcctccagcaaactcttttaaaaaaaaaatgaaactctttccttcaatgagattatttcagaagttgccagtcatcttggaacccaaactcagtaataagcaactgtggcaccacaagtggaaaccttttgatgatgggcccagtggtttcatggaatacacgggtttactgctataacccaagagactccagttgagacagtctggctcagaccacatgcatccacaactatgaacaggagtaatgcctggactcatacccagttctcttgttgactatatctttgccaaaggactactgactagttttaatggggccaagaacacaaatatgtatatttttcttataaagaaacattttaattctattcccctttatgtaataaaggcttcttgaaaaacatgaaaggtttggggagca

SEQ ID NO: 53639 - DNA, 96 bp, Homo sapiens
gagttttgcaagctttttcaaggtctcctgggcaatactttcctgctcaatttttagcttttcttttttttttaaatgtcaagagagttgagggct

SEQ ID NO: 53640 - DNA, 637 bp, Homo sapiens
tttttttttttttttattgtaaaatacattttttattctgtaaaataaaagaataaaactattctgattgtgttattaggaaatttgttctggaaacttattcataaattattgatggaaattcttaatgtccattgtgctgtcacctaaaacagattcaatcattttcttgtaaagaaatgactgagtaaatgagtaaaagaataataagtaaatttataagctacaggttaaccatcacatattacaaccaagtatgactatgtgataacaacaagagtggtcacacagtacttaagatttggctgtgtccttaaggtcttactcggaaactatcacaccaacctacctttgggataattttatcagtagacacaggcaatgggtatctttttatcctgttttcttaaagtttgtatcactagtctataacagatagcaatgagatagttctagcaatagatgaagcaagggggtaactgtgttctagaagaaacatttatctgtcttttgatccaagtttctctattaattcttgaagaggtgccagctcacgcctatcaatcagattaaactcctgaacaaagaaaataaagtgcttaaaggaggtgttgaggtgggcctcctcttgcagctg

SEQ ID NO: 53641 - DNA, 398 bp, Homo sapiens
cataaccatgagcactactctaccatggttctgcctcctggccaagcaggctggtttgcaagaatgaaatgaatgattctacagctaggacttaaccttgaaatggaaagtcttgcaatcccatttgcaggatccgtctgtgcacatgcctctgtagagagcagcattcccagggaccttggaaacagttggcactgtaaggtgcttgctccccaagacacatcctaaaaggtgttgtaatggtgaaaacgtcttccttctttattgccccttcttatttatgtgaacaactgtttgtctttttttgtatcttttttaaactgtaaagttcaattgtgaaaatgaatatcatgcaaataaattatgcgatttttttttcaaagtaaaaaaagtcgacg

SEQ ID NO: 53642 - DNA, 8206 bp, Homo sapiens
  misc_feature (1)...(8206): n = a,t,c or g
gatctggaccctggccacccatgggctgatggagcagcatgtgtgggacgtggccatcagcctgacaacggtggtggtggccgggcgtttgctggagcccctctggggggccttggagctgctcatcttcttctcagtggtgaatgtgtctgtagggctgctgggggccttcgcctacctcctcacctacatggcttccttcaacctggtctacctgttcactgtccgtatccacggcgccttgggcttcctaggtggcgtcctggtggcactcaagcaaaccatgggggactgtgtggtcctgcgagtgccccaggtgcgcgtcagtgtgatgcccatgctgctgctggcgctgctgctcctgctgcggctcgccacgctgctccagagcccggcgctggcttcctatggcttcgggctgctctccagttgggtatatcttcgcttctaccagcgccatagccggggccgaggggacatggctgaccactttgctttcgccactttcttccctgagatcctgcagcctgtggtgggtttgctggcgaacttggtgcacagcctcctggtgaaggtaaagatatgccagaagacggtgaagcgctacgatgtgggtgccccatcctccatcaccatcagcctgccaggcacagaccctcaagacgccgagcggagaaggtactgtgaaattttccaaaatcttgtcaagctaggagcatactggtcgagtcacatgccatctgttgaggtgttcgctgtacataggtggagacctacagtcaggtattggggcacatccggaaagacaaaatcagtctttggccttaaggaactcagcagttaggtgtctggggtccacgaggcacttttctcaccactcgggccacttaataagtctcaagaaatgcagtttcctttggtgctgtgaagtcccagtggagggacacagaaccctggccttgcctcagaatctcagaatcctagacattgggcctgtgggagccagaagcaacctgctggtactttcccctgtgaggaagggacagggaaggaggcctggggtcctcaaaaggtgatctgggccactccaatttccaaatgctgtgtcctcttcctgggctttaactcagatgctgtgcttctctgccacttacttattgagagggaagcttggggtattaccacatttacctctgtctccagcaagcatgtgtcaccaaaaccagggacaggctacatgacccactgagggagcctgctgacaccagggagtggcgatgaccctttcattatctgtaaaccaagctatccacagcatcaggagtcccagctgaattattcactgaatgcactttggccagggcaggagggatctttttaaattcagcttactctctctcccagatctgtggagccagcagagtggtcccagccttcataagatccacagctccatttccaacattattcctcactgttttgaggcaattactcgagtagtaaaatctgggacgggctttgtcttttgcattgccaaggctcctgcttttgctcacctgtgaatggggttgtggcaggaagctctatgaatttagctgcagttatccctgtatttactctccactgggctatggaattgagtgtgggacacactcctttcttgaaggagttccagctggggaagggccacagatcactatggcccaaggtatggtaggtgttgaaaagtatatacagcatgctgcagggcataattctgggccctagagcttgggtctttataggtgataagccctaaggacagaagtctctcttaaccttagctggtattaaagatggggccaggtgagctgggcctggtaggaattgagctgtccctcagagccattcaggtggggccaggccagtggggacccctcctccactgagaggtgttggaatgttagggttggctggacattcaaaaacctctgcctaggcccaagaaaatggacaggggggaagcaggttggtggggaggaagggagggtcaagaggcgggttcttggcatagccttatggttgttagcttacatgggggtggcggttattcctccagccagtttgacatctgactgcatggccacgcccaactccaaagggctaccaggagagggaggcagggtttcctatctgtctctctggtccttgtgaggaagtgactagcgtaacactagctctctgccttggcaggctttagatggaactggcaagggcatcatcaggatggcagcctgggtagcagcagggaaagactgtcctgtctataccaacttgtcatgtgtgagactgacgggcaggggggaagcgtgctagggctttctacacctgtgcccttgttgcctctcttgtcgtgttccctgacatggtggagattttggttctcagctggaacctgaaaggctacacaggctgtccccacattggtggcacagagaggctgaggtataggagtccacagtggtcactgttgaaacggttccctggcagctgcagcactccaccttctggtgggtcagggtcccaagcacatgtgtaaaccttcttctgttggactttcccacctgccctcaaagtggggcctctaagggtccaccctgtggaagcagtaggctctggcctgtgcctacccatgtgagctgtttctccttcttctcctcttgcaagggctccgctaagtccctgctctaacaagggccttggtggctttgggggttcttctgagagggagaatattagcatcagttaggaggggtagactcacccaagttggccctgcttcctgggctgagagccaagggaggtgttgaattccagccttccccattgacccttgccaggaggctcaagatacccctaaccaggagagggggagaattaataacccttcccttggatgtgatgccagcacccaggcagaaactcctggaaactccagaacttgccgttccacccatctgccctagggcactagttccactgacccttagataccaccctcagaaccattcctggtggctggcctcgtgggcagtctggcagacacccagctgaccttcccatcccggaggtgcctcagctatggagggaagattcttagagcctttgggttatcattctgatggcagagtgggtcctaaaccaatctctggggagtcccaggctctgcatggtgaaggggaaacataggattctgggggaggagtctaggtggtacggtgaggagtcagcctgctgcggaagggtagagggcatgagccaaggccaaacccagagtgacctttcctctctcctctggccccaggcaactggccctgaaggcactcaatgagcggctgaagagagtggaagaccagtccatctggcccagcatggatgatgatgaagaggagtctggggccaaggtggacagccccctgccctcagacaaagctcccacacccccagggaagggggctgccccagaatccagtctaatcaccttcgaggcagctcccccgacgctgtaactccagaccaccttgagtgtggcacctcccctcccaagccccccttgacatcctctcagctactccagggcacctgactgctctgaggagagggaagaaggcctgctggggctttccatggccttctgctgtttctcgccaacactacccaggactcttgctacctggttccaactccagacaaccactatgccaggcccggagcctctgaggcatcggccagtccaggccctcatctgaggtaagaatgtacatcagctggcagccccaagcaagtggctgcagggacactgatgccacagctcctgggccggccctcacatctgaaactggttgccgagagccctgagccaaggcaaggatttgccaaaaatgttctgggggcccagcaaatgcaggagccgacctggggctgcacatccctgcccatccccagaaagactgttcctgtcaggatttgtttccctctgctgtggcggtgactgcttctggaccagaacagctccagctcccaggtattttctacaggaccacttgagtgggcagccaagcccaggctcgcagtatcaataaagcagttctctgaggaatgactcctgggctcttgtcaggccaccttgtgcagccccctcatcacgttcaactgcaatgttagacagggacttgattgtctccatggtaactccagctggataagaagcccattgccccagctccccaccaccgccaccaccaccaccacatgcgcactgccaagcagccttccaagagctattgcctcagactcttactccttttttctttccctccaaaccccaatctgggaggccttctgtccctgcctagatctgatgataagggcctctccatcataaggcgctgttcttacccatggtttatctctaagacagaatgctcagttcttgccacccctggagacaactcacccccagctcccagttattgtatgtatctaacccccacagtctggagactccagcacagtagacagttggggggacagaaaggacacacagctgtaccattcacagctacagctctagggcctgccagggcccggagtggcctgggaggctcagcagctagaccctggggatttgtgtgctaggagagcttcagcccctcagggagcagccaggggtcgggggtggggggtccccatcttgcccagctgcccattttcctgtgctgatggcattaacaagaaccatccccaactctgggctgcttctcccatcaatcttttcagtcattttttacaaattttttacttttttctctcctaaaatttctgaacatacagtacaagtatgagctgccttgcaggagaggcagtcttgcagccccagcttcatccagacacatgatgcctatgttcctctgggatgacagagaaaggggaaggaaatgggaggcactccagcatgaggagcaggaattcacacacgggcctccaaatgcccaactgtcccagtgcctgaggtgtcccctgactcagctgagagagttcaacaggtccctaggcccagctcctacatggaggggcaaatccaggcttcccctagggctgggaagagctcatggttgggatcctcttgcggtataggtagggcattgctcacctggttcataatgaccaagctggtgaggacagggcataatacagccaggtaccaggctgcaccagtgacagaggcagtgaaccagagtgagcacatgcccagcaagaggctggcactacccagcaggtagctcaccagcccagaagtagcatggtatagcttgagcttcgccaggggccatcggggcagcagcttggggtagagcagccccaccccacctgagcactgcagccctgcccacagcacagccagcagccctgcctgcccatgccgcgtaaccaggtgggctttgccaagctgctctttgtggaggatgacaaggccgaggcccagcagtgcacacagcagggccagcagctgcagcacccagtggcagcgtgctcggcctttccgtgagagggagtgcagcagcgaactctcaggagaaaacaccagtagtgcctcggtcatcaggaaggagaactgaggaaacaggggatgggaagctcaagtgagggtgctgccccagaagaggagaagagggctttatgtaacccttagctgccagtgagtctgggctgattcccctttttctttctctccccactgacaagactatccatttggtggggcaagagtggaaaaccccatctgggatgatatatgtgccctgaataatctccacacttcctcctaggtgccagtctgaaatgtcatctgtcgtatgttaccaagcaaacacagggtttgagatgtggcagttataaatgattcacaagctttgtttccctaacgtggggctggatacaatttcttggcaagagctggccacatgggtgcactgtttcagggaaagttaggtgcatcaccagaaattaaagtaaaaagggacagaggtacatccaaatgcaatgtctcagctttctgcctagaggtgggtgaagcctcattgtgcttagacaaatcttacccatttgacctgggtcctgggtcttcattactctgattcaagnnnnnnnnnnnnnnnnnnnnnnnnnnnnnnnnnnnnnnnnnnnnnnnnnnnnnnnnnnnnnnnnnnnnnnnnnnnnnnnnnnnnnnnnnnnnnnnnnnnnnnnnnnnnnnnnnnnnnnnnnnnnnnnnnnnnnnnnnnnnnnnnnnnnnnnnnnnnnnnnnnnnnnnnnnnnnnnnnnnnnnnnnnnnggggggtttttttgtttttgggnnnnnnnnnnnnnnnnnnnnnnnnnnnnnnnnnnnnnnnnnnnnnnnnnnnnnnnnnnnnnnnnnnnnnnnnnnnnnnnnnnnnnnnnnnnnnnnnnnnnnnnnnnnnnnnnnnnnnnnnnnnnnnnnnnnnnnnnnnnnnnnnnnnnnnnnnnnnnnnnnnnnnnnnnnnnnnnnnnnnnnnnnnnnnnnnnnnnnnnnnnnnnnnnnnnnnnnnnnnnnnnnnnnnnnnnnnnnnnnnnnnnnnnnnnnnnnnnnnnnnnnnnnnnnnnnnnnnnnnnnnnnnnnnnnnnnnnnnnnnnnnncaagtctgaaatatataccatgggcaggagtagttggagcatgcaactcttccaaacagatattaaatgtggacaaagattcagaggctgccagggccaccaaccatgcccatgctcccacccctaagaactgcccaggcccactacttacagccaaagacataagcaccgggtgccaggagaacaggcctggaatgagaagaggaggcctcatggggctgaggcaagaagaaaccagccataccaatccttaagggttgaggaataccagcagcccatcacccaaggaggtgctgccaaactgtgagccccttcttgctctgcaacaagctgaccccacacctatcctctcttcctggcctcttcctggatcagaggccatgctttgccactcctctggcagtcctccctccttcccttacacctcctgagaggcagccaaatggagcacccagagaaggaaagacaaaccaggaattctgtgtgccctggccatacctacctgctccacctcactcatcgctccagcacagaattccctcaaccagccaggcctgttcccggaagtcccactgcccttcctccccaggaacagtggcccttcccttcccagaagtcagctatgaattctacttactggagccaggcctggcaagcacagccacaaagatggtaaagcccagggccacaaggtgggcggcagcgccagaagcagtacgcagagctcggtagatgtgtgactcggtctccgcagaaagggccatcgtcagccgtgctagtggttgtagcctgaaagcatagtagcgtgggccaggatctcaggtgcccactgttcactcctcactggagaaaaggctgcaaggcaggaatgccaccctcttccaataagttatggtaggaaagaacagtaccaagaccagcaccaggaatggtcacaacatgccagtcgacggccggcggccctgtcaacgtgtacccatgtctgaactggtaccaatcgctggcccgccttccaggtaggaggcgcaaagccatgtaagactacaaatccccaagtgtacccaacncgtcgccggcagtagagccagctgggagggcgcggagcactatggaaattgtagttccctgctgcggtcccagttacagcgtgaatcccttagcgcaccgcctccccaagtgctgccagcatgctgcccctccacgctagggacttgcctgcctctgccgcagcgcagatctgatgcggtggtttcctccaaagaaagcgggatactccgggccctgccgcgcgcaccgccgctccgtcacggagccgctttacttccgggtgcgacgtctacccatcccaggacttcctgggacgagccgtcccccgccccagccacgcctctgagtcgcgctgcgcaggcgccattgggcagagggattggcaagcttgcgtgccccagcgacacaggcctcgaggctgtctctgacaagtgttcacaggaggtggggacgcctctgcgcg

SEQ ID NO: 53643 - DNA, 1673 bp, Homo sapiens
atcacattgaatggttaatttatttttaattctatgaaaggagctggagagagagaagtaaaatattcaggggattttctgtgttttaaaagagaaaacctcctgattgcaagctctaaaataaatgctaagatttgtcacactttcagcccacgggagatttgcttttctcgcatagtatggactcaccaggatctgaaattaggggctttccttagaggtggcctcaggctttcctacccccacagttggattatgcagagaaggtcactgggtcctgaggctgctgccgaggcgtgctgtcccgggtggacagcgtggccctgtcatctttcattaggatgtgtgtgcctgtgccgcaccagccacaggtcaggatgccagcccctgcacgccctgcttccaattttgaaaactgagggtatctggggaagtcaccttacaaggtgccgagggagcagatggctaatttaaaggcaatctgtatgtgctctgagcctcccaaattattccatttctttgaaatcctcaatgtgtggaaattcagcacactaagtcctcacaggctaggaaatcaaatgctggacaggccattccctaccatcatctggagtattcagagtatttggaatattcacagtcttcaaggtgtagctgtcgggctctgtgaaggataccttgcatttatagggatcgtcaggtctcctcttcctacgtatttgaagtattatggcttggagtactttctccaccaatgaagaaaagtttatatggcctctcctacgctcttgtcttgtcccaaaagtagggcttaactctgtccttgccatcaatctgtgcacatgttatggagtgaccatggtgaatgggcgatagaggttccttcctaggagaaactttcccagcttccccaaatgtgagaggggcgcctctctcccgaattccccagagccctttcctcccttccctctgccctcacctccctggatgcttcaggatactctgtggatactcttccgtgctccaggagagcatggccccgtggctgatagactcagctctcacccctctaagagctgctcatgagtatcctcgagtggatgagtgaacagatttctaactcaacagacataaatccccagtggagcttaagttaaatgcctggtttttaaattaagaaatatgacttcagcaatatgtataaaccaaaggaacattaaactaatgatagtatctttacaaatgagttgttgaggatttggagatagtttgtataaccataaaaccataaccaaatacagtagaaagcatatggtagtgggattgaagaaacccgagaggttatttatcccaaacaccacctgatgttacagtgcttattgagtgattgatactgtgtcctacgtagagggggcacataaacaattcacatgtaatttttctgtattacattgacagatatatataaaatgatctctgcatctaaaattcaagcagtccagcctggaatactatcaccaaaaagtgaaaactgattttagaaacgaataatattttgttgtgaacaactctgaaaacatactggtcgatgaggtttatagctagagtctaaaatgccacatttatatgggtgaaacattttcagcttcaggagaaaataaaaccaaaaaaaa

SEQ ID NO: 53644 - DNA, 596 bp, Homo sapiens
atccgaagtcataaacagaaggcttctggccaagctgtggatgattttaagacacaaggtgtgaacatagaacagttcagagaattgaagaacacagtatcatacagtgggaaaaggaaagggcccgattcgttgtctgatggacctgcttgcaaaaggccagctctgttgcattcccaatttttgacaccacctcaaacaccaacgcccggggagagcatgggaagatgtttcatcttcaatgaacccaaacagggagagcagtgctgatctgcttcagaacattatcaacattaagaatgaatgcagccccgtttccctgaacacagttcaagttagctggctgaaccccgtggtggtccctcagagctcccccgcagagcagtgtcaggacttccatggagggcaggtcttttctccacctcagaaatgccaaccattccaagtcaggggctcccaacaaatgatagaccaggcttccctgtaccagtattctccacagaaccagcatgtagagcagcagccacactacacccacaaaccaactctggaatacagtccttttcccatacctccccagtcccccgcttatgaac

SEQ ID NO: 53645 - DNA, 733 bp, Homo sapiens
aatataacccactatataatagtgaactaaatatgtttgtttcatagaaacaacttacatttgccaatataaggcaaatggtctatgtacagatacatcaggactgcctaactgacagtgagtgttgctagccaggctccaagctaatggagctaatacggtggagctctctgctgaatggactttcccttcaggatacgtcggatctggaagagaaacaaataaaatttgtgaggtttatttcttatggccaatgtggtgtatttccttctgagtttcattcctttcttataccatctacactactcctattaacttgtaagtatacgaagaaatacacacaatatttctcaagattttgaggtgacttttaaaaatactaaactccttttaaagcttatttcagatctcttataataatctttgagttcaagaaagtaaaacatctccactaaaaattatctgaagttgaaaatctccataaacttaacacctatattcttttcctaatctttactcttgctatttgcgagaacatttaacataagacagtagttaaggcatattataatatctcacttatcttgaagtcagcctcaactaacaggaaccgaagacccacattttatgatacacacacaagtaaatccttaataccattcaagtcaaaacagctgtcatgatatccaagtattaaagcatctacacgtaacttcatggatcacagaaaaga

SEQ ID NO: 53646 - DNA, 337 bp, Homo sapiens
taagactttttaccttttaatttatagagacctcagacatgtacattcatattcattttactactagatagaaaaaggagtattaaattaggcactgaggacacagaggtttcccaggctagtatacaagttggcatctcttcactgaatgaattaatagattaatgacaaacacatacaagcaaaccgtaacaaataggaatatttttacatgcaacgatacacacatgataacaacatgctatggactctagggtgccgtggagttagcctctaactctacctagaggttactggtaagggcttccctgagacagaaggcatttcttgatttaca

SEQ ID NO: 53647 - DNA, 940 bp, Homo sapiens
ggtcgacttattttttttttttttaacacaccataagtgtttattggtcagctgtcccaaacgggccagccctggggctttggggctgggcctccgtgaggagaggtcagtcggtcagcggcccggggtggctgccctgagccccagggctggtcctggggtctgtcagtccttccccaggctttccaggtccagaaggctttgtggggtctggggctgtgtcagggtaaggaaagctgccttggtggaggaagagaagtcagagaggtcacacatgtggccttagaacctgctaagtccaacgtcagcatgtgacaggaggggaagtgaggcaagacggcagaacccaggggaaaaggtggcagggagtctgagagtgaggttgggaggaccagcatcttttaggccctgagcaagaaggaggtgaccggagtcttccaggtatccctccctcctagcttctggaagtgggagtcggggagggggctccagtcagtcaggtgtaagctccatgccatggggactctgcaggacaggcaggcttgaggagccactgtgcctggacaggttctgcaggctcccccacttggtccctgtgctggaggggaagcagagaaggggctggcagccgtcgatcctgcgggaccttcactcagccttcttggtcactctcttggtcttcagcatcacataggagatgaacagtccccacaaacaggagcagcaggaggcctgcagccagtgggatggcgacagcataggctcggggcaggaaatacttgtggatgacatgctgactgtcgatgaatggctggcatcgagggaagagctctggtgtgtcttgcttgccttgccgagcccccaagcccaaacgtcccacctcctccatctaaggggctgacccattcagaggactgggactgcatttgcttttctttaa

SEQ ID NO: 53648 - DNA, 68 bp, Homo sapiens
  misc_feature (1)...(68): n = a,t,c or g
ataggtgaaccaccacacctggccagaagacaatttttctatggatggnggaagggggacagggagcc

SEQ ID NO: 53649 - DNA, 419 bp, Homo sapiens
cagttctagcaaagcgagggtcttcacaaaagctacactccttggcaccatatttggaatagttcatttccgttagtgttactggtcgtaatttgtcaatatctccaaaggctactccaggaacatacagggcacaaacaatatgaacccatcttccagcatctgtctccttgaaaattccatcctgattaggacacagttcacagctaggagaaacaccacatttacaggcatcacaaaaccaaggttcagtggagttttcagaagctgaactcataatagagtcactctctccatcaactccataacaaccttcatggactgtaatgccacaattgtcacactgaattatttcatcagcgtcctcactattatctcccagacaaacacagcaaatcagaatatggtccatttttttg

SEQ ID NO: 53650 - DNA, 605 bp, Homo sapiens
  misc_feature (1)...(605): n = a,t,c or g
tttaatcccaaaagcagggactgtgagtgctttttattccatgcaaaagagagaagtgggtctctgaggagtatctggggctggctggctagagacgctagggaaaggtagacaaggcttcctgagtgtgtggtgctttcttgctgacttgccctatatacctaaagtccatggtagaaacctgaacctacagaacctccaccaaaagagaggagagcacgggattctcagagactggcttccacttgaacagggaaggccaattccctgtgggcctgtcaacatcaacttcagttctctcgcccttacaggaggcctctgactgtatcactattttagaaatattgctgccatgtaagcttctttcaaggtgaagcttggaagctattctccaagtccatcctcagcagctgaggccacaacagattaactgaagagaccccttggctttcttcctcttganctttgacagctgangtctctgcagaaggnctgaagtacccgtggactctttctcaggtgctgaaaagggttggggctgaagagaccattgttctggctgggttacacattggtatcgattccttgcagggaagcactgttta

SEQ ID NO: 53651 - DNA, 429 bp, Homo sapiens
  misc_feature (1)...(429): n = a,t,c or g
atcaagtactgagtgaagtacctaaaactgtgctagttgacactactttataagctgtttgtgttgctggtggttttatatttagattccaactagattgttattctggcatcttgggaagtaaatgttcttctgaattttggatttgtttatatttatttattttaaacccctagtaaattcgcagtgaaatcatggggaatataataaattagtggtgacaagcatttgaaaaaggtacagttgacccttgaacaacatgagtccgaactctgtgtgggtctacttacaggcagattttnnnnnnnnnnnnnnnnnnnnnnnnnnnnnnnnnnnnnnnnnnnnnnnnnnnnnnnnnnnnnnnanctntagcttagaaatatcagaagttaagaaaaagttggtatgtcatagatgcataaaattgac

SEQ ID NO: 53652 - DNA, 4322 bp, Homo sapiens
  misc_feature (1)...(4322): n = a,t,c or g
gaattcagaactcctcagccccccaagaaaaaaatatccccgtggaaattccttgggaatgaccgaggcgggggaaatatgcgtctctggatggccagtgactcgcagcccccttccccgataggaagggcctgcgcgtccggggacccttcgcttccccttctgctgcgcgacctccctggcccctcggagatctccatggcgacgccgcgcgcgccccacaacaggaaagccttaggcggcgcggcttggtgctcggagacttaagagtacccagcctcgacgtggtggatgtcgagtcttggggtcacacgcacaggcggtggccaagcaaacacccgctcatatttagtgcatgagcctgggttcgagttgccggagcctcgcgcgtagggcaggggttcgagcgccccttctccctgcctcgcctctgcgctgggggctgctgcctcagtttcccagcgacaggcagggatttcgagcgtccccctcccctccctcgtcaagatccaagctagctgcctcagtttccccgcggagcctgggacgccagcggaggggctcggcgcgtagggatcacgcagcttccttcctttttctgggagctgtaaagacgcctccgcggccaaggccgaaaggggaagcgaggaggccgccggggtgagtgccctcgggtgtagagagaggacgccgatttccccggacgtggtgagaccgcgcttcgtcactcccacggttagcggtcgccgggaggtgcctggctctgctctggccgcttctcgagaaatgcccgtgtcagctaggtgtggacgtgacctagggggaggggcatccctcagtggagggagcccggggaggattcctgggcccccacccaggcagggggctcatccactcgattaaagaggcctgcgtaagctggagagggaggacttgagttcggaccccctcgcagcctggagtctcagtttaccgctttgtgaaatggacacaataacagtctccactctccggggaagttggcagtatttaaaagtacttaataaagccttagcgcggtgtagaccgtgattcaagcttagcctggccgggaaacgggaggcgtggaggccgggagcagcccccggggtcatcgccctgccaccgccgcccgattgctttagcttggaaattccggagctgaagcggccagcgagggaggatgaccctctcggcccgggcaccctgtcagtccggaaataactgcagcatttgttccggaggggaaggcgcgaggtttccgggaaagcagcaccgccccttggcccccaggtggctagcgctataaaggatcacgcgccccagtcgacgctgagctcctctgctactcagagttgcaacctcagcctcgctatggctcccagcagcccccggcccgcgctgcccgcactcctggtcctgctcggggctctgttcccaggacctggcaatgcccagacatctgtgtccccctcaaaagtcatcctgccccggggaggctccgtgctggtgacatgcagcacctcctgtgaccagcccaagttgttgggcatagagaccccgttgcctaaaaaggagttgctcctgcctgggaacaaccggaaggtgtatgaactgagcaatgtgcaagaagatagccaaccaatgtgctattcaaactgccctgatgggcagtcaacagctaaaaccttcctcaccgtgtactggactccagaacgggtggaactggcacccctcccctcttggcagccagtgggcaagaaccttaccctacgctgccaggtggagggtggggcaccccgggccaacctcaccgtggtgctgctccgtggggagaaggagctgaaacgggagccagctgtgggggagcccgctgaggtcacgaccacggtgctggtgaggagagatcaccatggagccaatttctcgtgccgcactgaactggacctgcggccccaagggctggagctgtttgagaacacctcggccccctaccagctccagacctttgtcctgccagcgactcccccacaacttgtcagcccccgggtcctagaggtggacacgcaggggaccgtggtctgttccctggacgggctgttcccagtctcggaggcccaggtccacctggcactgggggaccagaggttgaaccccacagtcacctatggcaacgactccttctcggccaaggcctcagtcagtgtgaccgcagaggacgagggcacccagcggctgacgtgtgcagtaatactggggaaccagagccaggagacactgcagacagtgaccatctacagctttccggcgcccaacgtgattctgacgaagccagaggtctcagaagggaccgaggtgacagtgaagtgtgaggcccaccctagagccaaggtgacgctgaatggggttccagcccagccactgggcccgagggcccagctcctgctgaaggccaccccagaggacaacgggcgcagcttctcctgctctgcaaccctggaggtggccggccagcttatacacaagaaccagacccgggagcttcgtgtcctgtatggcccccgactggacgagagggattgtccgggaaactggacgtggccagaaaattcccagcagactccaatgtgccaggcttgggggaacccattgcccgagctcaagtgtctaaaggatggcactttcccactgcccatcggggaatcagtgactgtcactcgagatcttgagggcacctacctctgtcgggccaggagcactcaaggggaggtcacccgcgaggtgaccgtgaatgtgctctccccccggtatgagattgtcatcatcactgtggtagcagccgcagtcataatgggcactgcaggcctcagcacgtacctctataaccgccagcggaagatcaagaaatacagactacaacaggcccaaaaagggacccccatgaaaccgaacacacaagccacgcctccctgaacctatcccgggacagggcctcttcctcggccttcccatattggtggcagtggtgccacactgaacagagtggaagacatatgccatgcagctacacctaccggccctgggacgccggaggacagggcattgtcctcagtcagatacaacagcatttggggccatggtacctgcacacctaaaacactaggccacgcatctgatctgtagtcacatgactaagccaagaggaaggagcaagactcaagacatgattgatggatgttaaagtctagcctgatgagaggggaagtggtgggggagacatagccccaccatgaggacatacaactgggaaatactgaaacttgctgcctattgggtatgctgaggccccacagacttacagaagaagtggccctccatagacatgtgtagcatcaaaacacaaaggcccacacttcctgacggatgccagcttgggcactgctgtctactgaccccaacccttgatgatatgtatttattcatttgttattttaccagctatttattgagtgtcttttatgtaggctaaatgaacataggtctctggcctcacggagctcccagtccatgtcacattcaaggtcaccaggtacagttgtacaggttgtacactgcaggagagtgcctggcaaaaagatcaaatggggctgggacttctcattggccaacctgcctttccccagaaggagtgatttttctatcggcacaaaagcactatatggactggtaatggttacaggttcagagattacccagtgaggccttattcctcccttccccccaaaactgacacctttgttagccacctccccacccacatacatttctgccagtgttcacaatgacactcagcggtcatgtctggacatgagtgcccagggaatatgcccaagctatgccttgtcctcttgtcctgtttgcatttcactgggagcttgcactatgcagctccagtttcctgcagtgatcagggtcctgcaagcagtggggaagggggccaaggtattggaggactccctcccagctttggaagcctcatccgcgtgtgtgtgtgtgtgtatgnnnnnnnnnnnnnnnnnnnnnnnnnnnnnnnnnnnnnnnnnnnnnnnnnnnnnnnnnnnnnnnnnnnnnnnnnnnnnnnnnnnnnnnnnnnnnnnnnnnntcagccttcctgagtagctgggaccatagggntcacaacancacaactgggcaatttgattttttttttttttccagagacggggtctcgcaacattgcccagacttcctttgtgttagttaataaagctttctcaactgcc

SEQ ID NO: 53653 - DNA, 216 bp, Homo sapiens
  misc_feature (1)...(216): n = a,t,c or g
tggcacgattccagcagagtttatctcacaccgtttatatatcactgggcctctcttacttaaatattatttgacctgcctgagaagcttcataaagtatgtttttttaaaatatattttaattacatttaaaaagacatttttccatgaaaaacatttattttatgagtgatgaattatagattttaaaatcaagggccgggcgnggnggntcac

SEQ ID NO: 53654 - DNA, 436 bp, Homo sapiens
aaagtaaaatacaacaaaatgtttaatgagcaaattcgtcttagcaaatatgaaactgccacagagagtaggagaggggcaggggccacggggctgggcgcaggtcgggggagactaaagaggaaaaatcaactacgtaagaaacccaggaggggaccagagaggaccagaggccgaaggaacagagctgtggtcctggtaagggagaggggcagggcactgagggccggacaacaaaattcaaaatagtttggccataaaatataaacacgctatgttcctaccgtggggaaggggagaagaaaggggtctatgggagtaggagaggctgttttgggaggggctggggtcctaccccgccctgctgtgcaccctgtccccatcccaaccccttccctctgtgtctgtgtgggtgcgtgttgtctgtgtgggctgt

SEQ ID NO: 53655 - DNA, 960 bp, Homo sapiens
taacattccacatcgtcctccctttctctaagaggccatctctaagatgtcagatgtagaggagagagagcgagagaacatcttccttctctaccatcactcctgtggcggtcaccaccaccacctctcccgcccttaccagcagaaagcaatgcaaactgagctgctttagtccttgagaaattgtgaaacaaacacaaatatcataaaaggagctggtgattcagctgggtccaggtgaagtgacctgctgttgagaccggtacaaattggatttcaggaaggagactccatcacagccaggacctttcgtgccatggagagtgttggcctcttgtctttcttccctgctttgctgctttgctctctgaaacctacattccgtcagtttccgaatgcgagggcctgggatgaatttggtgcctttccatatctcgttctctctccttcccctgcgtttcctctccatccttcatcctccattggtcctttttttttctttcattttttatttaatttcttttcttcctgtctgttcctcccctaatcctctattttatttttattttttgtaaagccaagtagctttaaaggataaagtgggtgggtcttttggatgagggaataatgcatttttaaataaaataccaatatcaggaagccattttttatttcaggaaatgtaagaaaccattatttcaggttatgaaagtataaccaagcatccttttgggcaattccttaccaaatgcagaagcttttctgttcgatgcactctttcctccttgccacttacctttgcaaagttaaaaaaaaggggggagggaatgggagagaaagctgagatttcagtttcctactgcagtttcctacctgcagatccaggggctgctgttgcctttggatgccccactgaggtcctagagtgcctccagggtggtcttcctgtagtcataacag

SEQ ID NO: 53656 - DNA, 416 bp, Homo sapiens
agcaaaatgaaaagcaagtaaaatgttttaaatggttcatggaaaacgtatttgggtagaaggcaactcgtgcttccggaaggggttccctgtcctccatgtgtccacatggcggtcaggtagggacgacctgttctgtaaagtccttggcactgctgaatctgtggcatcatagaaggccctggagcttccccgttcctttcagtcagggactccatatagagtctcatgtggacgtctcccgtgctttcctcttgacctctacagtcacacttctgttaacatctggtaactgtgggcaacctgactgatgccgtcttggcaattgaggtccagaagatgatagttccgcaacgcaagcagtacctactttttttcttcatctatgcattgactctcagattaccatgcagagc

SEQ ID NO: 53657 - DNA, 1686 bp, Homo sapiens
ttttttttttgaagtgaatattaaaaatttattaacatttcccagaaaggtagtgtcagaattaagccattcgcaaaagacgaatttgccataaacaaacattcacttttgcctgatgacagcaacactgtgatggggtggcactgtgccccacggacaggtccacaactgaacacatggctctatctctccttttgggcttaaagtttagtgttattttattttacaaatatttacagtcattttgtaaaaaggcagtttttagtagcagaaaattcttctgttttatagtatggtatcacagttactagcgtatctccaatgtcaaaccaagataaacagcatcacaagatgtcacagactaatacaacttccctttggccaggggaaaagatctgtatctttttttttttttcttcaaaagtctaacctctaaggtaaccggtttctaaaaccctcaaaatacacaaatacactttcatgttttaagtctcatcttcactaaatgttcagacacatccgttttaattatcccttttatgagggtctgtgtttttcctgtgataaaggattcaggaaataatttaccacattataatctatttaacataactaccctcagtaaatagttcataaaatacttgaggctggtgacatttgtcttgtaacctgctcatttagtgggttgggtttacaaaatgtatctaagcttttattgcaatctgcaattatgtacattaacaaccttacaaaccttgaacatagtatatatatccccttctctagcctttcaaatggggcttaagagagagaaaatggcaccacttcactgctataatgatttaataataaatcaagcagacttatcatccacatggataacgaagctctccctagggaaactgaaatacctctggtcatcttccaggttctcctagactggaccagtatttaaaaaatcccaaagatgatgttactcaagccattaccatgaaggaactaaagtcagccctttaagttcgcaaaactttaacataactaccctcagtaaataatttattttttcttcaacaattttcttgctactgtcaaaagtttctggcagactttagtgttttaacctgatacctatggtacatattctacatgccaagtgctagagagtttaagcaaaattttacatggggtatgtaatatgtcggtatttatgatataccagggaagacaagttgaaaatacatgacttagtaagaacgattttccccttaagtactttctaactttttttcttatttcccacttagttacaaaaagtaaataaataatcctatatttttcatttcattgatgcatgaagactcaatgtatgaagataatagtcatcagtttataattacactataggacaaagttttaaaaagttctagtgtgtgtatggctaaatgcctcaaatattttacatttactgataaataacagcattccaaaatcatggacaattatgattaaaagttgtaaaccatatcacagaatatgttaatcagcacatcttcatcagtttacataaagttatagtagtcttattagaagttgtaaaatttggtaacagaaaatttttttcaatacacagaataaaaaaaacatcattgcaaatttaaaaatcatgtaaacttgaattacccttgc

SEQ ID NO: 53658 - DNA, 1344 bp, Homo sapiens
aggataaaagtttcagtgtagtttgacttaaaaaaaatcaaccacttacttgagtaaaaacctgactgaattcaaaacaggttccggtgccatactaagttcaagaactttgttaaaaatatagataaatttaagtgtcaaagacttaaacattttccaatttgctagcattagagcagaattaaaagattgtattaatctattaactatcccaaccttaatcccccgacaaaatccatttatcctagtattacctaatacactaatatacaatatacctgccttacaaacacataggtagccataaataaaactttattctttatttcatttacaagctaccaaatattatgtatcgtacacagtgctgaacacttaaatggctgtagtcatggaaggatccagactgaatggaaagctgttgagaaagaaaagataaaagcaaagtaatactgcaacaggaaggtggcaaaagcatagttttgccataataaaatcaattagatttgtgattatacatcagttccggttaaaatgtctgagcgccatgcgattttcagctttattgtctgcagtctgactaaagtctgtatagtcattttgtcttttgcagttattaaaataaaaaaaagttaaaaactatagcagcaacaagcaaaccctgtgacaggaaggcaagggttaagaactaaaaagagtttatacagtgtgttcagggaaagtgtgcagtttatcttccatcagcaggagttcgactgagggacaacatgattcgggcaaatcgctcacagagttcatgcgtggaatatgaaggtaacttcggtggctcatggaaacttttaatctccatagaacaatcaagcagttttggcaaaaaatctgtcagcttttcttggaggtgtggttccatttcttgaccaaggtaggaacaccatcgatttctcatatcttctacagctagtatatccttttcttccatttcatccaccagtaataatggcaaaaatgggacaataaactcattcatgataatcaaaccattgtttacttctcgatcctctccagattcgaagagttctgcggcttgctcatttaattttagcaaacattctcttctataatgtgatatcaattcttcatcatgtcctctgtataagcctttagacaagagttctttgttattctgataagcacagatgaggaacagcaaggaatctatataactttctctttgaaaattttctagcccaattatgagatacatagttgtttccctgaatttcctataatcctgatgccactcctcatattcctccaagtttacttcttcaggtcctcgtgcca

SEQ ID NO: 53659 - DNA, 512 bp, Homo sapiens
  misc_feature (1)...(512): n = a,t,c or g
cgcagccacaagtccgtccctgccccgtgccacacagccgcacgctcagagtgcaagcacaggggggcccctgaggttgcaggtctgggatcaggactctggcagggacgatgacctccttggcacctgtgatcaggctcccaagtctggttcccatgaggtgagatgcaacctgaatcatggccacctaaaattccgctatcatgccaggtgcttgccccacctgggaggaggcacctgcctggactatgtcccccaaatgcttctgggggagcctccaggaaaccggagtggggccgtgtggtgagaacagtgagcttggaaaggaccagtatgcttggactgaaggggttctcacagtgggagccagggctgtcttcgtattcccattagaccaagcttgtccaannnnnnnnnnnnnnnnnnnnnnnnnnnnnnnnnnnnnnnnnnnnnnnnnnnnnnnnnnnnnnnnnnnnnnnnnnnnnnagtttctttttgctattttttttttt

SEQ ID NO: 53660 - DNA, 240 bp, Homo sapiens
cttttttcaaagtttaatgtgaacttttagaaaagtgattaatgttgccctaatactttatatgtttttaatggatttttttttaagtattagaaaatgacacataacacgggcagctggttgctcatagggtccttctctagggagaaaccattgttaattcaaataagctgattttaatgacgttttcaactggtttttaaatattcaatattggtctggggtaaatttgtattgaag

SEQ ID NO: 53661 - DNA, 432 bp, Homo sapiens
  misc_feature (1)...(432): n = a,t,c or g
cccctgctgacttggcctcaaggccagtattgcaccgcaaggaccaagactgctgggcattcctcttttgcctgttgtatgcgtcctctcttcccggtcactgtcaatgagtttctcattgcggtcagtagatctgaaacaaccaccaccatcatccttccaaccctcatctggtgcaacgagataaacaggccatgccctgagcaaagaaaagggaaatggtggtatctgtgctgccagcctgggccacccactgcagatgcacatgcttggctcagcaaacggataaggattaaattcatggactttgtgttcattcacaattgtttcattgctcaagggatttttcctcgtgccnnnnnnnnnnnnnnnnnnnnnnnnnnnnnnnnnnnnnnnnnnnnnnnnnnnnnnnnnnnnnnnnnnnggtatgaa

SEQ ID NO: 53662 - DNA, 794 bp, Homo sapiens
tttttttttttcataagcaaagttgtttatttaaaatcagaaaatataaagatgctgagccccaaaaatgtgataaaattaatatgacctctttccaagtataacacattgcctttctctaacagaaataaactatgattcttattacagtcttaaaattctttttttaatgaatgagtgtaactttttattaagatagaattatttttattaaagaaatatatgaaaatggttaagtaaaatcaaatggctccaaaagtcttacaatgaaaacaacagtcctgccagttgttctttccagaggcaaatacttttcattctcttagtttttccttccgttagttaccttcatgggtttttccaaattattgttttttttttagtttttcaagtgaatgcatatattaatacataaaattttaaaaaggcttttcagtttataatgcatcctaacagtcccctgccccatccctcctaattctccagagcaatgacttttaactcttttagcaatgtcttctgtttttttcctcacataacttagtcatttcattattatatattatatagtgatttctggatatgacagatgaggatttagctcttacaccatcacaatcttcacttttcctcccatattgtcccagagtagttaccatatttaggggctaagcagtcacatcattatgactgtgtacatactgctccttgttgagaaaaacagtgtattatgctcttcctatcctgtacttctttctgccctagaatgattgcctaaccaaccctttcccctt

SEQ ID NO: 53663 - DNA, 830 bp, Homo sapiens
tttttttttctttaaataacaatttgacaaaagggtgaagaaatcctaaacaaggtattgaggccagtgtccaggctgcattcagttcacagaactgtcctcaggacgttgcatggaactggaaatgtgtataattacagaagaaaacagggaggacttagtgcagagaggagacgagtgtggacgggcaacagcatccttagtctttcatatttatatatggtatatgtattttctatatatatatttatatattttacatccaggtatcccagtcatctgtaccatttcccagggagacatgggtgcttccaaggcgagacaggaaagggttaggcagggaaggggcagcgacggtgcaggctggggcttggctcacagaagctgcaggagcttcagcgactgtaagagggccccgggctccgcagacgccaggtactggcagcaaagccagtcctccagctccacgccccgcctgcgatccaccgccttctccgcaaacttcatcatcatcagggcccgcttcatgtcgatccagttgtgcacgctgccgcacagcgcctcctccgaggtgcccggctgctgcaacccagctcgcgccgaggccccccacagcaggcactgcagcacgcgcttggcctcgccgattcggatacgcttgatggggtcggcctccagtagcatatgtgccagctgctgcaggccgggtgagtagagggacagcgcgggcagcggcggcaggtcctcctgccggtagtctatctcccgcagctgggcgcgcacctcgaacgggttgggttggtgcagcagctagtagatgaggatgcctg

SEQ ID NO: 53664 - DNA, 985 bp, Homo sapiens
gtcaaagacagagacaccaagaagaatcggaacatacaggctttgatatcaaaggtttataaagccaatatctgggaaagagaaaaccgtgagacttccagatcttctctggtgaagtgtgtttcctgcaacgatcacgaacatgaacatcaaaggatcgccatggaaagcagggtccctcctgctgctgctggtgtcaaacctgctcctgtgccagagcgtgggcccccttgcccatctgtcccggcggggctgcccgatgccaggtgacccttcgagacctgtttgaccgcgccgtcgtcctgtcccactacatccataacctctcctcagaaatgttcagcgaattcgataaacggtatacccatggccgggggttcattaccaaggccatcaacagctgccacacttcttcccttgccacccccgaagacaaggagcaagcccaacagatgaatcaaaaagactttctgagcctgatagtcagcatattgcgatcctggaatgagcctctgtatcatctggtcacggaagtacgtggtatgcaagaagccccggaggctatcctatccaaagctgtagagattgaggagcaaaccaaacggcttctagagggcatggagctgatagtcagccaggttcatcctgaaaccaaagaaaatgagatctaccctgtctggtcgggacttccatccctgcagatggctgatgaagagtctcgcctttctgcttattataacctgctccactgcctacgcagggattcacataaaatcgacaattatctcaagctcctgaagtgccgaatcatccacaacaacaactgctaagcccacatccatttcatctatttctgagaaggtccttaatgatccgttccattgcaagcttcttttagttgtatctcttttgaatccatgcttgggtgtaacaggtctcctcttaaaaaataaaaactgactccttagagacatcaaaatctaaa

SEQ ID NO: 53665 - DNA, 311 bp, Homo sapiens
gactatttttgccctgctaatttaatgtctgtatctcctttcagagctgagggcagcagtaaaatccaggcccgaatggaacagcagcccactcgtcctccacagacgtcacagccaccaccacctccaccacctatgccattcagagctccaacgaagcctccagttggacccaaaacttctcccttgaaagataacccctcacctgaacctcagttggatgacatcaaaagagagctgagggctgaagttgacattattgaacaaatgagcagcagcagtgggagcagctcttcagactctgagagctc

SEQ ID NO: 53666 - DNA, 725 bp, Homo sapiens
  misc_feature (1)...(725): n = a,t,c or g
tgtgaaattaaattatttttctttgaaagtcttttgaaataagagaccatgtaagtaggaccctaagacaaccaaggaatttgcttccagggccctcattcctctgctgttacttacaaatgttttaatttttactacctgatattctttctctaccttttccacatttgaaaatatacaaggcagctcacttcatcctaaaaacctaaaaactccaggaaggaaagaaaaggatgatatggggaaatttgccataaatgccggttctggttcttagtttagccatttccatcagttgaaattgtggtgtgatctgttgcttgtttcgttgttgttttgtttttgtgtagctttgttttttaatattcatttaataagatgatgggcaatagcaaacatttttactcccagggaatataatttatcaaattgaactattttatttgccaaagaaacttgtttttaatatcacgggtaatgggtaagtgtgaaaactagggcttttttttatgaaacaaaaaaaggtgacgaataatatggcttttgtttctgtttctgaagcctgatttcatttatgccagggttttgaaaaacagatctttttcttaagtgaaagcacctttaatttgctctaacggtacatccctgttaaagacaggattctgcatagccttttagggtgtttttaccagtatgtggaaaataccaggctccntcttngagtt

SEQ ID NO: 53667 - DNA, 209 bp, Homo sapiens
aatcactcaaacaccagttttgagcagctcaaaatggcagtcaccaacctaaagagacaggctaacaagaagagtgagggcagcctggcctatgtgaaaggcggtctcagtacattcttcgaagcacaggatgccctctcagccatccatcaaaaactagaagcagatggaacggaaaaagtagaaggatccatgacgcaaaaactggg

SEQ ID NO: 53668 - DNA, 1182 bp, Homo sapiens
ttttgatggcaaaaagaaacatttaataatgagggggaaagggcagaaaggtgcaatccaggcaggcaggttgagggcaggacatgccgccttctagggtctccagagaagctgtgtcaacggaggacgtgggccggggagggcccaaggctgcagcacatctacacgaggggtcagcagaacttccagcggtttccacactcgttgcagacaacaaaggtggtcatgggctcatcagagctgcgggtctgcacctgtgaacagggctgtgtgtaggtgcagttctttttcctgcacttgccgcaggtgaacaggtctgtctgcgtgccgccagtgcgggccatctggtgctctcggatggcctccttggtcatggccttacggatctccttcagctcatcactggccatctcctctgaggtcatcacagcgatctgctggggtgttatggccccacacagcacattccgccgcaggtcagggttcttggcatccttcaggttggagatacgactccgtacacggttcttatacttcatgtctgtgtttccaacgtcccggaagatgcattcctcgatctgagccgacaggcgctcgcagtccgcaccgatggccacgtggtcatggtccgtctgcagggcagcggtcagcatctcgcggcacttgttgcgcacggcatcacaggtgacaggcaccggaggaaatgtggtgatcctcggagtcgacggtgccctgggcagctccggcctcttgcggctgggatccggggcctctgaggcatccctcgaggacgtgggcagaggcatgcccctcccccgctccctggctttggcatcggaagcatccaggagcttcttccaggacttgatgagagacttggccagtgcaatgacctcctcatccgagctctgcttccgaagggcgttgacagacatcccgactcgggtggactggagcaggtgcagcgtgataggcatggccttcagctcccgcagcaaatccatggctccctccgcgctcttcttggtcaccatcttgtccagcctccgggcgatccgcgcaatctcctcttccttgcccatcatcgcctcaggagcagcgacccccccggcccgtcagcgcccgcctccgcacgcgagcaggaacaccgccccggccgtcaccacctcccacacccgccgc

SEQ ID NO: 53669 - DNA, 487 bp, Homo sapiens
  misc_feature (1)...(487): n = a,t,c or g
tttttttgtcagacaaaaatttaactttttatgagatttcagtttttgaaatacacaactcttacagcacaaacacagtatttacatttcaagttctttgtacaaaagatgtatgccattttggaagaatattgttgagatcatgatctaaaatacctgtcagagttactcatggaatctgctcttcacaaatccattgtattatgacataaaatatgggctagacgccaaggtttaaccatacataaaaatactaattctcggctgggtgcactgggcttatgcctggtaatctcaggcactttggggagggcagagggcagggtgggattcacctgagggtcaggggggtttcaaggataaggcctggaccaatatgggtggggaaccccccgtcttcttacttaaaatttaccaaaatttaggcaggggtgtgggtgggccttggcacccgttaggtcccagctactcaggaaggnttgaggac

SEQ ID NO: 53670 - DNA, 433 bp, Homo sapiens
cggacgcgtgggttattttgtaagaatgtaggtattttaagataaaatgccaatgattataaaatcacatattttcaaaaagggttattatttaggcctttgtacaatttctaacaatttagtggaagtatcaaaagaattgaagcaaatactgtaacagttatgttcctttaaataatagagaatataaaatattgtaataatatgtatcataaaatagttgtatgtgagcatttgatggtgctcgatgagttacttgtatttgatgggattgtttggatgtatttaatgggagtatttggagtatttaacgggatgtaaaccctgggatgtacctgattttgttactgttttattttaataggtaatatatatacagggtaaaagcttcaaatgggtacaaaagggttaacagtgatcgtgaagtctctgg

SEQ ID NO: 53671 - DNA, 483 bp, Homo sapiens
ttagaaaccagattaatagaagagtaggcctgatatattacatcatgagccatagtggtgggaaagaactttagcaatatagccctacctcctcattttagtgatgaggaatctgagaactggagaggttcagtgactttttgaaagtcatacaacacagctaaccattatgccaatcaccatgcttattttgggaaactctttatcttttttaaattccattttatgaaaaggcatcttcatggtccagggaatatgtatcttgtaaaatgtacctgggttggagtagcttgtccagtcttgacaaactactgaatttctgtcttgcctctccttcagtgccttttaaaaggttttcccttttctgatctgcatttcaacatagagtcacataaatggtccccctgagaaaccaatcccacttctttctagggaggattggggtatcctttaaatccttttttggggggtttccctctggtg

SEQ ID NO: 53672 - DNA, 657 bp, Homo sapiens
gagaatcttttctcaaaaccccccaacccggccctcggcaaaacggccacggactctgacgaaagaatcgatgatgaaatagatacagaagttgaagaaacacaagaagagaaaattaaactggagtgcgagcaaattcccaaaaaatttagacactctgcaatatcaccaaaaagttcgctgcatagaaaatcaagaagtaaggactatgatgtatatagtgataatgatatctgcagtcaggaatcagaagataattttgccaaagagcttcaacagtacatacaagccagagaaatggcaaatgctgctcaacctgaagaatctacaaagaaagaaggagtaaaagataccccacaggctgctaaacaaaaaaataaaaatcttaaagctggtcacaagaatggcaaacagaagaaaatgaagcgaaaatgggcctggccctggaaacaaaggatcaaatgctttgctgaggaacagcggctcacaggaagaggatggtaaacctaaagagaagcagcagcatttgagtcaggcattcatcaaccaacatacagtggaacgcaagggaaaacaaatttgtaaatattttcttgaaaggaaatgtattaagggagaccagtgtaaatttgatcatgatgcagagataaaaaaaaa

SEQ ID NO: 53673 - DNA, 423 bp, Homo sapiens
tatgcctacactgtcttattgtagcttggtagcactttttgaaattggtacgtcttccaactttgttcttttccaaggttttttggctattctgggtcccctgcgtttccctaccaattttaccagtttgtcaatttctgcaaaaaatacagctaggattttgataggaattgttgaatatgtagactaatttgggcagcattgccatcttaccaatattcagtcttccaatccatgaacatggatgtctttccatttatctggatcttaatttctttaaacgtgttggagttttattcttgatgctactgtatataggatttctttattctcattttcagaatgtttgctgttagtagagaaataaaactgatcttgtatcctgcaacctgttgaactcatttattactttttatggattct

SEQ ID NO: 53674 - DNA, 274 bp, Homo sapiens
caggtacttaattcttcctcttggagggaagatcagatttccttcagagctaccaggtgcaaggaggagaatattcagccccaccatgtcaccttccccaccagaaatgaggcagatacacagaaaaggttaggtttccagatgaactggtgggagccctggcccagaacctggccacagagctgctgttttcttgcttaaccagactaactgggctccagccagctctttcagaacccttttgataccttatttgaaagtatctgctgctctg

SEQ ID NO: 53675 - DNA, 182 bp, Homo sapiens
gactcatcttgcccagagaagagccaggatatgagaagatgggagagggaagggggaggtgtgaaacgtgctggtgcttcctgtcctcgtggtgtgatggctgcccaggctgctccttcgaggcaggacaggattcccatgggagatatgaggaccatggtgatttccaggcaccagttatg

SEQ ID NO: 53676 - DNA, 1837 bp, Homo sapiens
  misc_feature (1)...(1837): n = a,t,c or g
tttttttttttttgaaatttgaaatggcagatttattaagtatttttaagccatcaagttacaaaaggctattaggggtcttaaaaagacaaagagtatacaataaaacaataagcaattacagattgttttaggttgaacaatttttgtacagttatatctatagtacattactaatttacttagcaaactttatcctgagatttgcaaatttaaaaaaatgaagaatcaaactatattttcttttctgtttttttgaaacagagtctccactctgtcatccagggctggagtacagtgggtgtgatctcagctcaacatagcctcaacctcttggggttcagggaatctcgtgccctcagccctcccaagtaggctggggattacaggccatgnnnnnnnnnnnnnnnnnnnnnnnnnnnnnnnnnnnnnnnnnnnnnnnnnnnnnnnnnnnnnnnnnnnnnnnnnnnnnnnnntggcctcaagttgatatgcctgccttggcctcccaagtaacgggattacgcgtgagccacgtggcccggcctcaaactatattttctaattagtacagtaaatacacattaatcatgacacaattatttcttctggatacagcaggaaaaattaagttaagagaaagtgcttcatatttcttgatttgttataaaaaggagagatcctctagatttctgggtaagagggaaagctagcaatcccacaatgatttcctttatttcttgccatccgaatatatccttcttcaccaaagttgtggccccagctgtttttcacaagccagtattctttcccattaagatcaccatagccaaccacaagtacaccatgattcacattctgagtacaggatggttcatagtagacaccacttctgtagaggaagaaagaaggatgacgcgcatctacaccaacagacactgggcctttattggccacagcttctttcaggacatcttctctgccataaggaagttcagtgtactttgaacatgtggcagcacgatattttgagtcatattgacatttctgatccatggctttgtagggataggaagcgtctgagtcgatgcccttgttatcaatgatgtactggaaagccgttgtcatgaagccaccattgcagcctttgtttccatatttttcagttgagcaatccaccaggttctgggcactgagagacaccagctttcctgttttcagcttcagctgtgcttccagggcccccacagcactgaaagcccagcaagcaccacaagaaccttgatatttcacttcagtaacacaccctttctctctccagtccacagaatcaggcaatatccgattagggtttgacttatatgtgatatttctctgccactggctgggaactctcagggaactcatcaaagacatcacttcttcactggtcatgtctcccaggtggttcatgcccagatcgtatgagtgcattcccattgaatgctccaggttgtgaagcatcacaaactttagattcttttcccagatgagacgtcgtactgcttcttcattcttttccttgtattgtttgccataggttttcttccagagatgccagtggtgatccagggtaggatctttatgcaactgtgccactgcagaggagcacaccaagagcacacaaaccagccgtttcattgtgatagaaccagcagttgctcctacagtaagagtccttgaattagtgggctctcttctaagatttcaaagcaacaaggagatttcagttcaattgacttgaaaagaaattggaacttgtcacatgaggtaccccgaattcgtaatcatggtcata

SEQ ID NO: 53677 - DNA, 556 bp, Homo sapiens
gacatacaatgtgcaagtatgagacattttattttctaattgaaactgtattaagacatttacttggaatcacattattcccttaattttttcacagagaatattccatttactgtttagtttgtggtcttgtggacatgttctaagtaatatatttgttagcatggtagtttcagttgggcaaaacttactgccaataagacttgaatttaatttgtcacgtatttccaatggcaaccaatgatcaggtgcttcaatattacaaatttcaattcttccattctttatgtctatgaatactttaatttccaagtgtgactgttcatataacacatgaaaggaagtatttatactaaactttggagttttgccatatatccactcccaagtttgcagttctttggctttgctatttattccaggaaacagtgtctcatccgttgggtttattaggtgaatgtgattatcaatttgatgataggcagcatactctgtagcaacagcattcattagtacttcacaggtcagagtgggatccttttccaaaagatttttc

SEQ ID NO: 53678 - DNA, 96 bp, Homo sapiens
gccacctgtgactgtctgactgcttagtgcttcagctgtcccttccttgtgtcctgggggacctgctggcggcctcttcctgggagccatgacctc

SEQ ID NO: 53679 - DNA, 346 bp, Homo sapiens
ggcgtgagccaccgcgtccggccaactattgttttcaaacttcactgggtgggcagtatgggtgaaggagcttgggaaggggggaaagactaggaaaggacaggggaaggcagttaaaaatacttgcacctgttcaagggaaaaggctgaggaaagatgtggggagagtgatactaaagtcaaagtagcaggcactggtgaccaaggggagactgagagtaggggatggcttaggttttggcttgggtgttcagaggttagagataaagaggtgtcatgacatgatggacttactaggccaagagaacagacagaaaaagaggccctctaagtggcctcgtgccgc

SEQ ID NO: 53680 - DNA, 488 bp, Homo sapiens
tttatagattatatcctccatttaataattttagaaggttttataaaataacacaattaaacttcatttgaacttttctaatttgaaatataagacaatttatactctaaattttagagtgctttggttgaatataatcattaaagtagctctggaaggagagtttaggtaatccacacacaaagacaagaataatgaagctaattaagagaataaattggctttgaagtactttaaaattatagcactgctatggtttgaatgtcccctccaaaactcatcttgaaattaaattgccagtgtaatggcattgaaaggtgggtcctttaagaggtgatctcctttaagagcagagacctcatgaatggattaatgccgttatctcaggtgtgggttagttatgtcagaagtgggctcctgataaaaggataatcattttgccctcttgctctcactcgcattctcttgcccttccacccacgcgtccg

SEQ ID NO: 53681 - DNA, 1349 bp, Homo sapiens
  misc_feature (1)...(1349): n = a,t,c or g
ggccgcaagcgacgccgccggtgcgacgtcaacgcagccgggcgagttttaccgatctgtgttccgcggcccggccgggntgagtcttcccagggtcagggtcaggcgctttgctgagtccctttgtggccgccatggacaattccgggaaggaagcggaggcgatggcgctgttggccgaggcggagcgcaaagtgaagaactcgcagtccttcttctctggcctctttggaggctcatccaaaatagaggaagcatgcgaaatctacgccagagcagcaaacatgttcaaaatggccaaaaactggagtgctgctggaaacgcgttctgccaggctgcacagctgcacctgcagctccagagcaagcacgacgcagccacctgctttgtggacgctggcaacgcatttcaagaaagccgacccccaagaggccattaactgtttgatgcgagcaatcgagatctacacagacatgggccgattcacgattgcggccaagcaccacatctccatttgctgagatctatgagacagagttggtggacatcgagaaggccattgcccactacgagcagtctgcagactactacaaaggcgaggagtccaacagctcagccaacaagtgtctgctgaaggtggctggttacgcctgcgctgctggagcagtatcagaaggccattgacatctacgaacaggtggggaccaatgccatggacagccccctcctcaagtacagcgccaaagactacttcttcaaggcggccctctgccacttctgcatcgacatgctcaacgccaagctggctgtccaaaagtatgaggagctgttcccagctttctctgattcccgggaatgcaagttgatgaaaaaattgctagaggcccacgaggagcagaatgtggacagctacaccgagtcggtgaaggaatacgactccatctcccggctggaccagtggctcaccaccatgctgctgcgcatcaagaagaccatccagggcgatgaggaggacctgcgctaagccccacccagccccccagtgcccgtcttcctgtcccatctgctcagagagagccaagctctaaagcacatgtagccgctgagacctgctgtttctgctgggggcaggctcctcttcccccagccccgggagcctcccccagcttcctgcagccccgacctctcaggttagaccctgggccctggagcttaggggattctccccaccccagccccacacctgctccttccctaatgctttgaggttttcttggttggaagctgcagctggcccaagaaagaaaataaaaaacaacacttttgcaaaaaaaaaaaaaaaaaaccc

SEQ ID NO: 53682 - DNA, 347 bp, Homo sapiens
  misc_feature (1)...(347): n = a,t,c or g
ggccgtggcctacatcgccggcttcctcctggaagaccgagtggtgtgtaatgacaagttcgccgaggacggggcacgcactgtggcgcagggcaccaagaaggagggctgcaccatcctcttcatgatgctctacttcttcagcatggccagctccatctggtgggtgatcctgtcgctcacctggttcctgacggttggnatgaanngngntcacantncnananacgnngtcanncactattttcacntgntcgnntggnntgnccnanngntcaaganaatctanntactcanctgttcntatnntatgttnatatnancnatangttttanganntnnatgt

SEQ ID NO: 53683 - DNA, 100 bp, Homo sapiens
gtttttggaaattatggttttgtattttcatgtttatttacattcatttttgtttattcagggaaagctgatctttttttcaaaccaaaaaaaaaaaaaa

SEQ ID NO: 53684 - DNA, 1054 bp, Homo sapiens
  misc_feature (1)...(1054): n = a,t,c or g
atttcggcactagggaacgctcggaggagctcaacaaggacctaaacccttttacgcctcttgtaggcattcggattcctgatcatgcttttatgcaagacttggctcagatgtttgagggtccgcttgctctcactagtgccaacctcaagctcccaggccagttctctgaatgtcgaggagttccaggatctctggcctcagttgtccttggttattgatgggggaccaaattggggatggccagagccccgagtgtcgccttggctcaactgtggttgatttgtctgtgcccggaaagtttggcatcattcgtccaggctgtgcccctggaaagtactacagccatcctccaacagaagtacggactgctcccctcacatgcgtcctacctgtgaaactctgggaagcaggaaggcccaagacctggtgctggatactatgtgtctgtccactgacgactgtcaaggcctcatttgcagaggccaccggagctagggcactagcctgacttttaaggcagtgtgtctttctgagcactgtagaccaagcccttggagctgctggtttagccttgcacctggggaaaggatgtatttatttgtattttcatatatcagccaaaagctgaatggaaaagttaagaacattcctaggtggccttattctaataagtttcttctgtctgttttgtttttcaattgaaaagtaattaaataacagatttagaatctagtgagagcctcctctctggtgggtggtggcatttaaggttcaaaccagccagaagtgctggtgctgtttaaaaagtctcaggtnnnnnnnnnnnnnnnnnnnnnnnnnnnnnnnnnnnnnnnnnnnnnnnnnnnnnnnnnnnnnnnnnnnnnnnnnnnnnnnnnnnnnnnnnnnnnnnnnnnnnnnnnnnnnnnnnnnnnnnnnnnnnnnnnnnnnnnnagtctcaggtgaccaaaggctccttgaagctagaaccaggtttgggataaagattgaagagccacaggccactcttccctctgagccattgggcctagtg

SEQ ID NO: 53685 - DNA, 175 bp, Homo sapiens
gttgggaaagacgaaaaaggcagaaagatcccagaatatctgatccattttaatggttggaacagaagctgggatagatgggcagcagaagatcatgtgcttcgtgataccgatgaaaatcgtagattacagcgtaaattggcaagaaaagctgtagctcgcctgaggagcacat

SEQ ID NO: 53686 - DNA, 330 bp, Homo sapiens
cttgaaaattatgagcaggtattgggagccacagactgtattttggaaccagctgcatgtcaggacaagcatagattgtggtctgtggaggctgggagagcacaatgcttgatttttatttctttgggagataagaagaaaaaataccttcctacctgacaagattgacaacttgctaaatctgattatcttcagaagtgtgctggacagttgcgaagtaaacatttacttttcaaagatgatgatcaaggaaacatctctacgaagggacccggatttaaggggagagctagctttcctggcaaggggctgtgattttgttctcccttc

SEQ ID NO: 53687 - DNA, 288 bp, Homo sapiens
gtatagcaaggcatttcacacagtctgtatggcccaggtagtgtcgctgagttctctcctcataattaaatagtactactactgatgcaataaaataaactatttccccggtcggaagaaggtaaacattagctctacagtcctttcctcgattaccatgttcattccttccgatgttgacaactatgatgacatcagaacggaactgcctcctgagaagctcaaactggagtgggcatatggttatcgaggaaaggactgtagagctaatgtttacctatttccccg

SEQ ID NO: 53688 - DNA, 601 bp, Homo sapiens
gttctattgctactcttaaatgtagagaggaaggccaaaggttgtagtgaagattgtagtgaagactctcttcaatttgagtttgaagctacccaaattatcattataatggtttggttttagagctcaatcctatacatacttatacaaaaacaaagtaatttatttgcttattattgcattttatagaacctggcaaagatattacaagaatgtaaaaatacaggccaatttctttcattaacatagatgagaacaaaatctaaacaatacgttatcaaaataaatccagtattgcatacaacaaataataatggtgtatttcagcaagttgtggtaacaaattgaagtaaatcaatgtactaagccacattaacagaacaaaaatgatacacaattgtctcaataatttacagaaaagacataggtagaatacgagttttcattttatacaaaaacttgtagtaaattaacagatcagaacttcctaaatttgatcccctgcatcaatcaaaaaaaacctgcatcaaatactatgcttaatggcaaaatactgaaagcgccccctatccacctcaagacctgtcatcagtcaaagatg

SEQ ID NO: 53689 - DNA, 1236 bp, Homo sapiens
cgtgaatttgcctcggggacgcctctccaggaatgtcggattgcacatcctattgtaaaatgtacttactgcagatcagaatttcaacaagagagcaaaactaacacaatttgtaagaagtgtgctcaaaatgtgaagcaatttgggacgcccaagccttgtcagtactgtaacataattgcagcatttattggtaccaagtgtcagcgttgcacaaattcagaaaaaaagtatggaccacctcagacctgtgaacagtgcaaacagcaatgtgcttttgatcggttggaggaaggaagaagaaaggttgatggaaagttattatgctggctctgtactttatcgtacaaaagagttttacagaagacgaaagaacaaaggaagagcctgggatcttcacattcaaattcatcttcttcatctcttactgagaaagaccagcatcatccaaaacatcatcaccaccatcatcaccatcaccatcgtcacagcagtagccatcacaaaatcagcaatctaagtccagaagaagagcagggactgtggaaacagagccataaatcctctgcaacaattcagaatgaaactccaaagaaaaagcccaaattggaatctaagccatctaatggagataggtgtatgtaatgtgtgccattagtaaggtaatttgccagttgcatccatttctgtcagtagctctataaatcagtcagcagatagtgggggaacagacaattttgtccttataagtcaattgaaagaagaagtgatgtcacttaagcgtctcttacagcagagagaccagaccattttagaaaaagataaaaagttaactgaactaaaggcagactttcagtaccaagagtcaaatttgagaacaaaaatgaacagtatggaaaaagcccacaaagaaactgtggaacaacttcaggccaaaaacagagaactactcaaacaggtcgcagcattatcaaagggtaaaaaatttgacaaaagtggaagcatactaacatctccttgagaaagtcatttgtttagcatttcttcttacaatgtaaatttggggaaaaaaaattctgtgaagcccttaaattctgtgtagtagaaaaatatttttgcacaccaaatgaattggtgtgtttcctgttcacttttgtaattgatatacagcattttttaagttgtaaaacattcaaataaaacttcaactggtttgaagtaactttttaattaaaa

SEQ ID NO: 53690 - DNA, 576 bp, Homo sapiens
cattgtctataaatgaatttttaaataattaaagttataaatttatggatgggatcacttattaatattgcatcatctgaaattttaaaaatatgtatgccagtcttgttgctataatctgcttagaaaaaagaacaaaacaaaaagactacatttttcaagatttgatttttaagaagtacttaattcttggagaggagaagagagtcatataaataaaatatatcatgagagtgatattactgtggtatatagagtatttctttgcattagacccagtgttagtttgcatatattctcatgtcctcattgtaacaatttttagcgagtattatttttcaggtgagaaaattttacttcagagattaactggtgggaggtaacataataacagggaaggagccagggattatctgtaatttcaaatcccacttccatacccattatggctattacttaaggatatgtgttcacagtgtacctactgcagttgtatgatctggttgcttctttgaaattttcattctggttttaaatttagaattgagtttgatttttgtggagttctttatttaa

SEQ ID NO: 53691 - DNA, 1403 bp, Homo sapiens
  misc_feature (1)...(1403): n = a,t,c or g
ttttttttatagattattccacataacatgctttatttggacttaaacacttataatttcattctaaacacttggttgacatacattttgatgtgtgtagttaggctatacagaatatacaaaccaaagctgtatgaataatacataggtttttcaaaagttatgtttcataaagaatacagagaaaggaaaaatagccacacatccaatatctcacaacttctaaaaataaaactacagagatgtaaaatataaacaaatcaaacaacacacaaattatcatccttgaaagaaaaattacaggccagcatcagccattctttgaagaactaaaattattaaagaaaacataaatttattacaaagctaactatgagtgtactaataggtaaaataatatgaagcagtataattctacattaacaagtttttccataatatagcataatctctctaatcaaaatttctaattctatctagtattaatttaactactgactttaattcataattggtagcctaatttctggcatacaatgtgaaatgacatataatttcattaaatccatagtactataaatagtcaattttacactatctcataaaggtgtatgcaaaggcctttttaaaaaacaaggctatctgaatataataaaactagttttccaagattcaaataacaaaacagttatataaatgcatacattacacttcctaggttaaaaaccatcaaagatcacaaaaatattaccaaaaaggaaagtcatattttttcaccactcatctttgtccctgcatcttcattagagctgtctaattcagcaagaccactttctgattcagtatggctttcctgcattgtcactgggtttccagcatcactgttcgaagaagtagctgtggcagctggttcagcagggctttcttctccctctactttagctagcctgtaactagtcagcatctcctccagaagttgtcggtagtttcccctatgattaattctcatttgcctgagagcttccaccaattttccctgtgatccactttcctctgcttcatcggaggccccatcactttctctatgtggattcagtctactataaacagcttcaataacattacgcttgccagcaagacctcccccaggaggcaaatttgggatattttctgcagacaagatgcgcatgacatgggcaagatcaggcattccttcctcgccagacttctccataatctcttcaacccgtgattccaagtgcttatccaactctgaatcttttttcaccgcttcatctgagaccttgctcgtgccgaattcttggcctcgagggccaaattccctatagtgagtcgtattaaattcgtaatcatgtcatagctaatggnntcaaagnncaaaa

SEQ ID NO: 53692 - DNA, 706 bp, Homo sapiens
ctttttttttttttttttttttgggagaatattattttattatcaaatgtacagtatattgaccttaaaaatacagtaaagcagtcatggaaataacaggtcgtgtattattcatgggcacaaactgactcatggctggggaagaagcagccaccttagaccagatggacaagccagatactgcagagaagtttctgggcttttcggggaagactctagattcaattctgtaaagttatgatgcagttttctccttcctctcctctcacctcctctgagcacagctttcaacaaaaactttgcatacaaggaaatctaatatcgcagccttccccactggagggttcctggagaaggtaatataacagtggtgactgaatttgaaggaggttggagagaaattttttaaaattatatttccatgtctgctgtaatgtatccaagtcttgtaaagaccaataatttattaattttaataagacagaaagtatttctccttctagtctcatcgtctgatttgaaaggaaaaaaaatatatataaaacattatataaaaagtgagttccaggaagaaatgtttttcttttttcatataaaatggtagctgtatgtatgtaactctgaattaaaatatatatatatatcagtcactctggttctaaatccttattggcaagctggagttttgaagtgacagaggaataac

SEQ ID NO: 53693 - DNA, 479 bp, Homo sapiens
ggtgcgtccctgagcatattacctgctaaagggcctatgcttcatgctagatcaaaattccccttaatcatcaatgctaaaacctttttttacttttaatcttacttagagattccttattagcaaagtttgctggatggagtaagagcctctggtattagagatgtttgtgtaaaaatgacaccaacccataaaggtcagcgatgggggttactcaccatgcctgttgatgaggaagtatagagccttcacctcaggttcttagctacgcctccaaatggcaactttgcaaatgctgtattcaggttcaatgctaatatttcatacaggaggaagtcctacattgcagtaacacaagatgggctcttctcagaaaacaaagaaaaactgatcaataatgccataacagcattactgtcccaagaaggggatgtcgttgcttcaaatgcggaacttgagagtcagttccaggctgtgag

SEQ ID NO: 53694 - DNA, 513 bp, Homo sapiens
gctggcagccaccaccttgttgcctgggtctgtgagagcaaagctgagttctggtccggcttgtagcagaagaaggaatttgacaacatctataaggcccaggtgggctgtggcagggccggtgggttgagctgcgcctgtaggctgtgggcagctaatcctttcctgcctgtgctctctcccctgttttttggtgagaaccacgagaaggaaagctccgagatcctcaagtgcctgacccagcaggccgtggcctgcaggcgcaccatgaacgagatctaccgcaacggcttccagcgccaacatcccgcccctcaagttcacgggcccccagcattggccagcgtcttgggagcagttgaacgtcattaacggcatcctcttcattcctctcagccaaaaagacctgggagaatctgaaagccgaggtggcgcggcggcaccagctccagggaggccagcagaaacagggatagagccgaggagcccatggttaccgagcccgcgccaggg

SEQ ID NO: 53695 - DNA, 414 bp, Homo sapiens
gagtactggcgaagacgagaagaagaggagcgttggagaatggaaatgagacgttatgaagaggacatgtactggaggagaatggaggaagaacaacatcattgggatgatcgccgccgaatgccagatggaggttatcctcatggtcctccaggcccattaggccttctgggagtccgaccaggcatgcctcctcagcctcaggggcctgcacccttacgtcgtcctgactcatctgatgaccgttatgtaatgacaaaacatgccaccatttatccaactgaagaggagttacaggcagttcagaaaattgtttctattactgaacgtgctttaaaactcgtttcagacagtttgtctgaacatgagaagaacaagaacaaagagggaggtcgacgcggccgcaatttagta

SEQ ID NO: 53696 - DNA, 2659 bp, Homo sapiens
ttttgatttggtaacaaagttttgtttattgtctaaatttaagataaaatgtgtcattttcattacgaagtacaattttatggaatactaaataaacatatataaataagccttggccaacattataaaccaggatctgacatagatataaatccatgccttccaacttcccttgacgtcacattatcttctcttaagagatagtcactttggctaatagggaaaagaaaaccagtaacatcagaaaacaatttccatctggcctgggctctgactggcatcatcactgtgagccatatgccttacttttctctgacacttcaggatggttccctcctggtatcagctgtgcaccaaagctaaaagttcacaaggctctccttggccattctcaataaatcagttttgcaaaatctccaggccttcttgcagagtattcaggcatatagggttgtagttgatcagccataaagatggggctccctttaggtcctgcagcagtatggcaccagtttgaaagcctccatccagtccacataatgaaagtcagaaaaagaccatttaccacttatctgtgctttctacaaaaaaaaacccagatacctggatgagggccaagactgcctccctcatcatttcactatatgtctatgttgacaaagtcagcaagaggagagatatcaagtgcttgcaaggtccctaggcctgtccttacattcagaccttcccttgctacttgtaattccttgacagaagacattgtggtagtgggtactcaggagagaagcaacaagaatgggacaattctcccagggcaaacactgaatcctctctttctgttacagagtaaagttccctgagtcctggtcttgattgttcatgtagacagaatgataactattgaaactgtccctaatttagtaattctctctgagctcccttaagagggcccaagtactcttattttccatttctcttgacaaagagtaaaaaatgagactaagagccttgactatcatatgtctgttgagcacttgatacctgaaaaatttagatgactgggggtggggaagctttgaataaccagatatatacatatagatagatagctaaaggaatctcatcactacactttcatttttttatttataaagtactccttatgtatcaactcttgtgctaggcacagaagatgcaatgctgaataaaacagacagcttagattcctttttgtgaagtgtaacatgtacccttcccaaatgttttattaatcacagattcctatcattgggtgcctcataattttgtattctttcaccacttctaaagtcaagctctacatggtaactttcctcagtttggagacactagacatgcttcccttcttctgtggagtttctggtgtctaagaaggctcgatcgcctactaaagtttctcttgcataagctacacgtataaggctgctcacctgtgtgagttctctggtgtttaataaggtgggagttctgaatgaatctttttccacattcatcacatttaaagggcttctctcctgtgtgaattctttggtgtgtgtgtagatttgtgttatgactaaagcttttcccacaccatgagcatctatatggttttattccttgatgggtcatgaagtgcttattaagatctgaactccatctaaacctcctgtcacattgttgacatttatagggtttctctccagtgtgaattctgtggtgtttaataagatcagagctaactctgaagcttttcccacattcctgacacttaaaaggtttctcccctgtggggcctttcccatgaagatccataagttttggaagctcttgtttacaagttgcaggtttctttcttttcttccttggaaaagctcgatgccatttctgtacactgtgtgtatcaccaggattttccctgcccattgttttctgggcaattttcattctggtcttttttgatacttcgcatcctgatgtttgtatttctgatgtagaaacagatataggatgatcatttccagtgtcattttttagctttaaccctagagagatgacagtctcatagatatcctgcattacatcattgtagagagtcttctcaagaggattcaataattgccactcttcctcagaaaaatacacagccacatcttcaaatgtcaacaaactctaaagaagagaatgggctatagtttagtacttgccacttcagaagctgtcctaccacccatttctgaattacatggtaggccaggtgctgaagatgtgaacagtacaagatttaggggaaaaaagtgagaaggcagagaaaggaaggagcaaagaggatcagtaaatcacctgggaggtgcccagttcccactgtgccaagcctagttgcctagagaataactggggctaaaatgcctcaaagcacctgctggacactatgagtcctaggcaatagggacaagcagaggcaaggccacagtcaagtcacctgtaaaaagccagaaataacagctcaccagggactcaggcaggatgagtttagatgccatcttccagtgtttgattcttttctgctcagaaagggctaacatctgttgatcatgacagctgtgggtagaaaatagccagggaaaatttctgtttccta

SEQ ID NO: 53697 - DNA, 318 bp, Homo sapiens
ttttcttataaaaaattatacaaatgctgaagtgagattctactattgttcattgcttccttttctttttccttttgcgattttcactgattaatagcacatttcttcacaaaattagataaagttggtcaaagaccagatattctggaatggaaattgtaaagcttaatcaaaaagaatagccagtacagcatacaatctcagaaacttaggaaggcaagtaggaaaataattgggttgatgtaaacgaaagtgccattttaggtaaaggcaggaaaaaaatagccaatatttgagttatgtaaggggtaaaaatcc

SEQ ID NO: 53698 - DNA, 438 bp, Homo sapiens
atcatttattctccgtactgatcactacatcatggccctgggtcctttttgtgctgattgtgctgagccagctcaccattctcattatttttagatatcgaggatacccagagcttaaagaaccttcagggtttataaatctgacctcattttctcttcatgtcttgagcaaaataaacatcttctactattctgtgttgttgttgaccctgtatacagtgctggggtccatggttttttggtgaaatcattgatggcaaatttggttgctgcttttcctttgggatatttgttaatggacatttcctacaaggcagcataacatttataattggaattctccagctggcgttttttaacatccccttgatggcttacatgtgttggagcttgctgcagcggtgctttggtcacaacttcaggtctcatctccatcaa

SEQ ID NO: 53699 - DNA, 755 bp, Homo sapiens
gatcctcccttcctcagcagtgagaaggtctaggcctcagagtttttggagagtcactgctaccaaagagtctatctgggattgtagagtaaggatagattttgttatttcttgtaaactgtctgagaaatcctttgagagtgtgtggtagtaggatagtaaagtagataaactggcgattctggttcctgtagccagtggcccattcctaaccctataagtaaggttattagttgtatggccctgcactgacagacttcagctttgaggggcactaatatggtctgatttcctccaagattagaagttaggataaataccatgttacactgttaacttttagcaagctttacttttgtcaaaaaccttgtaagtttgggatttcaattattctttgctattaataagacctcgttcagtccatattaacttagaattggtatagatggctcctttctgatgctgtaagtactttaaggtttggctgagtgcaaacagctcacacgtttgagcagaccaattattaagcaactttcctaactctgcttctacaagagtttccttatcacttactgaatacccattgtgtcttttttctttaattacctgggaggaaccatagatcatcctttcctgaagggagttcctcctaggtatggtagggcctttgtacggtaattaagatttagatcccctgttaggaaacctgctgggttaagggaattttcagtggttaatgttaaatcatccttttt

SEQ ID NO: 53700 - DNA, 887 bp, Homo sapiens
cttttacccattggcgtgagtatttttcctcagcttccctctttctccgtattctgctcctcctcagtcccatcctccacgctttggaagctactgccttactgcccggagcgccgtcgtccccgaacctcccctgcttctccctttccttctgttccggtttctggtcgtaactcaagagcaaaccaccgtactgcaaaggaaccagatattgtgctcgcggttccaaaccgggcatgggcaccgaatgcttctcgataaatccccttatggtctctgagcattaaagaaagcaagggaggaaaacatgcgcccaagctcgttcgcaggaacatgttcgcgtgtctgcgcctgtgtgcgagccagttttctggctgaggatcgctcgccaactacagacatcacccgtggggcgggtctcagggtggcccaaaagacccctgttcacgccactaccagcctaactttaggaactgtcgtccacctggcttttattatacttgccttaaacatattcacttttttgagactctagaaatttcacaaagttttgggggtaggaggcacactgggctttgggtgtgtttctcatgagggcactgacgctgaatggtgcagtgagaaaggacggtagaaaccactgcctttgcttttaccattgaagaaactgaggtcctgtgactttcccgaggtcatcggaatctgccttgcacaggagacttaaaatagttgccagcagataaaagaatgagcaaaaccacatctactccaatttgttaagtctgaaagaaagtaattgaggggggattcctctttggggaaatatttatttcctgcattgaaaatagtttaatgttagtaaacatataaaaagtattttaaattca

SEQ ID NO: 53701 - DNA, 1311 bp, Homo sapiens
gtgagttgggggaggacgggttgccgactcgcctacctagcggtctcttgattgtcgatattttgttggcataggtttatgtagagacgtatacatatatatagacacactgtctttaaatctaggcctgtatccggtgtccgaggcgaactcagtaagatgatgttaagaggaaacctgaagcaagtgcgcattgagaaaaacccggcccgccttcgcgccctggagtccgcggtgggcgagacgagccggcggccgcggcacgcatggcgctcgctcttgccggggagccgcaccgcccgcgcccgcgcctccagaggaccacccggacgaggagatggggttcactatcgacatcaagagtttcctcaagccgggcgaggaagacgtacacgcagcgctgccgcctcttcgtgggaaatctgcccaccgacatcacggaggaggacttcaagaggctcttcgaacgctatggcgagcccagcgaagtcttcatcaaccgggaccgtggcttcggcttcatccgcttggaatccagaaccctggctgaaattgcaaaagcagagctggacggcaccattctcaagagcagacctctacggattcgcttcgctacacatggagcagccttgactgtcaagaacctttctccagttgtttccaatgagctgctagagcaagcattttctcagtttggtccagtagagaaagctgttgtggttgtggatgatcgcggtagagctacaggaaaaggttttgtagagtttgcagcaaaacctcctgcacgaaaggctctggaaagatgtggtgatggggcattcttgctaacaacgacccctcgtccagtcattgtggaacccatggagcagtttgatgatgaagatggcttgccagagaagctgatgcagaaaactcaacaatatcataaggaaagagaacaaccaccacgttttgctcaacctgggacatttgaatttgagtatgcatctcgatggaaggctcttgatgaaatggaaaagcagcagcgtgagcaggttgatagaaacatcagagaagccaaagagaaactggaggcagaaatggaagcagctaggcatgaacaccaattaatgctaatgaggcaagatctaatgaggcgtcaagaagaactcagacgcttggaagaactcagaaaccaagagttgcaaaaacggaagcaaatacaactaagacatgaagaggagcatcggcggcgtgaggaagaaatgatccgacacagagaacaggaggaactgaggcgacagcaagagggctttaagccaaactacatgg

SEQ ID NO: 53702 - DNA, 653 bp, Homo sapiens
tttttggagggtgggcaaatcagagggcagagattatttagttgcattataggtattcttctataccacttgccctttgaaaccctcaacttgaggtaatgtgcagtctggggttttaattagtattaataatcttgtggatttacagaaatctataatgcacagagttgagttttaaccaatgatcgtattcatagaaaatatttcgaaccaccacattcttcatggtcattttagttagtacatagtcattgagtggccagccacacctgacacaatctcccagcatccaagattggagattcctggtctgtgtagagtatatggttttgcacgaaatctttctagtcttgtgattgcttcagtttaatttgtcacataaaaccacaagtatttaatattaatgtatcagtggtttggtgtttttgttcccagtactcggctttgcgccgggaaaaatctgaatactggagctacagagttaactctaaaagtgcttttattggtttctagaaactggaagaagagaaaggcaaaaaggaaaaagaaagacaggaaattgagaaagaacggagagaaagagagagggagcgtgaaagggaacgagaaaggcgagaacgggaacgagaaagggaaagagaacgtgaacgaga

SEQ ID NO: 53703 - DNA, 751 bp, Homo sapiens
ttcctcttgtccttgagcgtcaaccttctttccctgaagtggctggggttcctgtttccttctttgattgacaacttgtgttaaccctcgcacatctctgggccaatttttgcttgtaagtctttccggagacccctgggaatttaaatcattagcaccgcgcccttccccgaagagtcttcgaagggttgccgcttttcggtggcgcagttctcgcgagaaggtgactttctttctcggtatttcctggtttccagaatccttagcgcgaggcggaaaaaatatttctcccagcttgtgttgatgccgcgattttgactgagacttcttcccacgatttctgtttttgcttctccaaggaaaatggcagctcccgagcagccgcttgcgatatcaaggggatgcacgagctcctcctcgctttccccgcctcggggcgagccgaacccttctggtcaggcacctgccggctgagcttactgctgaggagaaagaggacttgctgaagtacttcggggctcagtctgtgcgggtcctgtcagataaggggcgactgaaacatacagcttttgccacattccctaatgaaaaagcagctataaaggcattgacaagactccatcaactgaaacttttagggtcatactttagtcgttgaatttgcaaaagagcaagatcgagttcactccccatgttcccacttcaggctctgaaaaaaaaaaaatgtctgatgaccctgtcgaagatgata

SEQ ID NO: 53704 - DNA, 7301 bp, Homo sapiens
  misc_feature (1)...(7301): n = a,t,c or g
aaaaaaaaaaaaggaaaggaaaaggaaaaggacaccaagttaaaaaatgggcaaaagatgatagacacttcacaggagacaaaatcaaaatggttaataaaaacataaaaatatgctcaatctccttggtaattagctaaatgcaaattaaggccataactatacaccccaccagactggcaaaagtgaaatgtctgccaaggatgggaaggcaagggaattctgttttactgctggtgggcacgtaaactagaacaatatttagaaagatcttcataccctagaacccaggagtcagactcctgagtacaaaccctagaaaaatttgtgcaccatttgcaaaaaacacacgtgcatcagagacatggacaaaactgttgctagcagcattgtgtgtagttaccccaaactagaaacaaaccaactgtccatctacagcaggcatgtccaatcttttggcttccatggaccataccgnnnnnnnnnnnnnnnnnnnnnnnnnnnnnnnnnnnnnnnnnnnnnnnnnnnnnnnnnnnnnnnnnnnnntcgcaaacaaaaatctttnnnnnnnnnnnnnnnnnnnnnnnnnnnnnnnnnnnnnnnnnnnnnnnnnnnnnnnnnnnnnnnnnnattggacaagcttgactgacagtgaaatgaatctgtgaactacgatacagccaaacaatggaagtttttagcaatgaacatgcacaaactatactacgcacagcaacatgaataaatctcacagacataataacgagccaaagaagccagctgccagaatttgcatctgtatgattcaaggggataaagcacagaaacaggaaaatactgcaatgcttgcataattgggtgctgaagactttttagaaaaacaagaacacaagactcacataagccagggcagagaggccggaagtgacactgtgaggggagggcacttgggtgctggcaaaactatttcctgatggtggttgcagatcgtttacttcctaacagtgtgttaggttgtgcatttatgttttattcacttttctgtatgttgttttattctgcaggaaatgaatgaaaaagggattctgcctcagctctgagcccctcagagtggggccagggaagaagcagacggcaacgccagggcagctgtctggcagcctggaaggcctgcgaagcttcctaggggtccgaaggagggtagacaggtaggggtctgctctgtacccatcaaatctccctccagtgagaatggctggaagatggcttaaaagggttcaccactcacacacacttctgaggtggtgggggttgtctgtcaagcatcttcacagggtcactgcccctcttccccaaggacaggcaacctcctggcactgccccctcagcaggcagtctaggtggagggaacagggcgtgcaggcagagataaggcagggggtgtgtgcgaggtgcccagcgaggggcttgatgctgctgggtcacagaaacagaggttgtggcccttcccccattcccctcgtctagagacaagcacggccctcccatgttcctggtgtgaccctggtgtcctaggccatccctccagcgcctggatcaccctcaaaagcttcttccctgctgagcttcaatctgcctttctatgaaatggccccaataagccctgcctgcctcagggaactaagccgcaggtcccaggtccccctctcccccaatgcccaccctcgcccatcctgaggtgcaggaagcacctccctggggctgcgctgagccccaaccagcaggggagctccgcacaacgtggcccagaaggatcagtgggaaccgaggtttcttctggttctaaaaacatcttttnnnnnnnnnnnnnnnnnnnnnnnnnnnnnnnnnnnnnnnnnnnnnnnnnnnnnnnnnnnnnnnnnnnnnnnnnnnnnnnnnnnnnnnnnnnnnnnnnnnnnnnnnnnnnnnnnnnnnnnnnnnnnnnnnnnnnnnnnnnnnnnnnnnnnnnnnnnnnnnnnnnnnnnnnnnnnnnnnnnnnnnnnnnnnnnnnnnnnnnnnnannnnnnnnnnnnnnnnnnnnnnnnnnnnnnnnnnnnnnnnnnnnnnnnnnnnnnnnnnnnnnnnnnnnnnnnnnnnnnnnntcttttcacaatacaaatctttattaactgaaggcacggggctcaccacaatccttcggatggaaccacaggaagagaagaagcatgtttcaccctgggctgggggtgcttcccaaagccactggggcccttttcccaagccccagaactgagcccacctgaactcatcttgaaggtaggtatgtcagtgagtcctcccaaagcctcagtttccctatctataaaatgaggaagcaggactgcccctagggcaaggcctaggcctcctgccagcccaccctcacagacccagagggcaacgcagggtgaggcggggcagtttcactccccagtgctgtggcccccttggttgagtgaaagcacctccagagccctaaccctagccctgggagccaggcaagagacccccacaacgaccatcagaggtcgtgaggggtggcagggagcctggcagggagccaggcaggggccagggtctaggctcagagcagtgaaggatagatagggtcacatgccagttagtggcagaggtgggacttgaacccaggcctctgtgagacttggttctctcacctgtaaaatgggtctactagcagctgcttctccaagcaaatgatgtcaagcacccagctcggcacctcacagatgtggtcagtaaatggtaatcccaaccctacccttatatgtggactagaacacttatggcaagtctcgggaggtcatgggaactcctcatggctccttcttcatgctggaggaccacggcctgccccatcccaccccaacacactcttgaaactgaggccctcggcctagagcagctcacacagacgtggacagctgtgctagcaggtgcagagtctgggaggcgaggctggaccagggccccagctgggcttcgggtaaccacaggcctcaactgtccagttggccagagggacctatcacctggctctgggccccaggatgctttagccacttgagccggctcccaggtgaccgtgtaagtgacataaagcaaaggtgtcctggactgcaccactcactagctcagcaccccaggcaccaggctggaaaccacatctcgcacccaattctccatttaaaaattttacnnnnnnnnnnnnnnnnnnnnnnnnnnnnnnnnnnnnnnnnnnnnnnnnnnnnnnnnnnnnnnnnnnnnnnnnnnnnnnnnnnnnnnnnnnnnnnnnnnnnnnnnnnnnnnnnnnnnnnnnnnnnnnnnnnnnnnnnnnnnnnnnnnnnnnnnnnnnnnnnnnnnnnnnnnnnnnnnnnnnnnnnnnnnnnnnnnnnnnnnnnnnnnnnnnnnnnnnnnnnnnnnnnnnnnnnnnnnnnnnnnnnnnnnnnnnnnnnnnnnnnnnnnnnnnnnnnnnnnnnnnnnnnnnnnnnnnnnnnnnnnnnnnnnnnnnnnnnttttacaggaagagaaactatggccacagtggggagtggcatgactccctaagcaagttcaggtcagacagggcaaagaattctgactgcagggaggaggaatggctggttttccagagatagatcagaacaacagaagctccctgtgctccagcctcggctgtggtgcactgacctctcaccccaggcaggctgaagaggaaacccctgcagaggtggccttggacacctggttcctggaagcagctggctgccgtcatctgcagggcctgcagttccaccgcaccctatggccccctggggtcacagcctcccacatccgctaaccagcctcatcatttgtttccgccagcaaaccacaggtccccagaacacacccaggggaagggggctgcaggaccttctcccccagtcagtcactgtcagtgggcccaagtgctgacctcagtttaggtttccctgacataaggtgctaagaaaaatcacaaggattctagggtccctgccagcccctacctccctgagtctgtttcattaaaaatccagcctggaaggtgtgccagggagagtgacctgctggaactccatggcagaaagtaaggggatggattggggctgggcctgagccaggtattgcctggaagacttgggcatctgggtaccaccgtccctacgcacccttggcctgcttagggtccactgttcccatcccatcgtagctgttacttcctccaaaaaatcttccgggagcccccagtccctgcacacccagctgccctggacactgtgccgtaagcacctcatacccagctgtccccagactgggctgtgaactcagccaggccagaggcccctgtctggaatgggaccaggcatgcaggaggtacccaataactgctcgctaatgcagggaatgaagcagctgtagctgcagggccttctagctctgtagcccgctcagtgtatgcaagttctggaacggggacagccactcaggaggtacccagtaaccaggcactaatgcagggaatgaagcagctgtagctgcagggccttctagctctgcagcagcactgccctggcctgacctgaggcagcagaactggtgagtggggtgtgggctcccagcccagactgcccaagtttgggtcctgatctgttactcgctgtgcaccctggggaagtcactcagtgacctgcaccctggaagacaagacaaccaactgttggggttcccgggtactgctgcggtcaccacttagacatcagcatgggcacccagtaagctggtaatcccctccttcccaatcaagccccagccaccaaggcaaagctcactgctgctttattggaggcaacagcccctactggagcctgtgtcttagcgttcctgggggtcccagggccagccccggcccccacccagctgccctggccctgcctggctcccagcccacttaggggtgagtgtgatggggggaccagtgttcctgtccttggagcccaggcacagcttggtcctgggtttctgggattgggacagggcaagttagtgtggggcaacagagtcccttcgtcctctggagcctggcgcctggttcagccctagaacccaacctgctggatgagactggctgggtcctacgagatgtccatcacagaggccctaggcaagcacagccttgctcctgctcaccctcccatgtgggcccatgtccgtctgtgtggcctggggtcagggcccctgtgactgccttggcctggcagccacatggactgccatcacctaggcccagtgtagccgtaggggtgccgcagcagcaggctctggtggctgggcagcacgtgggtgtggtagtgctccaccatgctgcccacactcacaaacaggacctcgccctccaggtagaacttagagtccttctcaaaaatgcgatagttcctcactttgttagaggtttcgtcccacacaaccaggaccttccccgacttggtagaggagttccggatgcagtagagtccatcctggggctctccccgggggcttgtagccttgaacaacctttccacttcgcaggactccgtggtgttgacgaagaccgagttgggcagtggcaccttctcatagtcctcgtccgagtcgtccccgccagtgtcagcctgtgagggttgccggggcttttcaaaggagaagctcctgaaactctgcccatcgaggggtgatcgctggaggtgcgggagctgcggcttctctggcctgggcaggactgcgggccgcgccatggcctcaggcactggcagcttcagcgcaggaggccggggagccacggggggcacaaagagtccgggcatggctgcctcccttggggggtcctcttcagctatcttcaggaacttgggcttgttggctggcacaggtgggggctcagatgtgggtggtcctcggggggacaggtggaaggacttgagtttgtcacagtttctggaggtggcagtggccatgatggcagcactggaagtggagcaggccccgtggccaggggtccagggctccgggctggggctggcactctcccggaagcaagggggtttccggaggccgggtgcggtgggcatggtgctcagagggggatcgctcatccttcggggggtagcaggtaccctggggcaaggctcagcccgcctcgggcacagtgggtccctcttggagtcctcagcagccaggccaacatctgggaggccgtgcttagggggcgggggtggcagtaggggaccggggcccttggaggtaaaggagtgggcccggggcatgtcagagaaggctggcttcctgggcgtgggcactgggggtggtgggtaagccggtgggtgcatcagggcatcctcaagccttccgggctccggggagtcaggctccaggtaggagtcatcctcatcgtcgtgctcatagtcttcattgtccgtggggtacggggaaaggctgatatccacaggccgctcaactgcgccgtagaagctgtctgtgtccgagctggagtcgctggtgtccaagggcaggtctttcttttcgtggaagtggccaatctccctgcgcagcaaggccatccagctcttgcgctcctcctcagaggaggccgagaagaaccacgtgcggtgcttcttgctgatgtggatgatcttgaaggggaaaacgttgttggacgtggtctcctcagccgcccgcatcacccggttatagccactcagggagaaggcgccctgcggggaggcagaggtgctactcttgaagtagtagacgcagcgtttgtggatgatgacaaagcgcaggggccatttcagcagctgcagctgggtaccgcccttcttgtgcaggtagccagccttggccacgcccccaggcatggttagcaggttctgggcaccaatggccttcatagggacaggccaatgcatctcttcagccgccatgaagctatagtacccggaggaggcttatccaggaggatcgattgagccaggagttccaggaggcagtaagctatgattggccactgctctccagtctgggcaactgagctggagctaaaattaaaaaattaaaaacaaaataaataaaaagaaaaatactctctgcttttagcaaaccagcaccctccaacaaaagtgcaagaggaagtcttcaaggcatcaggctgtcttctgccggcctcggcctgggtcacccggctg

SEQ ID NO: 53705 - DNA, 558 bp, Homo sapiens
gacacaaaattcgagattattccttgtcaggggcctaccgaaagatcattattcgtcctcagaatgttagctgggaagtcgttgcatatgatgatcccaaaattccacttttcaacacagatgtggacaacctagaagggaagacaccaccagtttttgcttctgaaggcaaatacagggctctgaaaatggatttttctctacccccttctacttacgccaccatggccattcgagaagtgctaaaaatggataccagtatcaagaaccagacgcagctgaatacaacctgcgttcgctgagcagtaccttgtccacagattagaaaacgtacacaagtgtttgcttcctggctccctgtgcatttttgtcttagttcagactcatatatggatttcaaatctttgtaataaaaattatttgtatttttaagtttttattagcttaaagaaataatttgcaatatttgtacatgtacacaaatcctgaggttcttaattttagctcagaatataaattagtcaaaatacacttcaggtgcttaaatcagagtaaaat

SEQ ID NO: 53706 - DNA, 5643 bp, Homo sapiens
ataaatgacgtgccgagagagcgagcgaacgcgcagccgggagagcggagtctcctgcctcccgccccccacccctccagctcctgctcctcctccgctccccatacacagacgcgctcacacccgctccctcactcgaacacacagacacaagcgcgcacacaggctccgcacacacacttcgctctcccgcgcgctcacacccctcttgccctgagcccttgccggtgcagcgcggcgccgcagctggacgcccctcccgggctcactttgcaacgctgacggtgccggcagtggccgtggaggtgggaacagcggcggcatcctcccccctggtcacagcccaagccaggacgcccgcggaacctctcggctgtgctctcccatgagtcgggatcgcagcatcccccaccagccgctcaccgcctccgggagccgctgggcttgtacaccgcagcccttccgggacagcagctgtgactcccccccagtgcagatttcgggacagctctctagaaactcgctctaaagacggaaccgccacagcactcaaagcccactgcggaagagggcagcccggcaagcccgggccctgagcctggacccttagcggtgccgggcagcactgccggcgcttcgcctcgccggacgtccgctcctcctacactctcagcctccgctggagagacccccagccccaccattcagcgcgcaagataccctccagatatgccctgcgtccaagcccaatatagcccttcccctccaggttccagttatgcggcgcagacatacagctcggaatacaccacggagatcatgaaccccgactacaccaagctgaccatggaccttggcagcactgagatcacggctacagccaccacgtccctgcccagcatcagtaccttcgtggagggctactcgagcaactacgaactcaagccttcctgcgtgtaccaaatgcagcggcccttgatcaaagtggaggaggggcgggcgcccagctaccatcaccatcaccaccaccaccaccaccaccaccaccatcaccagcagcagcatcagcagccatccattcctccagcctccagcccggaggacgaggtgctgcccagcacctccatgtacttcaagcagtccccaccgtccacccccaccacgccggccttccccccgcaggcgggggcgttatgggacgaggcactgccctcggcgcccggctgcatcgcacccggcccgctgctggacccgccgatgaaggcggtccccacggtggccggcgcgcgcttcccgctcttccacttcaagccctcgccgccgcatccccccgcgcccagcccggccggcggccaccacctcggctacgacccgacggccgctgccgcgctcagcctgccgctgggagccgcagccgccgcgggcagccaggccgccgcgcttgagagccacccgtacgggctgccgctggccaagagggcggccccgctggccttcccgcctctcggcctcacgccctcccctaccgcgtccagcctgctgggcgagagtcccagcctgccgtcgccgcccagcaggagctcgtcgtctggcgagggcacgtgtgccgtgtgcggggacaacgccgcctgccagcactacggcgtgcgaacctgcgagggctgcaagggctttttcaagagaacagtgcagaaaaatgcaaaatatgtttgcctggcaaataaaaactgcccagtagacaagagacgtcgaaaccgatgtcagtactgtcgatttcagaagtgtctcagtgttggaatggtaaaagaagttgtccgtacagatagtctgaaagggaggagaggtcgtctgccttccaaaccaaagagcccattacaacaggaaccttctcagccctctccaccttctcctccaatctgcatgatgaatgctcttgtccgagctttaacagactcaacacccagagatcttgattattccagatactgtcccactgaccaggctgctgcaggcacagatgctgagcatgtgcaacaattctacaacctcctgacagcctccattgatgtatccagaagctgggcagaaaagattccgggatttactgatctccccaaagaagatcagacattacttattgaatcagcctttttggagctgtttgtcctcagactttccatcaggtcaaacactgctgaagataagtttgtgttctgcaatggacttgtcctgcatcgacttcagtgccttcgtggatttggggagtggctcgactctattaaagacttttccttaaatttgcagagcctgaaccttgatatccaagccttagcctgcctgtcagcactgagcatgatcacagaaagacatgggttaaaagaaccaaagagagtcgaagagctatgcaacaagatcacaagcagtttaaaagaccaccagagtaagggacaggctctggagcccaccgagtccaaggtcctgggtgccctggtagaactgaggaagatctgcaccctgggcctccagcgcatcttctacctgaagctggaagacttggtgtctccaccttccatcattgacaagctcttcctggacaccctacctttctaatcaggagcagtggagcagtgagctgcctcctctcctagcacctgcttgctacgcagcaaagggataggtttggaaacctatcatttcctgtccttccttaagaggaaaagcagctcctgtagaaagcaaagactttcttttttttctggctcttttccttacaacctaaagccagaaaacttgcagagtattgtgttggggttgtgttttatatttaggcattgggggatggggtgggagggggttatagttcatgagggttttctaagaaattgctaacaaagcacttttggacaatgctatcccagcaggaaaaaaaaggataatataactgttttaaaactctttctggggaatccaattatagttgctttgtatttaaaaacaagaacagccaagggttgttcgccagggtaggatgtgtcttaaagattggtcccttgaaaatatgcttcctgtatcaaaggtacgtatgtggtgcaaacaaggcagaaacttccttttaatttccttcttcctttattttaacaaatggtgaaagatggaggattacctacaaatcagacatggcaaaacaataatggctgtttgcttccataaacaagtgcaattttttaaagtgctgtcttactaagtcttgtttattaactctcctttattctatatggaaataaaaaggaggcagtcatgttagcaaatgacacgttaatatccctagcagaggctgtgttcaccttccctgtcgatcccttctgaggtatggcccatccaagacttttaggccattcttgatggaaccagatccctgccctgactgtccagctatcctgaaagtggatcagattataaactggattacatgtaactgttttggttgtgttctatcaaccccaccagagttccctaaacttgcttcagttatagtaactgactggtatattcattcagaagcgccataagtcagttgagtatttgatccctagataagaacatgcaaatcagcaggaactggtcatacagggtaagcaccagggacaataaggatttttatagatataatttaatttttggtaattgggttaaggagaccaattttggagagcaagcaaatcttctttttaaaaaatagtatgaatgtgaatactagaaaagatttaagaaatagtatgagtgtgagtactaggaaggattagtgggctgcgtttcaacattccgtgttcgtactcccttttgtatgtttctactgttaatgccatattactatgagataatttgttgcatagtgtccttatttgtataaacatttgtatgcacgttatattgtaatagctttgcctgtatttattgcaagaccaccagctcctgggaagctgagttacagagtaattaaatggggtgttcacagtgacttggatacaccaattagaaattaaataagcaaatatatatatatatatataaatatagcaggttacatatatatatttataatgtgtctttttattaaccatttgtacaataaatgtcacttcccatgccgttattttatggttcatttgcagtgacttttaaggcagtactgtttagcactttgatattaaaattttgcttatgttttgctaaattcgaataatgtttgaagatttttaggtctaaaagtctttatattatatacgctgtatcaagtcaaaatatctttggccattttgctaagaaacaaactttgaatgtcaaactgatgtcacagtagtttttgttagctttaaatcatttttgctttagtctttttaaaggaaaataacaaaactatgctgtttatattgcattaattatacaatcaaacaaatgccaaatgaattgcctaattgcgcaagataacccagataggaaatcatatgtttttttccaagagtcattctaatatttgattatgttatgtgtgcttttatgaaagattgttatttttatatatcaagatgatagaacctggaatgttaggattttgaaatgttagacttggaaggggcctggtctgtcaactagtccaaccccttaaaattcatagaggagcaaactggggcccattgaagggtgaagagttactcaaggtcaaacagctggtaacagaatcaagactaagacctaatttacctttccatactctttttttttctcaacttcatctatataaaatcaggcttttaaacataaccactaatatttacctgaagataaccatgagtaaagtatacttttgcattaattttttgagcttatatgcaaacataataaatattattaaatatcaggaaagctaacatttcatacaagatagcttcagaccaaattcaaattgaatttgaataaattagaaatactgtgcatacataaccttcttgtgcaccatgagtatttggaaagttaatccttgtttttgtcgtgtctataaaggaagaacaaaacaaaataaaaacagagccctagagaaatgctgttactttttatttttacacccatcagatttaaggaaaagactttttagccattataatctagtggttggaaggaatgaagaagcttttttagtaataggtccagatatgagtgctaaaaataaagatgatagcatgttcttctgtcttccatagttattacaactatgagagcctcccaagtcatcttatcaactcaactcccttttttttgtcttaatgttgcacataagtttatacagagtggatgaccacactagcacagaagagaacaacatgtattaaagcaggtgattcctccccttggcgggagagctctctcagtgtgaacatgccttctgtgggcggaaatcaggaagccaccagctgttaatggagagtgccttgcttttatttcagacagcagagttttccaaagtttctctgctcctctaacagcattgctctttagtgtgtgttaacctgtggtttgaaagaaatgctcttgtacattaacaatgtaaatttaaatgattaaattacattttatcaatggcagaaa

SEQ ID NO: 53707 - DNA, 304 bp, Homo sapiens
gctggcttaaattcttgtactctctgatggtcttcccctttggaagatcttaacaattatcactgccttaggagctctgatcttccttttaacttctgacccaaggatggacacttactttttcctcttaagcttaagactttatcaaggataataactggaattaaaatagagaaaaaaattagctagctcaccagatattctgaaaacactgttcctgagaaacccttatacgtttttataggttgacgtcttccttggtctataatttccatgggacaaagacatttctctacctgggagt

SEQ ID NO: 53708 - DNA, 802 bp, Homo sapiens
atttttttttttgaaagggctcacaatgattgtactttattgatgtgttacaggaggtaaggactttctgcttaaaatatttaaaatttacatgtgcacacaaacaaacacaggttcccccacccatggggaagggcgagatgactctgaataaaggatggaggagaagaagagggtgtagacggagggcccttgacccctacaggggcagcaggataaggaatagagtggggcagaaggtgggttattaagaagcatcttgcttactgacatgaagccacgtgcccagcgagagcacagatgaggcctcattggcgtagaggaggcccttggagggcaggcacacggtgcccaactagccagccaaggccaacgtcccaggggtagggcggaagtggggtggcgtgcacagggcacccagcccaggcctctgctgcccccacctccctccccaccctctgagagaaaagacggtttgggcctcagccacggaccgacgccgttaccggcagcgtctcctgaaactacagagatacaatgtgtatcaacagggtgatcgcttctgacccactgaggcagacagctagaggtgctgcatgggccagaaccaatcctacagtatctttggtttgtgggtttccttcccgacttgaatcctccctctgtccagcctctggggtgggcctcagggctgggaatgggctgctcaatggcccaaagcccacgtgacggcccttggaggctgggggtgctgcccttgccaccacaggcagcttactcacttggggtgcttgggacttgt

SEQ ID NO: 53709 - DNA, 1782 bp, Homo sapiens
attgttaggctagaaaaagattacacttcataaaaccatgtttattcaaaaaaatctattcagaaagtctggaaagcgtaataaatatctgtacagtggccacccatctcaaacatgaattacaaagcaggaacataaaaatgatgtgtaaacataactgctgagccagtgaacaaagtgctgagtcaggagcgaggcagagaagcgtgctcagtagaacgacacagatgctgcggcctccgtcctcagcccctcaaggctgcgctggagtccaccttccgccctctccacaccgctcagggaccggcagcgtccttctccattctcgaatttgcatgacgcttagaaaggtaggaggcagcaaaacgtgtcagaaatgaacggagtgcaaaatcaaactttgccatgtgcttgagagaatcagtaaagcgttaggtaaaaatcccaagtgcagctttaggataacaccatttaatgaacaatactggataacattaagtactattatcactttaaaattcaaacaatcttccaaacatcaatacatacacagttagtttaaaatcacagacaaatcggacttgagggtaaaagtgaaatcctcacctcttgcccatgtttgactttgggatggaattcagcaaagctctcccactgcagattgggagaatcaggtatttctcccacatggggggctgccagggaaggaggaccctatagggtggccagcaaggggccactggcggtaggtcaggaagcctgagatctagggttcaatgtgtttataagttctgtgattttcatgacccgggggtggggggttgggttatgatgaactgtgtgaggaaggagagccagttaacttttggggaggtctatgtcatttgtgcaaatcatacggagcatttcattcgttgtggaggtgcgctgagctggcaaaatgcgaattctaagaacaccttcatttacatgtcgactgctgcttgaaagcagtcacttgctatttcactaaggtttttgaaagcttagtttaacatatgataccataacttctttaggctgacttttgtggaaggatgtcaagtatcattttgttctggatatgggagggaaagtagaggtatttcacagacactcagcggagcagggccaagccagtgttctcctccgctgatgcacatcaaatacatgtaaggacagagctcgctgtgatggggagtctcgtcggtccctttggcattcttagagttcagaagctaagtctgtacaaactgggatgactgaaaaagaccatgagctgtcgccccatgggcacacaaggagggaaaaccgtggccgctttctcacggatgctttccctttcacttcccccacttctcactccctgcaccagaacccactgactttaagcaaacagacaggcctgcacaccaagccaggccaaagggtccgggcagctgatgggggaatcgttgcctgtgtagcaagcagaaaaggtgatgacttttgttcatttctgggaggacagattgtgtgacctcaggattatccacttcttcctaagtttctaaaaagaagtgaaataattaagacctaaaaagcaaattcatcatggtggaagtcgttctagccttgggaaaaagcatcttctatggagaaaatgtgaggaataccctgtgggcactatggaaacaggtattcagtccgacttgctccttttatgttttgtggttctctaagaaaaaaaaatccacatggattaaagcttgtgaaacaagtttc

SEQ ID NO: 53710 - DNA, 543 bp, Homo sapiens
ggttctcaaggttgcctgggccttgggatcacggggagagcccccagagctagtccactggactccctgagggtgggactcaggcataaggatttttaaagcctccttaagtgaatctaacatgcagctgatccactccaaccccttctttaaggaggtgctttcgccaaagcagttgggactgaaactctttattcggtgcttattcaagtaggccctgcccttagaaccatctactggggctctcaatgggcctccccttgaatggctgaaggtttggaatctgccagtctaattgtattccactggaagaagcacattctggaggaaagcatgacttgggtaacgtggcccctcttggggcgattttcttttctgcaggtcacctcatcatctcaaggaggagcattcccctgggctaaggcactggggccgaactctaggagaccctaacctgtgggctgcagatcctttgggggccagaaacccaaactcacaccaagctctgtctaaggactcaatacatattatttcactcatctc

SEQ ID NO: 53711 - DNA, 424 bp, Homo sapiens
agacaacaggactgaacagggagccaactgttctttgacagtaaatcaggaacaccaatggaccaaaatgaacacagtcactggggaccacatgcaaagggccaatgtgccagcagatctgagctgagaatcatcctggtgggcaaaacaggaactggcaaaagtgctgcagggaacagcatcctcaggaagcaagcatttgaatcgaagctgggttcccagaccttgactaagacttgcagcaaaagtcagggaagctggggaaatagagagattttcattattgacacaccagatatgttttcttggaaggaccactgtgaagctctgtacaaagaggtgcagaggtgctacttgctgtctgcaccaggaccccatgtgctgctcctggtgactcagctgggccgctatacctcacaggacc

SEQ ID NO: 53712 - DNA, 362 bp, Homo sapiens
tttctgttatctatgagttcagcctgcatatcaatttattaaagttgtggagaattaaaggttgtctccaagcaaagtaagtagtacagacaaaccactgcctcaaaagaaacccaatgacagtgaattcctttttcatcactgcaagtcacactaacttacaactgcttgaaaacaaggctgtgcccaactactacccaactatcagttggacaatatcaagcatccaactaattaaaaataaagatctcattagtgtatatatgtatgtattttctatttttagtctccagtatatatgtgttgttatatatatatacacacatgtacattaatatatatacagacacacacacactgtg

SEQ ID NO: 53713 - DNA, 1852 bp, Homo sapiens
ttttttttttttttacctgagaatgtgactttatttggaactagagtatttgcaggtttaattaataaggatcaagataagatcacacaggattagggtgggccctaaatccaatgactgttgttaaaagaggagagaacagaagagacagagactggagtgatgcagcaataagctggggaatgccacggactgcccactgccgccacaagctaaaaagagccaaggaaggattcttccccagagccttcaaagggaccacagccctgccaacacctccatcccagatttccagcctccagaactgtaagggaatcaagttctggctggtttcaatccaccaggtttgtggtaattcgttagagcatccctaggaaaccaacacagcatcactgccataggcccccgggcctggctcagcgcccactcagccccactctggcgggaaggaaagggccccacctgcaggcgattctccagatgggcagtttaacgtggcctgttaggatcagagctagtttctcccaaccgacatctttgaattctgcatctactaggcccatttcccacataaggagaaggacccttctgtcctctgcttgaaaggctgtattccaagaagggctgagtttggtagtgacaaatactggtccttgggcagtgtctggccggcggtgccatgcaagatgagtccctacagcttcatgccactccggcgccgtgagtccttccgggcaatggggctgaagttcacaatctccttgtagatgtgctgcttccattcatccactgtgagtttctcgtgttctaaggaatcatcaaacggctgctgggcctccgtctcttcctcagggtcccggaagggttcaaagaagggatgggtgagggcctgcgcggccgtcaggcgcttgtccacgtctagctccagcatcttctccagcaggtccgcagcctgggggctggcccgtgggaacagctgagtgaaatccttcctgggggtctgtggcagggactggatgtaggatttggccgctttgtcgttcagcttctgcacaaactccgtgccaggcaccccggtcactttcaggatctgggtcagctggtccaggtaatctttccccttgaacagagttttccctgtcagcatctctgccatgatacagcccacagaccagatgtccactgtctggttgtagtgcatccagctgaggatcacctcgggggctcggtaccagcgggtcaccacgtagccagtcatctcggcgtctgcatgtcgcgccagcccaaaatccagaatcttcagttcacagtcctcattcacagccaggttgcctggcttcaggtccctgtgcacgaccccagcagagtggatgtacttaaggcctttgagcatctgatacaccaggtactggatcttctcctcactgaactccatccccatgatcttctgcagatccgtctgcatgaagggcatcaccaggtagaagtcatagaagttgcgcagggaggaggctggggtgaagacatccaggagcccaatgacgttctcatgctgcatgtgcttcagcagcagcagctcccggtaggcgcgcttggcgaagatctcggactgaaagggtcggctcagcttcttgatggccaccttctcccctgaccgcttgtcgatggccgagcacacggagccataggccccgctgccgacgtgcgtcggggacacgtaggtcttgggcagctcccaggcggtcttgttgacgtcctgcttgtagaagccctttttccggatgaggctcatcccgggcacccgatctcggcgaagatccgggtaccatgggggcttcacactgaacgatgc

SEQ ID NO: 53714 - DNA, 1001 bp, Homo sapiens
ttttttttttttttaatttttttagtttgtcaacatgtaatgccctgggtttattttgtgagaattctatcacaatttttccaggtgggattaaaaaccttaaggataatgtatgccattggactgggcattcagacttcggtactgacaaagcactagtagtagtctgttaagtaccattctcttcacagaagagaggtcaaatatttccaaaggaaggcacccgatatttgtggttctggccttgcagccttctggagaatcttaaaaggaaaaaagctggctggctgtttttagaaactggaatgatgatacacgtacagcaattactgcattcttctcccttatatccttttcgtaagaacaagtaaagaatgaagtcttttaaacaattcgacaataaaaaagtacaattttttttgtgctaaaaaaagggcaagacaacataaactccagttgtaaggactccatttgcatacttgatttaacactttttggtgtggaaggaaatgggactactgggctgttcgcagagcagcaacataatattagtgctttaagtaccagaaaccacccacagctttgtgggcaagttggggatggaaagattcaagagacttcatttttagcttgttacttgtcctaatgatagtagaccaggaagatccccatttaatagtacattccccatttttaaaaaaactgatgcctttttttttttttgtaaaattctgtatgtatgtcaccattttttttcacatgatacacagaaaactcaaggacccagaggggaaccaagttatgttataccatttacaaaataccaaggagtccacagctacctaacacatttactacagcacaggaaccaatgaaggtacagtgtacaaaaaactgtaaacacggcacaataaatagataaaacagcaggttccgcaccatgcacatgatgtgatgacacttcatctctatacaatctcacatctcacactctttgttgc

SEQ ID NO: 53715 - DNA, 1328 bp, Homo sapiens
ttttttttagaaaccaaggctttctttgtgtccaagtcaaaccgcccgtctgtctctccctccccaaaggggccaaaggtccctgcctagagcacaacgtggggctgcaacggcttctgctgccacaatcatccatcctcggccaactcgatcttgggagagggcttcctgcccgccccatcctgtgctttggcgtaggccatcactgaagactttctatttctccattagttcattcatcttggtagctagactcatgacggagctgctgccaccccagcagatctgctcggccttgcctgcttcttcacggtctccacggccttcgcagaggtgtcagcaactgccatgaccacttgcagcagttggctgtaggaagtcagattctggtgcgtggcctggatgatggggccgcacgggtggaggtcagggcctgggcgctggcagcactcgcccagctcgtcgtcgtagacttggaaaaaagccaagattagctggtggaagtcggaagtgaccagacgcagcttctggtctagggtgctgatggtcgtgcgcccgcagcggccccttgctcatgctgtgcaaagtactccgttctaagcgcgtgcaacttggcagcactctcctgcagctgcctggcaagctccgccagcttctcctcctcctcggacttggcagaggcactggcccactgccagtcatcactctgcttgttgaggaggggctgcatgtccaggggccacgggtcgcactctggattcaggagcatctgcaggtgggggctagagaagagctcccccagcaaggcctcgttcttctccctggtgtcctcgaagtgctccatcaggctcgagcaactggagcacccaatggtcaggcctccggatggtatcgagcaactggtccatgaagtgtagctgcttctgggcgcaggcacagcccttgaggagctcctggtcatctggcgcacacagcatcagctcgtggcccagcttcgtcatttcttggatcttcacctctgttgggacccctttcagtgagctgaacctgtcctgcagtgagggccagacccgggtacacatccactctaggatctccaagcggtactctgaggggctgcacagcagttcctgaattgtctttggctctgtgatatacagaccctcgaggaaggggcagtttaggtccttcagcttcccgaacacctccacagccgccctggacacgctgctgtcgccttcgtcctctgagtagtcgtcgccgccacggccgcagccagcgtcctgccccgccatgtttcgcgccctcgtgccaagcttggcacgagg

SEQ ID NO: 53716 - DNA, 741 bp, Homo sapiens
ttttttttttgtttcaaccacaagtatttattgatggatcgaagatacaattttaatggaacaataaggcacaaccgtggattaaaacactttgctatacagccaaaaggggggaaaatctataaccttaggaactttatgccaatcaagaagcctctaaagtacctctctaatagatcagtatcagacattcttcccttttacataattcctatattacatcacttaatcataaaatctgactgatacttcataaagaattcctcattcatttatatttgagccatccagcctggctactcccctgttctccacccttttccatcactttgcagtggtattttttagcaatcttcaatagttttccaaagcaaggaaacaagcaagcaagcaatgagtcagaaagtcaaccaagggcagatgtgtggctaaatacactcatagagacatacattaggatagcaatagcctgattcactgaagtctaaactaagctgacttggcagaaaagttgctgtggctcgctcaaagatctgtaatgccaccttaggttgtgctactagtgccagacctcttgtttttaagggattagcagtggtctaaacaagaagccagggagctaatgtaaccaggcagctaatgacacaacagtcaatgctttggacatgtattaggagcagactatggcttccgtcattaacatttgccaagtgtaaaattcataaagaattttgcggctga

SEQ ID NO: 53717 - DNA, 944 bp, Homo sapiens
tcggcgcaggtttccgcagctgagggggcagctccgcgcaggcgtccggggtctccagtagggctgacgctccggtgctcgcacaatcccccgcctcggctggcaacgggcgtccctccactccccgagtccccggcagccgccccaccccagcgcgccccgatctggccccctgccccgcgaagatggctgccgtacgccgggcccgcagttattgccgctgcctggtgcgcttctccgaccgagaactctgctaagctccgctgcagagacaggcaggagtagacacccggacacccagcacccctcctccggggggcggtgcagagggggcacggagagcccctcgagcgcagcaggccgccccgccagcatggcagaagctgaggaagattgtcattctgatactgtcagagcagatgatgatgaagaaaatgaaagtcctgctgaaacagatctgcaggcacaactccagatgttccgagctcagtggatgtttgaacttgctccaggtgtaagctctagcaatttagaaaatcgaccttgcagagcagcaagaggctctctccagaaaacatcggcagataccaaaggaaaacaagaacaggcaaaagaagaaaagttaagtattatagatattgtaacaaattacattttttttttttggcacatggaaattttcactggacacagtaagtaggcattataaccagactttcgggacataaacacatatcttgtaaaataaaaattttgactagtatactagtttatatatttctcacaatttcttctaggtactttggatggtaccactactcctgcatggcttttttctctgtgggtacactgtcttcattgagctgtcttttgttaatttatagacctctgggattcatgtggttcctaaaagattggtgtctctgaatttattaacagaacca

SEQ ID NO: 53718 - DNA, 858 bp, Homo sapiens
acacacacacacacacacacatttaataacttaggtgctcttttgcgctatatactttaattcatgcaaaagtgatagaggactggacttgaggctctacagaggcctttctgagaaagctgtgtagctccttactctggcgaagaacaagggggtgtacatcttgtcaatctcaaaagcactgactgcagtctcaccagttgatttgtaagtaatgtgacaagaatgatgtatccagatgagtttgttgaacctctggtgaccactggaacatagctgtagccccacatgaaaactctgatctgcttcttgtacagggacacgacgaaaatatctgtatttatagtcaagtggtttttcttcttttttcttagttattacagcaaatacttttggtctgattgtctgtgtcttgtgacaagcgatagtgacccagtagaattgcatcagtcctggtattcctagttcttaaacgtggaacaatggactgaggctcttcaggggttgtcaacatcatcacatggccatcaggaaagaatcttatgtacctgtaatattccacttggtgccaggctctatagaaaccatcaagagactgttccccttgacgaatatatgtggttttactgatatacacgccatcaaaccgaacacgaggccgttctaaaaacatctctctccaggacgtgtacggaacaagtttaatacagcttctgcccccaaactttcaagcaggccagacgccatatttcagggtctctggcacagatgtagaatcctctgcacaccagcgacaactgctccaatgatctgaggtccaagtcactagacaccacccatcggaagatgtacatcagg

SEQ ID NO: 53719 - DNA, 702 bp, Homo sapiens
gcggcgtggaggggccgccggtggccacgttggtgtcaacctccttcgtgaagctcacacctcccccgccccggtaggggtttgcccgccactgtcgttgaatgattgcatcatcgaaagcagaaaaccacttttgcatccttcggcctctggcgtgcctgccatgacgtcatagctctgcggaggtggaagttggggagctttgaggacctcatggatcccagggggaccaagagaggagctgagaagacagaggtagctgagcctcggaacaaactacctcgtccagcaccttctctgcccacagaccctgccctctactctgggccctttcctttctaccggcgcccttcggaactgggctgcttctccctggatgctcaacgccagtaccatggagatgcccgagccctgcgctactatagcccaccccccactaacggtccaggccccaactttgacctcagagacggatacccggatcgataccagccccgggacgaggaggtccaggaaaggctggaccacctgctgtgctggctcctggaacaccgaggccggttggaggggggtccaaagctggctggcagaggccatagtgacgtggcggggcacctgacaaaactgctgacgacaccgtatgagcggcaggagggctggcagctggcagcctcccggttccagggaacactatacctgagt

SEQ ID NO: 53720 - DNA, 607 bp, Homo sapiens
cggagccatggcggcggcactgaagtgtctactgacattaggaagatggtgccccggccttggagtggctccccaggcccgggcgctcgccgccttagtacccggagtgacccaggtagataacaagtccggtttcctgcagaagaggcctcatcgccagcaccctggcatcctaaagctgccgcacgtgcggctgcccacaggcactggctaacggtgcccagttattgctacttggggagcgctgggcccactatggagaatcaggtgcaaacactgaccagttattctcttggagcagacattttgcctgttagaagccagaggaagttgccaaagacgggctaggcatctttgagaaaaaattcctggaaaacccagacttatctcagacagaggagaaacttcgtggagcagtgctacacgcactacgtaaaactacctaccattggcaagaactgagagttgatgaggatgtgtaacaagtattttcttctatcgtgcctgccagggctgaagctgcctggtatccaggaggggaatgctggtatccccatatgtctgtgtttgtttgagatttttaataataaataataaatttttgaag

SEQ ID NO: 53721 - DNA, 315 bp, Homo sapiens
  misc_feature (1)...(315): n = a,t,c or g
aaataacatttagtaacatttagataacatgcttaggtggtataatatacaagcaaatctaatcagtaacatgtattatgcatgtgacattctagctaaaaatatcctaccatcaaaatacattacaggccgggtgtggttgctcacacctgtaatcctaactcttcagaagcccagggtgagcagatagnnnnnnnnnnnnnnnnnnnnnnnnnnnnnnnnnnnnnnnnnnnnnnnnnnnnnnnnnnnnnnnnnnnnnnnnnnnnnnnnnnnnnnnnnnnggtagtcccagctactcagatggctgaggtggga

SEQ ID NO: 53722 - DNA, 362 bp, Homo sapiens
gggaagctgtagacccctggtctccttttgggatctctcctgctacagttgttaaggtttttgatgagaagtactttctggtggaaatggatgacttgcgtcctgagaaccacgcacggcgatcctttgtgtgccacgccgacagtcctggcatcttccctgtgcagtggagtctgaagaatggcctacacatcagcccccctccaggctacccaagccaggactttgactgggctgactacctcaaacagtgtggtgctgaagctgctccccagaggtgcttccctccgttaatttctgaacatgaatttaaggagaacatgaagctcgaggcggtgaaccccattctccctgaagaagtg

SEQ ID NO: 53723 - DNA, 477 bp, Homo sapiens
aacaagaagaaccaggatttgaagtcatcacaagaattgatttgggggaacgccctgttgttcaaaggagagaaccggtatcactggaagaatggactaagaacattgattctgaaggaagaattttaaatgtagataatatgaagcagatgatatttagagggggacttagtcatgcattgagaaagcaagcatggaaatttcttctgggttattttccctgggacagtaccaaggaggaaagaacccaattacaaaagcaaaaaactgatgaatacttcagaatgaaactgcagtggaaatccatcagccaggaacaagagaaaagaaattcgaggttaagagattatagaagtcttatcgaaaaagatgttaacagaacagatcgaacaaacaagttttatgaaggccaagataatccagggttgattttacttcatgacattttgatgacctactgtatgtatgattttgatt

SEQ ID NO: 53724 - DNA, 1118 bp, Homo sapiens
gcaactgcagagctgcttggagagctaagctggaagggtgcttatccctgcgtagaaacgcctgccaatgctttctcatttggacccagactccagatcgggagcagtcttatagctggatcagctaccaagagaagttctaaaccaagaagagaaaagcatttcaatttgggacatttatttgcacctggaaatggggaatgggctgtcagaccagacttctatcctgtccaacctgccttcatttcagtctttccacattgttattctgggtttggactgtgctggaaagacaactgtcttatacaggctgcagttcaatgaatttgtaaataccgtacctaccaaaggatttaacactgagaaaattaaggtaaccttgggaaattctaaaacagtcacttttcacttctgggatgtaggtggtcaggagaaattaaggccactgtggaagtcatataccagatgcacagatggcattgtatttgttgtggactctgttgatgtcgaaaggatggaagaagccaaaactgaacttcacaaaataactaggatatcagaaaatcagggagtccctgtacttatagttgctaacaaacaagatttgaggaactcattgtcactttcagaaattgagaaattgttagcaatgggtgaactgagctcatcaactccttggcatttgcagcctacctgtgcaatcataggagatggcctaaaggaaggacttgagaaactacatgatatgatcattaaaagaagaaaaatgttgcggcaacagaaaaagaaaagatgaatatcaatacctattatatctgtgtggagtaggttttctctggtctgattttgacaaatagaagagtgtctacagcgtggtttgcctgtctgccctcctggatgctattaaagctttgttttgttgaacaatcagatgcccaactctgttgccttgtggaagatgagtaaatgcagtgcttcttaaagtggtctcttctccctaccccacaaatcttttggtactaccatttggggaagccaagcaaggatagtaaattgaccagaacacagttgtgggaatttggtctgaagttagtgaaataaaactttaaagagtgaaa

SEQ ID NO: 53725 - DNA, 1326 bp, Homo sapiens
tttttttttataaaatcgggtttcagatgagatgtttatcttagactattttcttttagggaaaaattttacatgtttgagatggtggagtaaaaagactgttcaacatttcttttaaaaaattatttttacattacaacaatatatttatgatgtgttcagatcaaaaatttaacttctgtgtcccagatctactttcaaagtgagattttcacttgtcagcttaaatttctgactagaactaacgtttgtgtatttttgtgcttagtcggaatacaaatttcacagtggatttttgaagtttgtccttaaattggataaaatcaagtgattaaagttactaaagagataaaaatggtaatttccatttttaaaagtaatttggttgtgtttatagttatttgtacaagtatttatcacagactctaaattgaaaaatatagtatgatctatatttgaccctaaaaatgttgcattaatttaacaaatatggcagatttttcataactaagtcttaagtcttctaaaaggaagctgttacccttctgtttttaattacattaattgaaatgtgttttaagagatacaatttcagcatattttatatattaaaaaacaaaaaaggattagtattgagccagtggccaaaaggtaatattactaccatgtagactgttatagttcaaattgtcccacttcacccagaattttagaaactagaagtctgggaggtactatatcagctgtagttgggtaattccaagtgctgatagtactattcatcttttttattattgtgtcagatgaaacaaatgccaagttgcaaaatatgcagatttttattatataatggttttaggcataaattattaacaagccatgccttatgtgtttcatcttatatttttctttagaactaaactataacagattttggaaaatgatttgacgtgcttgctcacttgattgacttggtcagatatttgaatgatggtattacctagattctaatccttgattctagttatataataaataatatagaatatgaaaatatgtttgggcatttactgtttatattatgtagtagcctccatcatgacacacttactacatttatgaattgagcagttctgtaattgtaattattattgctgttcatgtaacaaaacatgcttatgataatagcaaacaaatagaaatgcccccaaaatgctatttttttaattcagttataactgttactcttgtagttgtgtatgacgcaataaaatttgtaaaaaaatttcagcatgaaaaataaaatttgtatcacttaaaaaaaaa

SEQ ID NO: 53726 - DNA, 3117 bp, Homo sapiens
cagggggagaactctgcagaggagaggcaaagttcaacaggacaacaaagaagcagcagaaacagccaggaaaacgaagagcccccaggttttgacacagaaccctccaccagagttctcaaatccccaaatactctgcaaagtgcaacttgacgggaacttttcaactgacttttacttttgacgaccaccatgactgagatcactgctgaaggaaatgcatctacaaccacaactgtgatagacagcaaaaatggatctgtgcccaaatcccccggaaaagtgctgaagaggacagtcacagaagacatagtgacgacgttcagctcccctgcagcctggcttctggtcattgccctgataatcacgtggtcagctgttgccatcgttatgtttgatttagtggattacaaaaacttttcagcaagctctattgccaagattggctcagatcctttaaaactggtacgtgatgctatggaggaaaccacggactggatctatggcttcttttctttgttatctgacatcatctcatctgaagatgaagaagatgatgatggtgacgaagatactgataaaggagaaatagatgagcctcccttgagaaaaaaagaaatacacaaagataagactgaaaaacaagagaaacctgaaaggaaaatacaaactaaagttacacacaaagaaaaagaaaaaggaaaagaaaaagtaagagaaaaagaaaaacctgaaaagaaagcaactcacaaggaaaaaattgagaaaaaagaaaaaccagaaacaaagacagtggcgaaagaacagaagaaagctaagactgcagaaaagagtgaagaaaagactaaaaaggaagtgaaaggtggaaaacaggagaaagtgaagcaaacagctgcaaaagtaaaagaagtacagaaaacaccatcaaaacccaaagaaaaggaggacaaagagaaagcagctgtgtcaaagcatgaacagaaagatcagtatgcattctgtcgatatatgattgacatatttgtccatggggatttaaaaccaggacaaagcccagccattccacctcccttaccgacagaacaagcttccagacccactccggcatcacctgcccttgaagaaaaagaaggggaaaagaagaaggctgagaagaaagttacttctgaaacaaaaaagaaagaaaaagaagatatcaaaaagaaaagtgagaaggaaactgccattgatgtggaaaaaaaagagccgggaaaagcttctgaaaccaaacaagggactgtaaaaattgcagcacaagcagcagctaagaaggatgaaaagaaggaagattccaagaaaacaaaaaaacctgcagaagtagaacaacccaagggaaaaaagcaggaaaagaaagaaaaacatgtggaaccagcaaagtcaccaaagaaagaacactcagttccaagtgacaaacaagtaaaagcaaaaactgaacgagccaaagaggagattggtgcggtttcaagtaaaaaagctgtacctggaaagaaggaagagaaaacaaccaagacagtggagcaagaaattagaaaagaaaaatctgggaagacttcttcaattctgaaagataaagaacctattaaagggaaagaagagaaagttccagcttccctaaaggaaaaagaacctgaaactaaaaaagatgaaaagatgtccaaagcaggcaaagaagtcaagcctaaacctccacaactacaaggaaaaaaggaagagaagccagagccccaaattaaaaaagaagcaaaaccagctatatctgaaaaagtgcaaatacacaaacaagacatagtgaaaccagaaaagactgtttctcatggtaaaccagaagaaaaagttctcaagcaggtaaaagctgtcacaatagaaaaaacagccaagcccaaaccaacaaaaaaagctgaacatcgagaaagagaacctccatctataaaaacagacaaaccaaaaccaactccaaaaggaacatcagaagtcacagaatcaggaaagaagaaaactgaaatatctgaaaaagaaagtaaagaaaaagcagacatgaagcatcttagagaagaaaaagtctcaacaagaaaagaaagtcttcaattacacaatgtgacaaaagcagaaaaacctgcaagagtatcaaaagatgttgaagatgtaccagcttcaaagaaagctaaagaaggaactgaagatgtgtctcccacaaagcagaaaagtcccatcagtttcttccagtgtgtctacttggatgggtacaatggctatggatttcagtttcctttcactcctgcagaccgccctggagagagctctggtcaagcaaattctccaggacagaagcaacaaggacagtaaacacacatgtatgacccttacaagtgctttaagattttaaaaatgtgatgttttgtccacagtagttcaggcaattaagaatatgcaacccagagaatttctgtgaaaacattttgctctttggcctggtgtggacggaaagggtggccaaatggattgagtgatgagcagacatgtttaagggtctaagtctcaagaatctgttatgtgtgtttgctgcggtgggagggggtgcttgtatttatcttatttccagtcactataaggttgtacacaaactaatttaaagtttacttaataatggtatctttaaaataattgacacaattgcaaaatgaattcctggcttcagttagctattatttttttaatgacaacatagactgtgctctaagtttaaaagatggggaagcttatataaaagtgacccttttgcatcatatgggtatctaaacttaatttacccaataagttgatgcttaatgattttattttatttttgtctattttctattttagttgtggctttgctctaagaatgggtaatagttgtactacagactgctataaatttcttgtgatactcttttagagctcaaaatatctctgagctttagacatggtaaggtggagagtaaatgcttgataaatctttaagatatgtcttgaatgataattaggacattcagtccagtggaaatacaccattcaattagtcaggtctggtgaatttcc

SEQ ID NO: 53727 - DNA, 160 bp, Homo sapiens
cacctgggctggcctcagttgaaggatcatgcagtagatagaggggaggcagggagagcttgtgggaccttcagtgctgactttagccaccatttccattcctatacaggatgtgaaggtcagaaggcagccaattgttggtttaatttttttttttttt

SEQ ID NO: 53728 - DNA, 107 bp, Homo sapiens
gagaaataatacttgtgacacgattatcatttttaaaaaataaaaattaatgcataataattccatggcgaatacaaatcaaaattttaaattaaaaaaaaaaaaaa

SEQ ID NO: 53729 - DNA, 574 bp, Homo sapiens
cgcttgctgagtctcagcgccgccagattcttgctagcgaggtccagagcagtgcagagacctagcggacagttttccggtggcagcaatgctcatttcccggacacagatggtttttggcccctgaagaactctttaatccctgcgttttgtagcgctcgttctctgtaaggtttgcttagtgtcatttcatttcggtttcttttctcgccatgtttttctgtcggaattacggttcgttttggttctatgtactctctaaaatgttatcgtttttcatttgtctactaattttcgtgcatttgttactactgagtttcttaatatctgactggcctccgcccacgggctctgcagagcataaatactcaggctgatggtagtgcagagactctccctccttgatcagcgcaaacgttggtctgaggcttgagggatggagcaacattttcttggctgtgtgaagcgggcttgggattccgcagaggtggcgccagagccccagcctccacctattgtgagttcagaagatcgtgggccgtggcctcttcctttgtatccagtactaggagag

SEQ ID NO: 53730 - DNA, 421 bp, Homo sapiens
gcttgagtttctcaccattacttatgatgttaactatatgttttgttcgcagatgttcctaagtttaggaagttttcttattttgtcaaattctttttctgcatttattgatatgatcatgtgatttttcttctttaggctatgggtgtgatggattacattaatttgttttctaatgttgaaccaaccccacataccttagctaaatctcacttggccatggtgtataattcttttcatacgttatcggattcaatttgctgatattttgttaaggatttctgcatgtctgtccatgagagattggtctatagggtttattttccttgtaatgtctgttttgttttagtattagggtaattctagcctcattgaatgagttaggaagtattccctctgcttttatattctgaaagagatt

SEQ ID NO: 53731 - DNA, 455 bp, Homo sapiens
ctttaacacagcaccaggcccacggaaagtggctaatgttagctactatgaatggtgccagtgaagacactgaaaaataagtgatttcagtaaccttctggaaagctatcagtttcaaataatattttctctgtaatatgagatgaaattaaaagtggatagctttcaggaaagataaagagaacatgcttagaatgtaagctaaacagattttttctgttgctctttgaaaactatgagccctggccagcttaacctggtctgaggtgagactaaacacaaaaacagtagataaatctctccctaaaagatggattcccccacatacccatgctactagtttctccgtctattcacacatatgtacaaatacatgaacacagcctgtctgtgctcagacatagagaagtactacctgacttgagtcaatgcacccaagaagaaaagcttggagt

SEQ ID NO: 53732 - DNA, 431 bp, Homo sapiens
  misc_feature (1)...(431): n = a,t,c or g
ttngctttggannaccctctatgacatgcttacgaatttaatacgactcactatagggaatttggccctcgaggccaagaattcggcacgagaaacgatggaattactgcagagtgatatgaatcagcacttcttgaaggagactcctggaagcaaccagatcattccgtcaccttcagccacatcagaacttgacaataaaacccacagtgagaatttgaaacaggatatcctgtaccttcacaactctttagaggaggtaaacagtgccctagtggggtaccagagacagaatgatcttaaactcgagggaatgaacgagacagtcagtaatcttacccagagagtcaacctgatagaaagcgatgtggttgctatgagcaaggtagaaaagaaagcaaacctgtccttcagcatgatgggtgatagat

SEQ ID NO: 53733 - DNA, 4154 bp, Homo sapiens
ttttttttttttttgagagaaaaaagaaatttttttatttagctaaattaaaatggctgtgttacttatttgaaatatgcaaagctcaaatcaagtcatggaaaccctgaattctccctaaacagaaccaaaattgcttatacattaccaaaatagcttcactaaaacaaagtagatttaaatttcttaatatgagaaaacaacaaggtaggttaggttcgtataacaaacaatacacgctctataaagtctcaggaatacccaaatgtgttctggtttggatatgaaagagggaccacttctagctggtgttggtaagcaagccaatgaggtgtgcagcaaacaaaacctgtcactaaaaacaactcaacaggccattatggagtatgagcccatcacagccaaaatcctcaactgtgaccggcaggaccagcaagggggggtgttgaaggggttatgaacagcaaccataaagaaaggaatctccaacagaagggacaatggccagcagtaggtgaagggaacccattcttcagctctgttgcatcatacacattcctgagggtcaggcacctctgccttttagatgacaccacagtcatctagaagtcaggttttctcttcttttggttcttctttttatatgctacctttttgcctctctgatttatggggaggctcttttagtaaacattatacaagatagtacaaggcaaaagaaaacaaggaccaagaagcagtgcctttgagtaacttaggaaagcagcagtaggagctgcccagactgaaaaggtaaaagggtttaaaacccaaaaccaaaaccaaactcactatccagtcttcctctcagagatgagatatggctggtgaggcttgactacagctaaatacaagtcacaggcttagtaagttaagacaacatacaaataaaagtcccaaattcacactaaataataggcttatgggatgcttaagcccagtgagtctgctcaactcagaagaaaggagttcaagataccctacttttgccctggaagatgtactttctccaggccaggatgacaaaaatattcatagatctgagaatgccagtataaacacctctgcccaaacttggtagggggagaggatggtactgtatactggctcaggggtgatactagtcagacaagcacaaggtaggaagaacagaagataaaccaaaaaacaaaatggatttctccatgtatagttatctgatgcaagggaaaatacacacaacaaagagttaaggtgtcttcaaagtatctgcctatgaataagaatttgaaactaaaaaggacaagctacattaccctcaagtatatttcatataaatcagttctcaaaaaaataccttccaggtacagacatactatttatggtacagtatatacaaatatagcagtataattcaatttattgctagaattttatttggttgttagaaaatctgtaagggtgtatatatattaaaaaaaggtgtggggtgagagtggatggaaggcagtcagaagggtgagagttattttcaagttacctaaagtgccaggctaatttgttttaacctttccaagaaagtgaaactgagcataagctataatgagataaggggacacattcatgggaaaagacttcatcttgctttaactaaattttaatacttctggaaaaaaaatttaagtttggttaataccaagctgaacatcatgtaaagaaaaaaaaaaacagcccttaaatgtttaagggtaccggactgtatccatggtgaagggcaacctgaacaaagttaaaaaggaaatgatctccactaaagaagtctgtggcatgacagctttctctactttctccctgacttggcctataccaaagttaagtttttgtagtttttttttcccctttcaagttgttgcccaaagactgcttctaagaacaacacagcaattctagactcaacatacaggagacatggaggtattattcctttcaatctagggatctttcatgccaggtccacagaagcatttaaaggaagtattgtacttgattgtattagatttgaaaaacttgctaccaccatgtgaaggccctagctccaggcctgccctgctatactttggcatcctttgggtagaaagcctctagctacttctgagctggtaatggtaaggaaactgaatattatttcacatgtttcatctcacagcctttttggctttagtcatcccccagagaaacatattaggctcttggttagcctctaggtaaaatctcaaggggtatggttttctgggtcaaaattagaagcacagctctcttctaaagctctgggtggtcagtgtgagataatggctgggggaatttagccctgccattcaaatggagatggtactggtggtgggagccagctacggctttaagacagacttaagtgggtgggtggggaaggcaatctagctcactcagcagggaaaatggagctccccaatggataactttttatgctcataaaccctgaaatagtactaaaaatgagaaaaatccccaagacttctctgattcccaggttgggattagctgagggaataggaacaaagaaccagaatcctacttccatgagccatgcctggagtcagtattgtctccagtgtctattccctgaaatcggttcctccagctaccaggacaaaccccctggcagcgcctgggcctttgagggatgccttatggagacatggatgtagtttcagctgccacctacaccagatcagcaatttttaataagtcatttgttcatatcctgttcaaaaccattcttcctactttccacacaatatgcacaatgctttctttcatttaaatatttacaaacagaaaaggcctatcttttaaagaaaagacattttctgagtctctataaagtgcagctaatttaaggcaaatttaagtgaaatataaaagtggcttattctctctctatatacatttcccagctttaaaagataaggtctcctccccctcaaaaaaaggaaagagaaaaaaagagggctttaattttttttctggcaattttaaaatgtaagatcttactggttgtaggaaatcatagatttctgaacatcataagtaaaatggtcttcttctttaaaaaaataacttttatatagcttcttcaaacaagttaaaaggtggcaaagtatctgctacagtagtttggaggactagaggactgatgggtaagtaagggttgttttgttgttaggtaaatagatattaggcagtccatttctaaaatatgcctgatgaagctagatacctaaagctacccttagctccaggaatgagtatcttccatctccatcggaatcaaatgctctcaagctctctggttctggcatagcagaacctagggaggtccagatttcctggtaggtcagcttcccatccacgtcctggccagtcttgcggaataaatcctgaagatcttcagtgctagaaactcctggtagggagataggtcttagttgggcagctttctcaactgggtctccaagaaactgtgaaaattttggcaatgctgatggctttgatgtgaaactctctacttgctcttcatcggcggtctctggaggcctgttgctctcaggtttgtttgtaagagcactgatcagctggagtttctctcttagcttggatacctgagaatttgaactatcttctttctttatgctttggatttttactgtatctgttctgttggtgacttgatccaaagactgtcttttcagagtggcagatctatcacccatcatgctgaaggacaggtttgctttcttttctaccttgctcatagcaaccacatcgctttctatcaggttgactctctgggtaagattactgactgtctcgttcattccctcgagtttaagatcattctgtctctggtaccccactagggcactgtttacctcctctaaagagttgtgaaggtacaggatatcctgtttcaaattctcactgtgggttttattgtcaagttctgatgtggctgaaggtgacggaatgatctggttgcttccaggagtctccttcaagaagtgctgattcatatcactctgcagtaattccatcgtttc

SEQ ID NO: 53734 - DNA, 3383 bp, Homo sapiens
  misc_feature (1)...(3383): n = a,t,c or g
aagcctctcggtctgtggcagcagcgttggcccggccccgggagcggagagcgaggggaggcggagacggaggaaggtctgaggagcagcttcagtccccgccgagccgccaccgcaggtcgaggacggtcggactcccgcggcgggaggagcctgttcccctgagggtatttgaagtataccatacaactgttttgaaaatccagcgtggacaatggctactcaagctgatttgatggagttggacatggccatggaaccagacagaaaagcggctgttagtcactggcagcaacagtcttacctggactctggaatccattctggtgccactaccacagctccttctctgagtggtaaaggcaatcctgaggaagaggatgtggatacctcccaagtcctgtatgagtgggaacagggattttctcagtccttcactcaagaacaagtagctgatattgatggacagtatgcaatgactcgagctcagagggtacgagctgctatgttccctgagacattagatgagggcatgcagatcccatctacacagtttgatgctgctcatcccactaatgtccagcgtttggctgaaccatcacagatgctgaaacatgcagttgtaaacttgattaactatcaagatgatgcagaacttgccacacgtgcaatccctgaactgacaaaactgctaaatgacgaggaccaggtggtggttaataaggctgcagttatggtccatcagctttctaaaaaggaagcttccagacacgctatcatgcgttctcctcagatggtgtctgctattgtacgtaccatgcagaatacaaatgatgtagaaacagctcgttgtaccgctgggaccttgcataacctttcccatcatcgtgagggcttactggccatctttaagtctggaggcattcctgccctggtgaaaatgcttggttcaccagtggattctgtgttgttttatgccattacaactctccacaaccttttattacatcaagaaggagctaaaatggcagtgcgtttagctggtgggctgcagaaaatggttgccttgctcaacaaaacaaatgttaaattcttggctattacgacagactgccttcaaattttagcttatggcaaccaagaaagcaagctcatcatactggctagtggtggaccccaagctttagtaaatataatgaggacctatacttacgaaaaactactgtggaccacaagcagagtgctgaaggtgctatctgtctgctctagtaataagccggctattgtagaagctggtggaatgcaagctttaggacttcacctgacagatccaagtcaacgtcttgttcagaactgtctttggactctcaggaatctttcagatgctgcaactaaacaggaagggatggaaggtctccttgggactcttgttcagcttctgggttcagatgatataaatgtggtcacctgtgcagctggaattctttctaacctcacttgcaataattataagaacaagatgatggtctgccaagtgggtggtatagaggctcttgtgcgtactgtccttcgggctggtgacagggaagacatcactgagcctgccatctgtgctcttcgtcatctgaccagccgacaccaagaagcagagatggcccagaatgcagttcgccttcactatggactaccagttgtggttaagctcttacacccaccatcccactggcctctgataaaggctactgttggattgattcgaaatcttgccctttgtcccgcaaatcatgcacctttgcgtgagcagggtgccattccacgactagttcagttgcttgttcgtgcacatcaggatacccagcgccgtacgtccatgggtgggacacagcagcaatttgtggagggggtccgcatggaagaaatagttgaaggttgtaccggagcccttcacatcctagctcgggatgttcacaaccgaattgttatcagaggactaaataccattccattgtttgtgcagctgctttattctcccattgaaaacatccaaagagtagctgcaggggtcctctgtgaacttgctcaggacaaggaagctgcagaagctattgaagctgagggagccacagctcctctgacagagttacttcactctaggaatgaaggtgtggcgacatatgcagctgctgttttgttccgaatgtctgaggacaagccacaagattacaagaaacggctttcagttgagctgaccagctctctcttcagaacagagccaatggcttggaatgagactgctgatcttggacttgatattggtgcccagggagaaccccttggatatcgccaggatgatcctagctatcgttcttttcactctggtggatatggccaggatgccttgggtatggaccccatgatggaacatgagatgggtggccaccaccctggtgctgactatccagttgatgggctgccagatctggggcatgcccaggacctcatggatgggctgcctccaggtgacagcaatcagctggcctggtttgatactgacctgtaaatcatcctttagctgtattgtctgaacttgcattgtgattggcctgtagagttgctgagagggctcgaggggtgggctggtatctcagaaagtgcctgacacactaaccaagctgagtttcctatgggaacaattgaagtaaactttttgttctggtcctttttggtcgaggagtaacaatacaaatggattttgggagtgactcaagaagtgaagaatgcacaagaatggatcacaagatggaatttagcaaaccctagcccttgcttgttaaaatttttttttttttttttttaagaatatctgtaatggtactgactttgcttgctttgaagtagcnnnnnnnnnnnnnnnnnnnnnnnnnnnnnncagtaactgttttttaagtctctcgtagtgttaagttatagtgaatactgctacagcaatttctaatttttaagaattgagtaatggtgtagaacactaattaattcataatcactctaattaattgtaatctgaataaagtgtaacaattgtgtagcctttttgtataaaatagacaaatagaaaatggtccaattagtttcctttttaatatgcttaaaataagcaggtggatctatttcatgtttttgatcaaaaactatttgggatatgtatgggtagggtaaatcagtaagaggtgttatttggaaccttgttttggacagtttaccagttgccttttatcccaaagttgttgtaacctgctgtgatacgatgcttcaagagaaaatgcggttataaaaaatggttcagaattaaacttttaattcattcgaaaaaaaaaaaaaaaaaa

SEQ ID NO: 53735 - DNA, 420 bp, Homo sapiens
gcggcggcggacctcgctctcattcctgatgtggacatcgactccgacggcgtcttcaagtatgtgctgatccgagtccactcggctccccgctccggggctccggctgcagagagcaaggagatcgtgcgcggctacaacggacatctacgacaaagtgtcgggcgacatgcagaagcaaggctgcgactgtgagtgtctgggcggcgggcgcatctcccaccagagtcaggacaagaagattcacgtgtacggctattccatggtgagccgcagccccgtcccgccctgccggaggccccagtaccagcttcgaggcccacctgagcctgctgccctgacccgtgtccccagctgagcacgcaggcttcctggggttctcccagggtcggcggcagagccctccctccagggcccatt

SEQ ID NO: 53736 - DNA, 460 bp, Homo sapiens
tttttttttttttggtgtggcaacaggtttaattctgtggccaggctagcctgtctccaaggcctggtggacagcacgtcaccagaggctgccgcaggagcaggcagggccagccctgcaagaggagtgcaggcaaaggcgggggctctgaagtggctgctggaggcagcaggccccgggctgggagtgctcagtagccgtcgttagcccaggtgacctcgtagtcggggtacttggctttgattttctcagttgaaatggcgtgctgggcaggaccataggccttgatggtggatcctgggggcctgaggcgcccagagggacgcacgtgggtctcatctgctggtggtttttgtgaagagcacaggtggggactctgagctccacccaggtactgactgcctctgggggcccagggcccaaagtgctggaggacagctagagcccagcaaggcctccc

SEQ ID NO: 53737 - DNA, 647 bp, Homo sapiens
ggtcgactttttttttttttttttgaacaaaatacagctttatttgaactccctcccctacagatcattcagatgcccgggaccatgtccaggttcctctcagcaacatggaaagctaagccatttcacaaacgcacaactgtagctacactacagccccccatgcccagggcacagctttgttgctaagcctgtaacaaaagaccaccactcagtatttgtgtaccctgcagccaacaccacctcctgggcttcacaggttcactcacccaagaggccagcacaaccacgaccgagtgggtactcagtggcccagacaccccccgaacactggcactgccacaaggccctgaagggtagactgtggggcaaagaggacaaactctccctcccctaagggacccggctcactgggcctccttcccctgccaaccgccagcccctgcatgcctagcagggaggtaagcacccactggcgtcgtgatttccattatcttgctaatgttgacagcacctaagtcacattaaaacaaagagagactggatccagacctccaagtctcatcattggacctcagtggttctcactgccccaaccacagagtgaaggtcaggcagcgtttgccaggatttggctctgaccaagt

SEQ ID NO: 53738 - DNA, 517 bp, Homo sapiens
gggggccggccgagaggaaagctggaggcgcgggtggggaacatgtctgagtcggagctcggcaggaagtgggaccggtgtctggcggatgcggtcgtgaagataggtactggttttggattaggaattgttttctcacttaccttctttaaaagaagaatgtggccattaagccttcggttctggcatgggattaggaatggcttattccaactgtcagcatgatttccaggctccatatcttctacatggaaaatatgtcaaagagcaggagcagtgacttcacctgagaacatcccagcgggaggacaagagaaatcatgtttattcctcaggaatactgaagtgccctggagtaagctgccattcttctgtaacaatgttatcagtaatgctttaaactccagcacctggttatgcatttgaaaccaagtctgtttcttgttttgtattttctctctggaagttgtaaggaggtggtcttaaataaattaaacaaaaataggaagtccattgc

SEQ ID NO: 53739 - DNA, 4899 bp, Homo sapiens
tttacagaaaactttgaacagaagaaaggtgctaagacgcagagggagagaaacatggggacatgaggaacaaagggcctggtgggaggaaccaagaagaaccagtgcagagcctggagtcacacctgccttcccgtcacaggggagaagctgggacacgtggagcaggaatgcgggaagcagagttgagctgcgagccaagggttggtccaacccaaggttgggcaccctcttccactgctcccaaatccctgcatcctcatctggggagcccccagctatcagctgaagttctcatagtcttggtgggagagggaggaagctaaggggtgacccaccaagtcataatatggaggtgcttaagtgctttaaaaaacaatttcaggttttaaaacttcacatcctcttatagctcccttctctgtgccttccaggagtccatggatacagcccagggaaggaaggagaacagcccccagtgccctttcttctcctattacctaccacagaaatccccccgaaattaggttttccccaccaaatacacatacgctgacatcaactaagccaagtgacttttaaaaacaaaactgacattccagagggaaaggaatcattggctgagctggggtggcctaaaacagcaacaatgaggaagccgcaggagggattattagtacgaatgaactcgaataagctcagcgtagggtgggggaggggagttggggccttgacttagtcactaaaaaggggcttggggagagatggaatctgcgccctgttctatccccagagctctccctggaatcttaattcccctttcctaaaactcactccccctcaaaaaatgtaaaaattggttattttttagtgggtagaagggagctccaatgtggctttttaaaatctactttttttttttttttttttaatccatagaaaatgcagtagtttggagggaggtgtacccttagaagtggttaatagaaccttgtataaacacctttcaccagcccttcctttagggcagcattcccatcctatcctctctcccagacattataaacatcttttaaacagaagtccttgaataatctgatataaaaatgcatgcctctgttaggcatggtgagggctttggaggggcggaaggagctttccttacgtagtgatgaactctccaggctggggagggtcccagtggtgggggaagggctgttcctggaaccgtgatgtcccacagggggtgagggggagagatgtctggctggctcctcactgtggaggtggcacaggggtgaccgtgcctgggctcggggctgtggggtctggaggcaggggggtgcctgggtctggcagtgggctggcactgggcaggaggttgccctgaacagctgccacaatggcagggctttgggctgcggcggatccgagccccggcccgagaggcaaggaagatggcatggtggtggtcgccggcaggttaggatgtagagggttcgccatggacacaggcaggttaggtggggggagagtgcccggggcgaacgggagatggtggtgatgcccatgcaggttaggaggagcggggaggttaatactgatggagtcagctagactaccaaatgggatgatggatggagcaggaggaggaggaggaggcggcatgccaaaaggcaaacccaaaggagcattacccgccacgcctgggtgcccgctgcctggcactgcccctggcatcattgagggaggagtttgttggttggggaacggtgaggggccatggggtccaggggggggaacccctggtgggactgccccaggctggggggctccagctggttgctgctgctgtggccctgcagttgaccctgcctgcccaatctgttcagaagggcccaaacttcctggaggggccccactgccagcaggagcagggactacagaggctggagccacagccaagccatggactgcgggtggcccagcagcccctgttggggggataggctgggagcctgggggcagggctggtggtggctgctgctgctgttggtgcatctgttggaagtgctgctgccgagccctcatctccggatacttcagctgctccatgtggaaggcttgtctgtcggccaggagctgctgcctctgatactccagtgcttctcgctcccggtccatgatagtctccagctcctcaaagtgccgaagtttgatctccaactttttcatctgggtctccaccagcagggccaccaaagatttgatcttcctttcctcaacagcagccaagtgcttagctttcactgcggcggcggccagggcggcggcagcagcggtggagaggttgccctcgccaatgtcccgctccacctttgtcttcctttccccctcagactccaccacttccttcagcacttcctcctgcccttcctttggctccttctccttctcaggatcgactattgggtctccatcactcttctcggactccttctcactgtcgccttctttccctttctcctcatccttcttgggagcctcgctggttttctcttttgcttcctcctctatagcaccccctccttctcggggttccttgggctccttcttctcatctgtggcctggccttccacccgagcctcgtcattcccgctctcctcaatccgctcaggctcatcagaggtggttccagcaatgccactgctttccagaccgaaggcagggtccgccttgcctgttactttggctgcttcttccacttttcgaacatgggcctccaccaaggccgtgggtacctcttccttcattttggagaactcctctagggctgactttgcagcagcagaggcgactcggggatcgacgacagaggccaggaaggcaacagtgctcataacagggttgcccgactgactgaaggggatgggttggtaggccagggggcctagggaggcctctgagtcctccaggtatgggtcttcaatgggaagacgaagaaaatgcaagatgcactcgtcctgtgtgcggcttcccacatgctcggacactttgttccagtcatctttgtacatttccagtgcctccaggagaagcagggtttcctgttctgtccactcacgagtggcactggctgcagccttgctcttggagggagcattcttttttgtgtacatgtctgtgcgcagcccaaagttttgcatgtctgttggtttctctttgcctttgtcaggaaagttgagcatttgttgggaagcagaggtctgctgaggtgtcttgggctgcagaggcaccagccctgatggtgtgtcagccaagacatggaagtgagaggtaggcggaggccccattggggttggtcgactctcagcatccacctggtagttaataagaccccactgttctaggaaggcatggaccctcgagatggcacagacatcacccgctaggtttcggcggcaggcggtagaggtaagatactcttgggggttcagtcggtaagtgtcaatcataaagtttcgataggccaggtagatctctggagtcttggacttgttcttgccgttgaagaactcggggagagccctccgctcaatggcatgaacactattgtagtcaaaccaggcagcgtagctgggaatgatgatgtggtgggtctgttcagtcacattgtcctcatgcaggtctggattcttggtctgctctcccttgttccccgtactgttctcatcctcatccttgcccgtcgtctccatgctttcatcttcctgttcatccaggtcggtcatggtgccgcctttgactggggccgactctgagtctttctttgtgttgactgttttgggaagtgtcacctcttctacattggggactggtgagggctcgtccatgtccttagtcaggtcttcttgctcctcttctctgtggccacgctttgacttagtgtaaggtgttgagggacctttcttgcatttttcttctttgacttctggggttggtgaaggagagggggagcgcttcctcttcttatagtttccccccttcttgtcccgtcgatctgaatctgggctgttcacctcatctgtcagtgtcttggctgaaatcttctttcggcgggagacagggtttttgtcatcatttacttcatagtcttcctcattcatccattcattgaaggtgtcggtgtccaggatccactttgcatgaaccttcctaggtttctcaggagttggagcatcttccacagatgcctcaatttcactcgctgggatccacgtgtcgtaactgtcaggatagtagccccagtgcagaagaacctgcttatccctcttcatgactggtcgtacccattcctcttcttctagattccccgggacaggatacacaacatgggaggcattgttcttatcctcagtgactgttccctggtgtctcttgataatgtcctttaatttccctagtagtttgggctcaatttctgggcacagaaaaatgttaggtcgagacaggcaattattctgcaccaaggacttctcaatggtcataaacatttccacattgcggtgcatgcgtgatggattctggaaatcgtaacgccgccatccctggtcactcttgaatttgtaggcagctgcaagaatgtggcacaaagaggctcccggcttgaaatgcaaggaaacattggttcggcagtttagtgagcggggcattgctgaacatgttgccaagaaattcctccctgaaatggtagacactgtaacaccagtctagacagggactggttggtgggtggttcagctggtataaacctcctgtaagttctggccgagacacagcggcacgtggtcgaactgggtcatggtggtcgcggcctcctagtacttcaagttggggcc

SEQ ID NO: 53740 - DNA, 647 bp, Homo sapiens
  misc_feature (1)...(647): n = a,t,c or g
ctggccaggcagccgcgcttcgaaggacgccgccgggagctgcggaatggcgtnggagtggcagtgctaacggctggtgtctcgcactgttggcctgtgaaggtacgtgaagctgaaagcctggaatggctggaaaggggtcatcaggcaggcggcccctgctgctggggctgctggtggccgtagccactggtccacctggtcatctgtccctacaccaaagtggaggagagcttcaacctgcaggccacacatgacctgctctaccactggcaagacctggagcagtacgaccatcttgagttccccggagtcgtccccaggacgttcctcgggccagtggtgatcgcagtgttctccagccccgcggtttacgtgctttcgctgttagaaatgtccaagttttactctcagctaatagttagaggagtgcttggactcggcgtgatttttggactctggacgttacaaaaggaagtgagacggcacttcggggccatggtggccaccatgttctgctgggtgacggccatgcagttccacctgatgttctactgcacgcggacactgcccaatgtgctggccctgcctgtagtcctgctggccctcgcggcctggctgcggcacgagtgggcccgcttcatctg

SEQ ID NO: 53741 - DNA, 524 bp, Homo sapiens
  misc_feature (1)...(524): n = a,t,c or g
tnnnntnttgnntcntgaancccatnagctatgacatgattacgaatttaatacgactcactatagggaatttggccctcgaggccaagaattcggcacgagtccggaagcctccaaggcctccccactgccattcgagccatggcagcgcaccccaccatcagaagagcctgtgcttttccagagctccctgatggtctgagggtcccacccctgccccactttaccatagagaccagtgccttggtggcaggtccctccccaggtcccctgagatggggtatggaggggcccttccctctcggccttcgagcactttctttcacttactgtgtcaaagccctgggtcctctttttgatgggcaccggcccctctgaacgtgatgggacctgccttctccactagtagctgggcagctcacaattcacacctgtgtacctgcacatccctcacttggtggaaaacacccagaaggtcttgagtcccccacccctgggtgtcagtccaaatgactgtataggag

SEQ ID NO: 53742 - DNA, 1467 bp, Homo sapiens
gtggcctggccagtcatgaggaacatcggggtgccgccgaggagctggcatccacccccaacgacaaagcctcctctccaggacacccagcctttcttgaagatggcagcccatctccagtccttgcctttgctgcctcccctcgacctaatcatagctacatcttcaaacgggagcccccagaaggctgtgagaaagtgcgtgtgtttgaagaagccacgtctccaggtcctgacctggccttcctgacttcctgtcctgacaaggaacaaagtccatttcaacccgactggctcagccttctgccccgtcaacctgatgaagcccctcttccccggcatgggcttcatcttccgtaactgcccctcaaacccggggatctccccttcccccggccagccccaggccaccacctcggaaggatccggaagcctccaaggcctccccactgccattcgagccatggcagcgcaccccaccatcagaagagcctgtgctctttccagagctccctgatggtctgagggtcccacccctgccccactttaccatagagaccagtgccttggtggcaggtccctccccaggtcccctgagatggggtatggaggggcccttccctctcggccttcgagcactttctttcacttactgtgtcaaagccctggggtcctcttttttgatgggcaccggcccctctgaacgtgatgggacctgccttctccactagtagctgggcagctcacaattcacacctgtgtaacctgccacatccctcacttggtggaaaacacccagaaggtcttgagtcccccacccctgggtgtcagtccaaatgactgtataggaggcccttatttttgtcacagagcaagctgggccatgaacgaaggagagaagacgccacagatttccttccctctcctccaggagaccataagatagatccccccatcctctcagccctattcccatgcctccctctcattggaggagctgaccaaagcagccctaacgggccataacacttgaccaattcagctgctggcagagggaggaaacaagtgttttcccaagtggcattttcatctcgctttcaccctgactaaagattgtcttaagtagcagcccagcccgcccagccccaggtgggtagtggggaggagagctggcattcctccaggtggcaaatggcgactctatactctccgctcgccccagggctggatggattagaaaaatgcctatttttcttgtatcgatgtagagactctattttctcccaaagacactatttttgcagctgtttgaagtttgtatattttccgtactgcagagcttacacaaaattgaagaatgttaatgttcgagttttcttatcttgtgtttagaggttgttttttgcagatcttggtgttaatagaccaaataaataaataaatattcccagcaaaaaaaaaaaaaaaa

SEQ ID NO: 53743 - DNA, 1724 bp, Homo sapiens
  misc_feature (1)...(1724): n = a,t,c or g
ttttttttttccaataatatatttaataggtaagatctcattcatcaatatacaaaaaaaaaaaaacaaaccagaaaacaaaaaactaactttgattaagacatgtgcccttagtaagggcacttacaattagaaaggtttatcggtagcactttgaggtagcatattttgtaatgaccatgagcaatgtttttactttttgtataatggggtggggtggagtgggggcttctgagagtcagcctgaggtctttagaggaccagctattgtagcaccttggatacttgaagtttaatgctcagttgggtcgggtggcagttgacttggtggctggcatgttcagcagtgcctggggccctgtttctgggcagcctttgaggattttctatgatattgaatgacagttttaagtggcaactcaggcccagctcatgcccttttttgcctggacatgtgctatttttattcacttatatatcaattacttgtaagggttaaactttcaaacaggaagtatattgggacaaaagggctcttggggattagatatccctttaatctgtgaccattgggcaaaaaattttcctgcagcaaaagtctgaggctgttgggaccatttttgcagctttaatccttagcctcttttgactgtatatttgtgtttaaaatgcagagctcaactgaatatttccttttttgttttgttttgttttgttttaagaagtaggttgttttcctgaaccgtaaacttgtatcattttaacttgcacaaaggaagtctgttcttggtattgctcttgcacttgggttttttgttattgttttgtgtggattttttaaagcttttctgtttcaccctcctgccagggaaaatcccagaaagcttaatgataccccaaaatgattacacccagggaggaaaaaaaggagcgctttctagggtcagaatcgtgggagagaatactcagaaatgaacctctttaaagccttgcaggaatgagtcactcttacttaatgaaatgttaaagccaattaaaaagcatgctgtgatgcccagcttccctttccacagggtgcatgcgtctcctgctggtgaatcacatgcggcaagaggcaactggctccacagcctgggatgctgccgtaccaagaggaaagaagcagcaaaatgcctttacgttgttctaaacccccgacgcataaagtgtagaggagggatggccaagggtgggtggtagaaagtgtgttcaggctgacactggcaatgagtacagataatttcactttcctcttccaggggcaaaggctgatggcctctacctttgtatccaggagaaactgcagagcagccctgtgactttacaaaatatgctacctcaaagtgctaccgataaacctttctaattgtaagtgcccttactaagggcacatgtcttaatcaaagttagttttttgttttctggtttgttttttttttttttgtatattgatgaatgagatcttacctattaaatatattattggattatggttcctgaaggtcattannnnnnnnnnnnnnnnnnnnnnnnnnnnnnnnnnnatgacttaaatatctttacgtgtgttttttagagcttggttctttaaagatttggagaagatatgtaaattaccaaggcacttggtttttctgttttatatactaataatcagggcctaagttaaataaaaatatgtgtgc

SEQ ID NO: 53744 - DNA, 383 bp, Homo sapiens
gttataagtaagcatgtgtgttttggattttgaaaatttagtatgaaaaagaaaagcatttgttttcaaaaaattggattacatattgaaatgatgatgtttagatatatttgttaaatatattaatctgtttctttttacatttttaatgtgactactagaaaattaaatttcatttagctcacattatgtttctgttaaccatcgctaatttagactattctattaaaatgctgtgaaagttgatgctacagcaaatttactacttccttttaaaaaatatcttaataccttcctttttgtgggttcttgcattagcatcctctacaggccataattctttgctgttgctgaacacagaaatttggggttttaaactctta

SEQ ID NO: 53745 - DNA, 1406 bp, Homo sapiens
catacctatgtcagtaaatgatattgtgaaacccggaatgaggagaagaattattggatatgggctgccatttccaaaaaatcctgaccaacgtggtgaccttctaatagaatttgaggtgtccttcccagatactatatcttcttcatccaaagaagtacttaggaaacatcttcctgcctcatagaatgaagaactttgttacacatattttgataaggcactgaaaatataaaaggactggtagtttactgatgtagatgtgaattctgtataaagatgtgtaaattcttttgagggttcattaaattgcatgaatagagacgggtcaaataaataggcaaaagggatttttacagttagagataaaagagaaaaccattcactgtattttatttcatttctcctgattcagatatttttagtaatttgcttatatgtaaaagttgtttttgtggagtcagtggatatatttctaatgaagtgctagactatccaattacttaatttcttatacctttagataatcagtatgaaaagttcccatttataatggaaatgaaaattcttaactaaactatacatgtaatatgtatttctagaagagaataaaaacccaagtcagttattagatttaaatcaccttctgaaatgctgctatagggctggtatctgtaaaagaatatcctgatgcatctgtttcaccattttgatttttaaagtatgctgtagcatttcttaataacatcgttgtgatgttcttaaggcagatctttcttcataaaaaggaaagtaatggcaatttctctcctgtggaaatcccaattgcttgaattactgatattttagaatagactttttaaaatgccatatgtaattttatgcaagttgactatatatcttgtacttaataaattataggctcattttgttctctgctagtttaaagtaattcgtttaataatagatgtgtttttagaggaaatgctgttacttggaattaattttccagttatacagtcttctataacttactaataatattctatatgtactttatgtaatttccctaaaaagaatgaactaccactacactatggtgttaaaccaaaatatagggaaaataaacactaactgctgcttatggataatgttgcaactacttgttatgcatataaatattttactttttcacatgtatagattgcatttcttaggtgttttaattttttaaatatatttatgttttaaaaatttagttttgttttctgttttataactatagtgagaatgatgttttgaagcaaaatttttggttataaaatagttttcaggattatatatatatatactggatcctatcgccttttagtagaatatgaaatattcttttagaaatccaatag

SEQ ID NO: 53746 - DNA, 623 bp, Homo sapiens
ccatgattcagcctagtctttccgtcctctgtggacttgggtgtgccttcctctgggccacctcgtcttttgctgctgttagccctcccgcctgcgcacctgccacttcaccctcgcctgtggtccacttacgttccactcagcccggtcagtcctgctttgttcttctccaccgccttggtctcccgtgtgtcttatctagctctggttccttctcgtctccacatttattttgttttcttcctgtgcttgttagtccttgtgcacttggtccttgagctctttttctattaataggtattactagatggatttgttgtctgcctttacatagaacacacatccttactgtgcatttcctgggtagccaggatgaatcaattattattaacttcccttcgaacattgagcttcctctgttttctgtttctaagaattagattagtattctagaagactaatactactttaaagacagtcaaaacagtcatacgctgccatttcagccctttatttaagagtttgtgacatttatcactcccttgaaagattaaagaacacccaaagcaagtttggggtggaggtggggaaggcaggaagagaaaggtaagtgctataaaagg

SEQ ID NO: 53747 - DNA, 525 bp, Homo sapiens
ggtcgactttttttttttttgcacaggctattttaatattttttattaagggctataaaaatacccagaaagataaataaatgtgatgcaatgatatctgtcctaatatgaagaactttctttcactgcattgttttccttcacaatggccttcaaatcacaggaggcagtgattccatgccatttcctcttcttttattacacgctacaggatttctgaatcagtatccccgccctcagtcttctctttataaatcaaagtcattttcaatccaccgtttaaagggagcgtatttttttcttttccacgaagaggactctttgtttcacaactggatcataatgcaaaagagtcagtttttcccgcagtcggtttctcttgggtgttgaagcagaaacctgtcccagcttcgctcaccattctcaccagaatgttttttgacttgctcttggcaaagaagaccgcggagaggaacatggtgaccacacctgggcagtctcgtctaccgcaaaaggcccccaacg

SEQ ID NO: 53748 - DNA, 310 bp, Homo sapiens
atctaacagataacagtttgtttaaaataagaataataaaatattttattattcttatttgatctaacagataacagtttgtttaaaataagaataataaaatattttattattcttatttgatctaacagataacagtttgtttaaaataagaataataaaatattttattttaccttcatttctttcttgtctgactctcctgtttctttgtgttgatccaaattcctgacctctgtaattttcattttctctgaaataagttttaacatttcttgtgaggcaagtttactggcaaaaaaaaaaaaaa

SEQ ID NO: 53749 - DNA, 751 bp, Homo sapiens
ttttttttttttcactatagaaaaacctttaataacaacttcagatttacatgacccttctggtgctcagaacactatggattaacacacacactggaaagatacagacacaggaatctgctgcattaccccaaatggcaaagtcttgactggggcttcagctcctttcccaatccaaaattggcacctttttccatggaaattcaaactgcatctctaaatgatggggtacatgaactgtctgtttcaaaagtatttaaaaacaaacaggaagtacagcttccatttcattaagaaaacaccaccacaagacatggtgcagtatctactagcttaaagtttatcactccattagggcttattgacagcagaaatgtgaatgtagtaatgtagaaataaggaagagagcacttaagaaaaaaacagtacagaagttttagagttttttaaactttaataatatgcttgactaatatagtcaaaagtgatatgcactcgtgaaattaacccattttctgaagtccaaattagctattaaagtctttttttaccaaaaacatataaggatttagtacactatatagattacatagctttcctaccaacctaaagcttatcaactttattattgtctactgattttcaaactaggcattaaatttagggtgagaaagaagtgatacactctgtttcaactagggtggttgcatattatcctctctttaaaccgggcttatatgtaatttttttt

SEQ ID NO: 53750 - DNA, 517 bp, Homo sapiens
gcatcgtgcgcctctgggacgcccggaccggccgcctgcttactgactaccggggccacacggctgagatcctggactttgccctcagcaaagatgcctccctggtggtgaccacgtcaggagaccacaaagcgaaagtattttgtgtccaaaggcctgaccgttaatggctgcagcccctgcctgtgtgtctggtgttgtggggccctggatgactttccagcctcttcaactgacttgctcccctctccttttcttctctttagagacccagcccagggccctcccacccttgcccagacctggtgggcccttcagagggaggggtggacctgtttctctttcactttcatttgctggtgtgagccatggggtgtgtatttgtatgtggggagtaggtgtttgaggttcccgttctttcccttcccaagtctctgggggtggaaaggaggaagagatactagttaaagattttaaaaatgtaaataaaatatacttcccagaaaaaaaaaaaaaa

SEQ ID NO: 53751 - DNA, 1781 bp, Homo sapiens
atggactctgggaggcgtttgggcccagagaagtggatccgccgcttgccccgcatggagtccgaatcggaaagcggggctgctgctgacacccccccactggagaccctaagcttccatggtgatgaagagattatcgaggtggtagaacttgatcccggtccgccggacccagatgacctggcccaggagatggaagatgtggactttgaggaagaagaggaggaagagggcaacgaagagggctgggttctagaaccccagggaaggggtggtcggcagcatggagggccccgacgatagcgaggtcacctttgcattgcactcagcatctgtgttttgtgtgagcctggaccccaagaccaataccttggcagtgaccgggggtgaagatgacaaagccttcgtatggcggctcagcgatggggagctgctctttgagtgtgcaggccataaagactctgtgacttgtgctggtttcagccatgactccactctagtggccacaggggacatgagtggcctcttgaaagtgtggcaggtggacactaaggaggaggtctggtcctttgaagcgggagacctggagtggatggagtggcatcctcgggcacctgtcctgttggcgggcacagctgacggcaacacctggatgtggaaagtcccgaatggtgactgcaagaccttccagggtcccaactgcccagccacctgtggccgagtcctccctgatgggaagagagctgtggtaggctatgaagatgggaccatcaggatttgggacctgaagcagggaagccctatccatgtactgaaagggactgagggtcaccagggcccactcacctgtgttgctgccaaccaggatggcagcttgatcctaactggctctgtggactgccaggccaagctggtcagtgccaccaccggcaaggtggtgggtgtttttagacctgagactgtggcctcccagcccagcctgggagaaggggaggagagtgagtccaactcggtggagtccttgggcttctgcagtgtgatgcccctggcagcttgttggctacctggatgggaccttggccatctatgacctggctacgcagactcttaggcatcagtgtcagcaccagtcgggcatcgtgcagctgctgtgggaggcaggcactgccgtggtatatacctgcagcctggatggcatcgtgcgcctctgggacgcccggaccggccgcctgcttactgactaccggggccacacggctgagatcctggactttgccctcagcaaagatgcctccctggtggtgaccacgtcaggagaccacaaagcgaaagtattttgtgtccaaaggcctgaccgttaatggctgcagcccctgcctgtgtgtctggtgttgaggggacgaagggacccctgcccctgtctgccagcagaggcagtagggcacagagggaagaggagggtggggccctggatgactttccagcctcttcaactgacttgctcccctctccttttcttctctttagagacccagcccagggccctcccacccttgcccagacctggtgggcccttcagagggaggggtggacctgtttctctttcactttcatttgctggtgtgagccatggggtgtgtatttgtatgtggggagtaggtgtttgaggttcccgttctttcccttcccaagtctctgggggtggaaaggaggaagagatactagttaaagattttaaaaatgtaaataaaatatacttcccagaaaaaaaaaaaaaaaaa

SEQ ID NO: 53752 - DNA, 2279 bp, Homo sapiens
  misc_feature (1)...(2279): n = a,t,c or g
acccccggaggaattgatnaccccactccctacggatntgtgaatttaagagaaggacaaaaggaagggacatgtgggaggtatacattactcccttattttccgattaatatgtcacccagattaaaattaaattactgaaattccatattaaaacagaaatgacctagatacctaggatatgtgcctatagaagtgtgaaaactcccatagcaagataaagtctaaacacaagttttataaaccaaaaaaaatcccagaaaacttaaaattactgaaaaagaccaaagattaagtggagaacaaccaataaagagggacccctttattacacatttataaaataatagaatatagttattaaaaatgggacactttttttcatttttggtatcttgtattcagtttttccatcctcttcacaatcttccataacttgctttttgttatccattgttcacctgaaacttccaccccaccattcaaagtacaactgaagaataaacgatctaacagattcttgtgagacacattatcagataaattaatccagtgacacatgaataaagatttagagtttttaaagaaatacagtaaaagcaaaaacatatgaagcataatttaatctgatgattcagaaggcacctcaagattgtgttgtgccgttttcctcatgctgcgtggttaggtgcctataacagaattctggttagtaaaattttgaaaaaaattcacatataattcacattaaacgactacagatagatacaatatgggcattttgatgtgtacatttgtacctgacttagggcacaatttataataatatactaagaaaactaaaattaattataaaatgagtatttttagcacacttagtaacagctacttgttttaaactattatttcatttttggtgaccaaattatatttgaccataattaaagaacacataaccttaaaataatatttaagaaacatagttacaacagacatgttacattaaatgaaaaaaggaaagaaatgtacatgtattaaagggtactgaggtttttcaaacccattcttttgaaaggccttttaatccactttcatgtaaaccaatttaaatttaaaaagtttatactcaagaggtgaaatcagtgttgagcacatggctgcctaacaaccattcaatgctgatcactgaactagtattttcatttgattatcctgacaaacataataattgagcccatgtatatatgcaagatgtggaggatccaactaataactgcagaaataaaaacactcaacttaaaaaaggttgaaacaaatgacaaatggaaatggctgaatcactgtacctttttgacacaaccttaaatcttagttttactatatattatttggtactcctggattcagtagttggggtaaaaaaagtttctatattcaaacatatctacagaatgtcaatataaaatgtgtggatatatacatttaatatacacatacatacacgcacacacacaaacgcatactcacatgtctaggaaccagcacctaaccacatccccgtttctcactaatgacccaatgaatcatttatgactttaagaccagcttagattctataaggctgtacaatatatggctgaaaaggtcaaacacaagcacccacgttcaggctggattcaactgttcctcctcatgatttttgaccaacagtaataccacctatgtaacaactatatctcaataacttagaattcagagtataaaaccataaacactgagctccctcattgtttaaagagcactctttccgttctatttccactaactgataagaggacacaccaaactagatcactgaactgtacaaatgatctttactcttaatctaaacaaacatgtgttaaaacattctgaaatgctgcatcctttgatttcttcatcttttcaattgcccgatgcaggtcctgctgttgaacaggccgaatttcatcttcgtcatggctttcttctgatgtagaattaacatattctctaacacagaggagggcagcatctcgacacatctcttttaggtcacttcctgaaaacccatcagtttcctgggcaacttctagcaggtctacatgcctatccacattttcatttttcaagatgagtttcaggattgcttctctctgttttaaagcaggctggttgatatgaaatcttgtaggcattcttctcattatagccgagtcaaggtcctgaggacgattggtagctcccattactatgaactg

SEQ ID NO: 53753 - DNA, 573 bp, Homo sapiens
taacagctatgacatgattacgaatttaatacgactcactatagggaatttggccctcgaggccaagaattcggcacggggattcacgcaccctcaagagtgtgggtgagacatatacagcctgttagacctgaaggcagatggctcttcttaaggccaataaggatctcatttccgcaggattgaaggagttcagcgttctgctgaatcagcaggtcttcaatgatcctctcgtctctgaagaagacatggtgactgtggtggaggactggatgaacttctacatcaactattacaggcagcaggtgacaggggagccccaagagcgagacaaggctctgcaggagcttcggcaagagctgaacactctggccaaccctttcctggccaagtacagggacttcctgaagtctcatgagctcccgagtcacccaccgccctcctcctagctcagggacccagcccctcctctctgagaaactctgaccttcatgtccttaggctgtgctcctgccactctaccctgacacctcaataaagaccagtgctggttttgttggaaaaaaaaaaaaa

SEQ ID NO: 53754 - DNA, 1158 bp, Homo sapiens
ttttttttttgccactactcaatgtatatatctatctttatatacatacacatatatatctatagatatgtatctacaaggaactttcatatattttttgatcctcacagctgtcctatgaggtaggcaggtttcaggtattcacactaatgaggtattttccccataaacactgaaggatgccaagaaaagtttgcattcagatctagtttccatgtattcaaaaaatgaataagagtttaaaaagttgttttaccaactttagtttcagaattgacatcaggcatttcttattttaaaagtccacccttcagagaagataagaaatttctgaagtccacctttggaatcttttgggattcattctgactaagtaacatttttagttgagagaagtgtttctttgttttgctggtgttctttgaggagcaagtagatactgactgtccagatgtaggtgttctgaaaaccgatgctgggctcttgcctttcgagccagacatgtcatgatttgggtttgcagtccttctctctggtgtcttcaggctgagtttacttgtaggagtggcaggattgctcttcaatgttgacacaaagcttctacttttaccatgatgtttcactgttctgttgcatgttttacaagtgatcaacaatacacttttggagtctttgaactttttcaccatttttgcttctttaaaactgagtgtatagtttctcgcttctcgattaagaagtttctgtattttgggtgtcaacctggctttgggtttgagacgcactcgagagttatccagaaccaacagctggaaacagtatggacacgtttcttcaaaagtgctcttatcatcgtgcgacgaagtgtaggcccagctgtaaaagagaaagagacttgtgaggagcaaaggaacacctacccgctcgcctcccgcttcccctccagtcctcttacaggaggtagcgggcttggcccgggcagctgtcgtgcagtccccgcgctgcagcctcaaggtagtgcttctgtctcatcgccgccgccgctgccgctggctcgccgcgggaaccaggtgagaaaatagggcgccggaagtcggcttcccagcgtccccgtcgttggtgtccggactcaagcccacgcgtccgcccacgcgtccg

SEQ ID NO: 53755 - DNA, 794 bp, Homo sapiens
  misc_feature (1)...(794): n = a,t,c or g
ggagacagggtttagactcagggtgggaggaggggagcccctgctcctcatctgtggcctctgtgtcttcctaggatcaccattaacaaggacaccaaggtacccaatgcctgtttattcaccatcaacaaagaagaccacacactgggaaacatcattaaatcacaactccttaaaagacccgcaagtgctatttgctggctacaaagtcccccaccccttggagcacaagatcatcatccgagtgcagaccacgccggactacagcccccaggaagcctttaccaacgccatcaccgacctcatcagcgagctgtccctgctggaggagcgcttccgnnnnnnnnnnnnnnnnnnnnnnnnnnnnnnnnnnnnnnnnnnnnnnnnnnnnnnnnnnnaccacgcttcctgtacagcctgcagaactctgccccagagcacatcagctatgtgccccagctctcaaacgacaccttggcggggaggctcaccctgtccaccttcacgctggagcagcctctaggccagttcagcagccacaacatctctgacttggataccatctggctggtggtggccctcagcaacgccacccagagcttcacggccccacggacaaaccaggacatccctgctcctgccaacttctcccagaggggctactatctcacactgagggccaaccgggtgctgtaccagaccagaggccagctccatgtcctccgcgtcggcaatgatacccactgccaaccaacaaaaattggctgcaaccatcccctaccaggacccggccc

SEQ ID NO: 53756 - DNA, 935 bp, Homo sapiens
gcccaacgggggcgatgagcgatccttgggcgggtttgcccgccggagtaatccggaagaggcctcttattagggctctggtggcggcggtggcggacacttggggtctggacgcaacggcggcgggagcatgaacgcccctccagccttcgagtcgttcttgctcttcgagggcgagaaggatcaccattaacaaggacaccaaggtacccaatgcctgtttattcaccatcaacaaagaagaccacacactgggaaacatcattaaatcacgtgcctgcttccccttcgccttctgccgtgattgtcagtttcctgaggcctccccagccacgcttcctgtacagcctgcagaactgtgagtcaattaaacctcttttcttcataaattacccagtttctcatagttctttatagcagtgtgaaaacagactaatggacccttctggttgaaggaatgcagccattctgcttgtttgactatgtcctttctattcatctctatttcctgggaggtgtttatccaagtgcaataggaggtattggtgaccgcacagtcccctcagtgttctgctagtaaatagttgaaggttgatcattgatcttctgcgttttcagtctggcatggaaaagcccctgtgcaactggtaaagatatcaataagcaccaggaggtatctaaatccaccaggagccataggcatcacgttgacgtccatttaccagtcttccctggcaagattcttctgaattgtgctgccttggccaaaagaggtatgggaggggctgggcgcagtggcttgtgcctgtaatccccaacattttggggaaaccaattcaggtggatcgttagaggtcaggggttcaagaccatcctggccaacatggtgacatcccatctctactaaaaatacaataagttagctgggtttgggg

SEQ ID NO: 53757 - DNA, 741 bp, Homo sapiens
  misc_feature (1)...(741): n = a,t,c or g
tttttttttttccaggtctctcccgctatactttattaggaatataaaacctaatctatgtacaggacacgtcggtgtcagggtgaggggtggccaacacgtcggtgtcagggtgaggggtggccacaaggcgggccatggctgggaccggccgctctcctcggtgtggtacctggagcggagggtcaggcacaggtaggaacggggctcacaggccgagcagagccccctctggcccctactcaattccttcctgcttgtcttttatggccacccgaaagcgctcctccagcagggacagctcactgatgaggtcggtgaatggcgttggtaaaggcttcctgggggctgtagtccggcgtggtctgcactcggatgatgatcttgtgctccaaggggtgggggactttgtagccagcaaatagcacttgcgggtcttttaaggagttgtgatttaatgatgtttcccagtgtgtggtcttctttgttgatggtgaataaaacaggcattgggtaccttggtgtccttgttaatggtgatcttcttctcgccctcgaagagcaagaacgactcgaaggctggaggggcgttcatgctcccgccgccgttgcgtccagaccccaagggtcagccgccgcgcaaaaaagcctcttncgaattctgcacccggggatcatantttanacggcgcaccggtgaactcactttgtncctangaagtaattcaacttgngaacagg

SEQ ID NO: 53758 - DNA, 1147 bp, Homo sapiens
tgcctgcggttggggaccagtgcagggaccgggtcgcgccgtgctatggccctgtaccacactgaggagcgcggccagccctgctcgcagaattaccgcctcttctttaagaatgtaactggtcactacatttccccctttcatgatattcctctgaaggtgaactctaaagaggaaaatggcattcctatgaagaaagcacgaaatgatgaatatgagaatctgtttaatatgattgtagaaatacctcggtggacaaatgctaaaatggagattgccaccaaggagccaatgaatcccattaaacaatatgtaaaggatggaaagctacgctatgtggcgaatatcttcccttacaagggttatatatggaattatggtaccctccctcagacttggggaagatccccatggaacaaggttaagggcacggaactgctttggagataatgatcctattgatgtttgcgaaataggctcaaagattctttcttgtggagaagttattcatgtgaagatccttggaattttggctcttattgatgaaggtgaaacagattggaaattaattgctatcaatgcgaatgatcctgaagcctcaaagtttcatgatattgatgatgttaagaagttcaaaccgggttacctggaagctactcttaattggtttagattatataaggtaccagatggaaaaccagaaaaccagtttgcttttaatggagaattcaaaaacaaggcttttgctcttgaagttattaaatccactcatcaatgttggaaagcattgcttatgaagaagtgtaatggaggagctataaattgcacaaacgtgcagatatctgatagccctttccgttgcactcaagaggaagcaagatcattagttgaatcggtatcatcttcaccaaataaagaaagtaatgaagaagagcaagtgtggcacttccttggcaagtgattgaaacatctgaaattctgctgtcaagattcccatctctaaggactccaagactctttttccccaagtgctagagacaagggggtctatgagcatttactgacttcctgttaaaacttcattttttcaaactttttgagctatgcaatatataaataaacagtaagaattttaaattaaaaaaaa

SEQ ID NO: 53759 - DNA, 1728 bp, Homo sapiens
  misc_feature (1)...(1728): n = a,t,c or g
tcacccccaaacactgcactttgaatgctgcatgaatctcgtggggggtccctgcccttgcgacccccagatacctccacttgctaccgagtcaacgtgtgtgccatcttccctggtccaggcaccactcagctctggctcttcctgggaggtcagccgaggctccccccatgctcctggtttctgcttaggaggtggggacttgggctgggatggggacggcatacccctcccaggcctctccctctgcctttctgttcttaatcagggttggatccaagaaggtgtccagtgcttgggcctggggtggggggaaggtgttagaggactccaggagctcctgcacccctccccaaatgtccatctttctcagacgggggctctgtctgggggagcacccacaggctgcctttggggtcccagagcctgctctgtgcactgaccccagttcctccatcctgtggccagcctagggctcatggcatgggcccccactgggggagggaggcatcttgtttcttgtggttccctgcaggccagtcctgtcctcctttccctgttctgcccactctggggaatagggaggggaggagaggagaggagangtannaatttatgcagataaggatgtgtttcacatggtagttgaagtaccacgctggtctaatgcaaaaatggagattgctacaaaggaccctttaaaccctattaaacaagatgtgaaaaaaggaaaacttcgctatgttgcgaatttttttcccgtataaaggatatatctggaactatggtgccatccctcagacttggggaagacccaggggcacaatgataaacatactgggctgttgtgggtgacaatgacccaattgatgtgtgttgaaattgggaagcaaggtatgtgcaagaggtgaaataattggcgtgaaagttctagggcatattggctatgattgacgaaggggaaaccgactggaaagtcattgccattaatgtgggatgatcctggatgccagcccattaataatgatatccaatgatgtcaaacggctgaaacctggctacctttagaagctactgtggactggtttagaaggtataaggttcctgatggaaaaccagaaaatgagtttgcgtttaatgcagaatttaaagataaggactttgccattgatattattaaaagcactcatgaccattggaaagcattagtgactaagaaaacgaatggaaaaggaatcagttgcatgaatacaactttgtctgagagccccttcaagtgtgatcctgatgctgccagagccattgtgggatgctttaccaccaccctgtgaatctgcctgcacagtaccaacagacgtggataagtggttccatcaccagaaaaactaatgagatttctctggaatacaagctgatattgctacatcgtgttcatctggatgtattagaagtaaaagtagtagcttttcaaagctttaaatttgtagaactcatctaactaaagtaaattctgctgtgactaatccaatatactcagaatgttatccatctaaagcatttttcatatctcaactaagataacttttagcacatgcttaaatatcaaagcagttgtcatttggaagtcacttgtgaatagatgtgcaaggggagcacatattggatgtatatgttaccatatgttaggaaataaaattattttgctgaaacttggaaaaaaaaaaaaaa

SEQ ID NO: 53760 - DNA, 1148 bp, Homo sapiens
taagcttattagctcatttatcttggaaacagtagttaaactgaataaaaaccaaggggcaatataactgctactggttgagtcatacagtgatgtgtagtttggaaaagaagacgaatgatagatattgagcccctttaggaaatgttgccagtatttgaatttggctttcatagttatctcttgcacacgaagtagagtaccatggctgataacaagaggtcaaatgtacaagttgctctaatatggcctcaatgaggcaccagcttcaaaacccgcttgctgataattcaggtattcatggagggtcaagacttcaaagtcatgtacttcaagtaccagtagagcatctggtgttgcttaagggagtctgtcagtgtagggtgcatagaattgttctctggctatatcccattctaggaatcactggatatccatctggagtggagggctgttaatctaggttcacttgacaccatcttcagcaaatgatcattcctggggtcaaagacatgcctgtcttcttgcacttttctaagttcacacacagtatttctaagaatgttcagcatctactgaacatgaactgtgctgagtggaggtacagaaaagattggaatgccattcaggtcaaacatattgctgtctggggcagtggttttcaaactgtgttcggaagagttcaaggtgttgtaaggaagtccccttaggtgtcaccacggtggtaaaggaagatagttgtagcaggattcaggcccctactcttgcttcactacttcatccagagcagcttcacttttactctgggcttctgcacagttttcactcaaagggcttcatggccacaaagcctttggaaaaccaatgatctaagaataagtcggtcacaaaatgcttgatgtatcaagagaagccttttctggaatctggtgcagccttgtgagatgctgttaggtaaggggactccttggtagaatttcttacatttgtgtaaaaagttctggttcctgagtaattccaaagaagatgctatgaggaggttcactgtgcctttggatttggatcccaatggggtcagaatatggtttcctcatttcagtagggctacctacaggatttgaagtagaaaaaacagtggtccagtgacc

SEQ ID NO: 53761 - DNA, 640 bp, Homo sapiens
tcaatttcagtgcgtggtgccctcgaagcgcgccggagtacgggaggctagacagaaggctgaggccgaggtgctagagaaccttgccgtgctggaattcacgttgacgcccccacggagctctgctgcagagccctcgagtcccgcacttccggccgccaggtggcgctggttctgttgccaactcggagagactgagctgggccacgcaagatggcgccgtccgccttgctgcgtcccctttcccggctgctggcccccgccaggctcccgagcggcccttcagtgcgatcaaagttctacgtgcgagagccgccgaatgccaaacctgactggctgaaagttgggttcaccttgggcaccactgtcttcttgtggatctatctcatcaaacaacacaatgaagatattttagagtacaaaagaagaaatgggctggaataaacttttgaaacactaatgtagtatgctccgtatagtgattgtagctgttcctctggattcaccatctgttgagttgtaaatgtgagagaaaaagttatatgtgaatatatatcaagccagcatttgtattttgcatcattaaataaaaagaaataaaaatacttctgtattcttcagataaagcatattgtgacaa

SEQ ID NO: 53762 - DNA, 629 bp, Homo sapiens
  misc_feature (1)...(629): n = a,t,c or g
gaaaatgtgacgggatatatgcagtttccttaggggcacattctgagatgcttggatgacccacagggactttgttaaacacaaatcccatcggggaaacaggcagttcactatgaccttatgaaagttttaattcaaagcacttgaagatacttttttttctgggcttcctgatcttacttcagtaaggtttttataaagttaatatccaagtaagagtatagctttcaaaggctattcctcattcttaaatgcattaaactgttgattaataacattatctaaaagctgtcaaataaaaataagaccaaactctttacttgtacagagtggactgatcaagttgaaagcaacagaacaagcatctataagaattgattatatgnnnnnnnnnnnnnnnnnnnnnnnnnnnnnnnnnnnnnnnggcctaggacttcgcgagaccagttgggcaacatgaacaagatggaagaaactacggtcacatatgcaaatgggagaagatgatgaacacagaaaaattatgcaaagataatccctaaaccttctttctcatcaaaagttatagcaaggtggtttaatatatcactgacggaacacgatgccttggtttaatgaagaccngacgg

SEQ ID NO: 53763 - DNA, 801 bp, Homo sapiens
  misc_feature (1)...(801): n = a,t,c or g
tttttttttttttttttttaatcggtgttttgacagtttattttgaaggtcattttaaaaacaaagttaaagacaatctgagaaaaaaattgcacagaatacactcattaaataggtatggtttatggtgattaaatcaaaataagggaaatatgttatcttctgcaattccagaaataggttctgttgtccggaaggttcttatacatccaaaaagagggaatgatcatggcaattaaagctgcctcttaatcatgtaaatctacagtagcaactaaatttttctgttcttcccattaagtcagtttcgatcttcaaactgtgccttgttttttaaaagataagatgctagaaattcaatgggatttggtggtctttcctttgcaagcacagcaagtccctgtaataagataggcacaactgtctgatccaggtaggcacgagttggcaaaagactggagatctaccttctgctttgatgacttttctgcattaatcttctcattttctactattctctcaacgttggtctgtgagaccgtactcagagtgaggattttctgcaacctgcgtttgtccctccagcatctgctctggctccatggcggaccctgcaagtcacagtccccggataccagtccgcgcccaagccgttcgttcttaagagccctgcaccgcgccctcgtgccgctcgtgccgaattcttggcctcgagggccaaattccctatagtgagtcgtattaaattcgtaatcatgtcatancggtcatcaaaaagngtatnannnggnnanaaacacc

SEQ ID NO: 53764 - DNA, 1692 bp, Homo sapiens
acactagtggatccaaagcgctgccgccgattccggatctcattgccatgcgcccccgacgaccgcccgacgtgcattcccgattccttttggttccaagtccaatatggcaactctaaaggatcagctgatttataatcttctaaaggaagaacagaccccccagaataagattacagttgttggggttggtgctgttggcatggcctgtgccatcagtatcttaatgaaggacttggcagatgaacttgctcttgttgatgtcatcgaagacaaattgaagggagagatgatggatctccaacatggcagccttttccttaagaacaccaaagattgtctctggcaaagactataatgtaactgcaaactccaagctggtcattatcacgggctggggcacgtcagcaagagggagaaagccgtcttaatttggtccagcgtaacgtgaacatctttaaattcatcattcctaatgttgtaaaatacagcccgaactgcaagttgcttattgtttcaaatccagtggatatcttgacctacgtggcttggaagataagtggttttcccaaaaaccgtgttattggaagtggttgcaatctggattcagcccgattccgttacctgatgggggaaaggctgggagttcacccattaagctgtcatgggtgggtccttggggaacatggagattccagtgtgcctgtatggagtggaatgaatgttgctggtgtctctctgaagactctgcacccagatttagggactgataaagataaggaacagtggaaagaggttcacaagcaggtggttgagagtgcttatgaggtgatcaaactcaaaggctacacatcctgggctattggactctctgtagcagatttggcagagagtataatgaagaatcttaggcgggtgcacccagtttccaccatgattaagggtctttacggaataaaggatgatgtcttccttagtgttccttgcattttgggacagaatggaatctcagaccttgtgaaggtgactctgacttctgaggaagaggcccgtttgaagaagagtgcagatacactttgggggatccaaaaggagctgcaattttaaagtcttctgatgtcatatcatttcactgtctaggctacaacaggattctaggtggaggttgtgcatgttgtcctttttatctgatctgtgattaaagcagtaatattttaagatggactgggaaaaacatcaactcctgaagttagaaataagaatggtttgtaaaatccacagctatatcctgatgctggatggtattaatcttgtgtagtcttcaactggttagtgtgaaatagttctgccacctctgaccgcaccactgccaatgctgtaccgtactgcatttgccccttgagccaggtggatgtttaccgtgtgttatataacttcctggctccttcactgaacatgcctagtccaacattttttcccagtgagtcacatcctgggatccagtgtataaatccaatatcatgtcttgtgcataattcttccaaaggatcttattttgtgaactatatcagtagtgtacattaccatataatgtaaaaagatctacatacaaacaatgcaaccaactatccaagtgttataccaactaaaacccccaataaaccttgaacagtgaaaaaaaaaaaaaaaaaa

SEQ ID NO: 53765 - DNA, 3003 bp, Homo sapiens
cctgtggtagcagctactctgaaggctgaggtggtgcggctgaacaagctggaataatagaagctggagatgaaattcttgctattaatgggaaacctctggttgggctcatgcactttgatgcctggaatattatgaagtctgtcccagaaggacctgtgcagttattaattagaaagcataggaattcttcatgaattttaacaagaatcattttctcagttctcttctttctttagcaaatcagagtgacttctttaaaccacaggttgttgaaatggccaacactggtacagacacggactataaaaatctccaagcttgtgcttacacatgaagcctgacttaactgtatgtgcaacagcaatgaaattaactccagaagccttccacctgcgtcacccaggccgggagggttccttcgttccagtgcctgtcccctacctttatgttatgtttactgatggggatacaagatgtgacacacccttctttatttgaaacaaacaaacatttagctagacctttgcttccttcttgccagctctcccaacatacccaatcctggtgatcagggaactaaaagtctgagggggacacaaatgtcacacctaagaggacaatcaatcattttgtatgattttgtaagtaaatgacagaatgcttttaggcacattcaatggaaggaggagatgtaggtctgtatatgttaccctgaaaagagaataagacttacttaaaaaaatgaattatgacctgttaggctgagctcaggaattgtccaaaaaggaaaaagcaaaataattaattgagagtattttttagtgagtgtaatgtataatgtacgtatgcaaagttcaactcaataggttattgatcaccatgaagtattgatcattttctatctcaaaagtgtaagccataaggctgttttacagaatagcacttctgataagctgtattaaatagccatgagcttcactgcttagagggagcagaaaggtcaacatctaaaagcaccttacaactagtttttgaacctgtcttgataagtgcttgaattcaagactggtcagtacaagagcagacaaaaatatcacaagtcagtcagtcactgggtttccatttctgaattttatgcactccaaccatgaatttaaactaaatttttagaaatcaagtatctttctaagtgtccttggatttatagacaatgtatgtacaatccaaatagaggagcttaatggaatccttttaggagactggttggtttttttccctctttcccaacatgtttaagaaatgtaacattctaagtattggatctcttttcttgacctagtataatgacaactgcagtgacttaagtttttgctgttttcgttttcccgctttgcaatttcctccttttgccaaaaatgttttcctacagaagactgtcgtgactcacgctacttgggaaactcactctggccactcctcctctggtggcatgagctgcttcccagtagctattccgattggatattccgttcgtcgtcacatagctggcttttctctcctcatgatgtaccttattttcttaggtaaataattccaaactctcatcgggtcataaagaggaggagaaacagggtgagtcaaggtaaaggagcagaaatgtagttacaagccaggtcgtcttcagtggcacaaaccaacccgttgagccctgacaacatgagtggagagtgcatttgccatacctgtgtgcatgacactaagattttatgttggagatacttctttaaataacctacagcttgggtctatggctgtgacccccagattcatggaggggctttagccatcagctttgtacatcatcatttttctgaatgaccaatcccactaaacatctttgaagtcggcctagagaggtccttcagatgagagagaaatagctggcttgtctgagtccagatttctcatcaactggcaatacaaaggaaaatatggtacaggagttagttagaaaggtcttattgattttacttctacttttcactacagttacaggtagaatactgtaggaagtcagtgcaaggtgcatgcttgattgatagatattgattgtttttcagtctctggggtcagttttgtggtttctgctttcttgcctaaatcaaagactatttcaagtcaacaacactgaaaactgcttttcgcctccactcttacagctgtgcctaataataattaattaataaacgcacagccctatgtgaacagacaggaatttcttgtgcaatgtggagcaaatggaatggtctccttccgcaagtctttttaatcctcatatctggagtacaagggtagacctctggcttaccacatacactatgctaaagtcatcagccactgctactacatcttgccagaaggtttccctcgccaacaaacagttgaaatttaagggaagaagcaaaagctaaactgtctttgaccctaagatagatagaaagctatttatttgtcttcagtgttcaaggcatgactagtatttctaattagcctaataaattcccacactttctgaagtgaacactaatggtattgtcctactaaaactgtcattgtttctttttttttaactggtcagtcattcacaataagctatgaggggtaaataaatatgtgttataacaagtaaaccgtagttgccaagaatataccatgaagattaaagtaggctgggtttcatttccatcttcccacacatctcattgaatttgatggttgacttaattggcaccataactttgtatgatattatacattaacctttatttatgtaaagtaaaatgccttatatattaaagagtaagtgcaataatatgaaatagcctgtacattttaaaaatgttgtcaccaagttatataaatccacatctctgtaaacaaccttttttaagtaattttaaaaaaaataaacactctgcttactacttgaaaaaaaaaaaa

SEQ ID NO: 53766 - DNA, 899 bp, Homo sapiens
cggggctgagccgtggccagggttatggagaggcccgcctctccccagatggcgtcgtcgagccctgactccccatgttcctgcgactgctttgtctccgtgcccccggcctcagccatcccggctgtgatctttgccaagaactcggaccgaccccgggacgaggtgcaggaggtggtgtttgtccccgcaggcactcacactcctcgggagccggctccagtgcacctacattgaagtggaacaggtgtcgaagacgcacgctgtgattctgagccgtccttcttggctatggggggctgagatgggcgccaacgagcatggtgtctgcattggcaacgaggctgtgtggacgaaggagccagttggggagggggaagccctgctgggcatggacctactcaggctggctttggaacggagcagctctgcccaggaggccttgcatgtgatcacagggttactggagcactatgggcaggggggcaactgcctggaggatgctgcgccattctcctaccatagcaccttcctgctggctgaccgcactgaggcgtgggtgctggagacagctgggaggctctgggctgcacagaggatccaggagggggcccgcaacatctccaaccagctgagcattggcacggacatctcggcccaacacccggagctgcggactcatgcccaggccaagggctggtgggatgggcagggtgcctttgactttgctcagatcttctccctgacccagcagcctgtgcgcatggaggctgccaaggcccgcttccaggcagggccgggagctgctgcggcaacggcaagggggcatcacggcagaggtgatgatgggcatcctcagagacaaggagagtggtatctgtatggactcgggaggcttt

SEQ ID NO: 53767 - DNA, 914 bp, Homo sapiens
  misc_feature (1)...(914): n = a,t,c or g
ttttttttttggtggaattaattactcttttattagcacaaaataacagcaacctagcagccgcacggcccgagaataagttaaggcacagagcaggcgacgggcggctttcccagggccaggcctgcatgccccgaacttcctgagcaaactccctaggggctggggtttcgagggtcctggagggcctcttcccttgagatgaggggaacggaacagggcaagaggggcgcccccatgggccgcaagcgggttccacgctgcgccgcgatcacttctcgaagtagggcaggtagaagaactggaagccccggtggcccttgaccgcgcagtagatgaagatcacgtgatagactccaggcaccaacaacaggaagcccggcacgaagaagatggcgctggagacacctggagagggggtcgcctccagtcccacgccgaccaggatcagcaccagccccagcagcaggagcaggaaggaggccagcaccactcggcggttcttctggatcaaagggtgttgggtccagctgcagcaggtgttgtaggagcgctgggtgctgctgctgatggtgctgaaggaccactgggagctgcggatggaagttcggctggaatccctggccctaacctggtgccgactcccccatccggctccggagaggcctgggctccatcctcatcgttctccaggttctggtagcgcagccgggactgcttgtcctcgtcagccacctcgaaccgggcccgacgctcgaagtgcagcggcccaaagcgcgcgaccccgctggactcgggcccagggcccccgtcctccagggacagctcgaaggcatcatcaatgctgaactggggccgggcggcgctcatggccccggccccgcntncagccgtgcgccgccgccatctgcgcc

SEQ ID NO: 53768 - DNA, 394 bp, Homo sapiens
  misc_feature (1)...(394): n = a,t,c or g
gaacttcagtggtgctgatctttctcgtttggaccttcgatacattaacttcaaaatggccaatttaagccgctgtaatcttgcacatgcaaatctttgctgtgcaaatcttgaacgagctgatctctctggatcagtgcttgactgtgcgaatctccagggagtcaagatgctctgttctaatgcagaaggagcatccctgaaactgtgtaattttgaggatccttctggtcttaaagccaatttagaaggtgctaatctgaaaggtgtggatattgaaggaagtcagatgacangaattaacctganagtggctaccttataaatgcaaagntngaaaacttnacctctatanngttcttntngnttgaactgntttanagaatagtnatat

SEQ ID NO: 53769 - DNA, 534 bp, Homo sapiens
cccaccgcgtccgggagcagatctgatgatgaacagagcaggtgagcacgtgtggagtgagagcgaggactgcctgcctttcttgcagctagcacaggattacatctcctcctgcggcaagaagacgctccacgaagtcctggaaaaagtcttcaagtctttcagacctttactggggcttccggatgcagatgacgatgcgtttgaagagtacagtgctgacgtggaagaagaggagccagaggcggaccacccccagatgggggtcagccagcagtaaatctgggggctcccctgagaaggagagtgagccccacagtaacctaggtggggtcactgcccctcctgggttagcattttgcattagcacttcgaaataggacatctggctcccagcatccaaattaaaatgaaatacctttttaacgaccacaaaatatctgtgaatgagcttttgctcaggaagtggacctgaatttcactcccgctttcagtggggttttctatggagttgtcttggtagcctttgccatt

SEQ ID NO: 53770 - DNA, 699 bp, Homo sapiens
atgttaccaggctggtctcgaactcctgcctcaggttttaaaaagtgggttacttgatccagaaaatccaaaagctttggaaattccaggaaagcaactactcttttggcagtggactcttccagggttgttaatcccactctgacacaatatggatggactagggaggcttcctgattatccaaatggaataccaagcatgccatcatctctccaaagcaagcccaaagggggctttaacttcccaaagtgctactgtaatcaccaattccccctgggcctcccagtgctaaataataagccaaagccaaaaaataaagtgtcattcagtgcagttgtcactttgcagccctgcaaccccgaggcacttcttccatgaggaagaacactttgtgacccttctttggcagctcaagcaaagacacaagaatgcatctgagagctgacaggtactagtcgagagttctatgagtcccctatttctatctgtggtagtaatgcattctttcctccactgcttccttgaattttagtgttaaaaattaggagaatctgctgcctaggctctgtccccttgaagttgatggagtcaaaagtgactctctttggtctgggaacaaccagcacagtcctcctgaagcgcttgctcagtcaatgagctactctttgcagaggatcagggaactaaggtatgcctgg

SEQ ID NO: 53771 - DNA, 422 bp, Homo sapiens
  misc_feature (1)...(422): n = a,t,c or g
tttgaagttngatggccnnnnnnnnnnnnnnnnnnnnnnnnnnnnnnnnnnnnnnnnnnnnnnnnnnnnnnnnnnnntctcgaggatccgaattcgcggccgcgtcgacgtttcagggaattattcttttttctgcaatagttggatttatctacgggtacgtggctgaacagttcgggtggactgtctatatagttatggccggatttgctttttcatgtttgctgacacttcctccatggcccatctatcgccggcatcctctcaagtggttacctgttcaagaatcaagcacagacgacaagaaaccaggggaaagaaaaattaagaggcatgctaaaaataattgaggttttcatgattcagcacctgcttttgtttctgtgagatgagctaaattgctttcataccccagataagag

SEQ ID NO: 53772 - DNA, 4312 bp, Homo sapiens
catttctgtaatccctgctaattgaggtcaaggctgacatctaagatgttctgtggcggaacctggcccccatcaggggcaacctttaatttggattctggaagactaaaactttgagatctctcccccgccccccaggctcccccggtagctctcctccggcggtggcccgcgctcggtggatgtggctggcagctgccgccccctccctcgctcgccgcctgcttttcctcggccctccgcctcctcccctcctccttctcgtcttcagccgctcctctcgccgccgcctccacagcctgggcctcgccgcgatgccggagaagaggcccttcgagcggctgcctgccgatgtctcccccatcaactacagcctttgcctcaagcccgacttgctggacttcaccttcgagggcaagctggaggccgccgcccaggtgaggcaggcgactaatcagattgtgatgaattgtgctgatattgatattattacagcttcatatgcaccagaaggagatgaagaaatacatgctacaggatttaactatcagaatgaagatgaaaaagtcaccttgtctttccctagtactctgcaaacaggtacgggaaccttaaagatagattttgttggagagctgaatgacaaaatgaaaggtttctatagaagtaaatatactaccccttctggagaggtgcgctatgctgctgtaacacagtttgaggctactgatccgcgaagggcttttccttgctgggatgagcctgctatcaaagcaacttttgatatctcattggttgttcctaaagacagagtagctttatcaaacatgaatgtaattgaccggaaaccataccctgatgatgaaaatttagtggaagtgaagtttgcccgcacacctgttatgtctacatatctggtggcatttgttgtgggtgaatatgactttgtagaaacaaggtcaaaagatggtgtgtgtgtccgtgtttacactcctgttggcaaagcagagcaaggaaaatttgcgttagaggttgctgctaaaaccttgcctttttataaggactacttcaatgttccttatcctctacctaaaattgatctcattgctattgcagactttgcagctggtgccatggagaactggggccttgttacttatagggagactgcattgcttattgatccaaaaaattcctgttcttcatcccgccagtgggttgctctggttgtgggacatgaactcgcccatcaatggtttggaaatcttgttactatggaatggtggactcatctttggttaaatgaaggttttgcatcctggattgaatatctgtgtgtagaccactgcttcccagagtatgatatttggactcagtttgtttctgctgattacacccgtgcccaggagcttgacgccttagataacagccatcctattgaagtcagtgtgggccatccatctgaggttgatgagatatttgatgctatatcatatagcaaaggtgcatctgtcatccgaatgctgcatgactacattggggataaggactttaagaaaggaatgaacatgtatttaaccaagttccaacaaaagaatgctgccacagaggatctctgggaaagtttagaaaatgctagtggtaaacctatagcagctgtgatgaatacctggaccaaacaaatgggatttcccctcatttatgtggaagctgaacaggtagaagatgacagattattgaggttgtcccaaaagaagttctgtgctggtgggtcatatgttggtgaagattgtccccagtggatggtccctatcacaatctctactagtgaagaccccaaccaggccaaactaaaaattctaatggacaagccagagatgaatgtggttttgaaaaatgtcaaaccagaccaatgggtgaagttaaacttaggaacagttgggttttatcggacccagtacagctctgccatgcctggaaagtttattaccaggcattcgtgacctttctctgccccctgtggatcgacttggattacagaatgacctcttctccttggctcgagctggaatcattagcactgtagaggttctaaaagtcatggaggcttttgtgaatgagcccaattatactgtatggagcgacctgagctgtaacctggggattctctcaactctcttgtcccacacagacttctatgaggaaatccaggagtttgtgaaagatgtcttttcacctataggggagagactgggctgggaccccaaacctgggagaaggtcatctcgatgcactcctgaggggcttggttctgggaaaactaggaaaagcaggacataaggcaacgttagaagaagcccgtcgtcggtttaaggaccacgtggaaggaaaacagattctctccgctgatctgaggagtcctgtctatctgactgttttgaagcatggtgatggcactactttagatattatgttaaaacttcataaacaagcagatatgcaagaagagaaaaaccgaatcgaaagagtccttggcgctactcttttgcctgacctgattcaaaaagtcctcacgtttgcactttcagaagaggtacgtccacaggacactgtatcggtaattggtggagtagctggaggcagcaagcatggtaggaaagctgcttggaaattcataaaggacaactgggaagaactttataaccgataccagggaggattcttaatatccagactaataaagctatcagttgagggatttgcagttgataaaatggctggagaggttaaggctttcttcgagagtcacccagctccttcagctgagcgtaccatccagcagtgttgtgaaaatattctgctgaatgctgcctggctaaagcgagatgctgagagcatccaccagtacctccttcagcggaaggcctcaccacccacagtgtgaatcctgaggttgcgccattggcggttctgctgcttcgctgcagggataaggtggagctaccgaacagctgattcatatgccaagaatttggagtcttctttcaaaccagtgggggttggacaatgaatgtagttaactggttcctgctcacactccagaattaaattctattgaaaaaggaaaatcagcaattcagcaaaaaataaataaaaaataaaaatgtaaatatgatagtaataaaatagagcataacgaaactgtgaaactttctgaagccttgtcagtggttaaaagtatttaacactctactgttaatgacagatgttctgtttttataacctaccaaaaggaaactagaggcttcttggtgaagagcatttttgtgaagtgggttctgcaaggagcctataaagccaagggtggtgtccatttctgggaatggttaaacacaaaaggctgatagctggtatcacatagttggagtcagtgcataattccaagtggctttttttttttttggcacggggactgatcaggaagatatattcctgcataactcaatctgaaccaaggattgtagtttagttttcctccttgccttcccttctgtgtgaccgaccccttgggccaaaaaaaaaacaaaaagcaaaaaacaaaaacctaccctgttctggtttttttcctccctttagttccacccccaacccccattccctggtgtccttcttagagatgaagaaataataaggaaacatctttcatagccacattaaataagagaaactgatatacattatttttttctttttaaagatgacttataagaaccctgaaatttatataggtgagacaatagaaataaaaagatcttcagccaggcctttctgaaggagttattctgctaaaaatggtcttagttgtctgaaaagccagctcttgaacctcttcacaacagtatcaacactggcttctcccggttcattttatgccgtgcgagaagtcagtggtaactgctgcagggcttaatacattagtggtaactggtttaaaaaacaaagactgtaagcctgtgtgtgccactgtttgcttcaacagtatatcctactaataagcctcacctatttaatccaatgagttttaaatctaaatctcattcccttcttctttccctaccttttttttctttttttcttaaaaaaatattttgtgttattaacagaaattcatatttggtgtggcttaacggtatttcagaaggtcatcagattgtgagactgcttccttgaaacatttttgtgctattgttttaaaaaaataattaaaaaacagttggcgttaataaaaatgtcaatgtgaaactgaaaaaaa

SEQ ID NO: 53773 - DNA, 384 bp, Homo sapiens
cccacgcgtccgctgtcggcaggtcggattgtttgtgctgaacgaactgtcctcttgcttcagaagccccttttgagtgtggtctctggtgcaagttcctgtgagctgcctggcccggtgatgctcgacagcctggactctgcaacacctgtcaactccatctgcagtgttcaagagctacgaagtgaagagtgtcctcggaaaggaagtggggttgttaaattgttttgtccagtccgtaaccgcccacccgaccagctgcattggattggaggaaatcgagcttctgagtgcaggaggggcctctgcagaacactagcggttgccgcaggatctgtgaactttgcaatgtggctgcaagggtggtggtggtggtgggatttg

SEQ ID NO: 53774 - DNA, 416 bp, Homo sapiens
  misc_feature (1)...(416): n = a,t,c or g
tgggcttcaggtacctaaaacagatccaggacctgcccccaactggcctccctgagatgaacctgctggagatgtacagcctgaaggatgagatgggcaacctcaggaagttactagagtctaccccatcgccagtcgtcttctgccacaatgacatccaggaaggtaggagaaggcatctgagtctcctaacccaagatggaagagccagagggctctggagtgagcagaacctcaccccattcccccagggaacatcttgctgctctcagagccagaaaatgctgacagcctcatgctggtggacttcggagtacagcagttataactataggttgaggcttggaaagattggnttcccatagattcttgtttcccacaggggctctttgaaaacaaggccagcttgcccaggg

SEQ ID NO: 53775 - DNA, 597 bp, Homo sapiens
ttttttttgtgtgtatcaacctctctttttattaagattttgaaatatgttggtatcacagatataaaacattctcatgttctttaaagagaattcacttttatgctagaaatgatggaaagggcttggtccatgacactttgctgagttattttgcttcatctgcatattactttgggaagaagatacaacatggtaaaataacagttttgaagaagaaaaaaataataatgactgttctaataacaagtcaagtttttcttttgtttggttggtttcagtcttttcatgggtttaaaaatataatgcagacttaatgtctttttttccttcatcaggagaaaatcctaattccagttgtacctttcccccttttcttcaggccatccagtgaagagagagagactgaaatatctctgaaggattctacactagataactaggttgacatacctggttacagatgttaggtcaagatgaggtctgcatctaatcctgtataagagcagagatgtttcatagggtgctgtgagggctttgctaactctattttgtccgattggccagaaaaaggatgctcagaaactcgtgcttgtc

SEQ ID NO: 53776 - DNA, 413 bp, Homo sapiens
tgaagatagttccatattttggaattatgtttagcacctttgagttctgcaagagaatctgtctttatcaaaatggttacattctgtctccactgagctataaattgaccccaggagtcgatcagagtttgcagccccaggaattacgagaattaaagaagttcttcaaaacgagaaaaccgaagcctaaaaaaccaactctataaaatggaatggaactagaagtgcactgactgacagcatgttgcaatcacagataaatgtagcctcataactgtgcacctgaggagggatgagaagctactgctatctgctgctctgggaaatgagatggtttggccatgcaccacctcagatctccaaactgatgtccctgtgaacacctgcactatgagaaggtttcccaacaagag

SEQ ID NO: 53777 - DNA, 790 bp, Homo sapiens
gtttataaacagaagtttaaacttgtaagcttaagcttccgtttataaacagaagtttaaaattataggtcctgtttaacattcagctctgttaactcactcatctttttgtgtttttacactttgtcaagatttctttacatattcatcaatgtctgaagaagttacttatgcagatcttcaattccagaactccagtgagatggaaaaaatcccagaaattggcaaatttggggaaaaagcacctccagctccctctcatgtatggcgtccagcagccttgtttctgactcttctgtgccttctgttgctcattggattgggagtcttggcaagcatgtgtatgtactgcccctgtttttgcaagaggaagtatctagaatttcaaatatttagcaacaaaaggttattccttcagtggaagatttataataatgataggtgataggcccacaaggaggacttacaatgtggaacttagtctctttccctcactcctgtagagtaattgctttccctacccctttaatctttatactacttctgcaaatgataaaggatgatggctctattgagaatttacaattttttgtcatttttttaatgtggagttcacgtaactttgaagatagaaatgaaaaaaatgaacaaactacaaaacatcagtgaagagctccagagaaatatttctctacaactgatgagtaacatgaatatctccaacaagatcaggaacctctccaccacactgcaaacaatagccaccaaattatgtcgtgagctatatagc

SEQ ID NO: 53778 - DNA, 833 bp, Homo sapiens
ccaggtcaccacctagaggggaggaagacctcgctttggagagtgggaataaaacgctcgtggaaaagggtacacgcttttctgggaaagtgaggccaccatggctctggagaagtctcttgtccggctccttctgcttgtcctgatactgctggtgctgggctgggtccagcctttccctgggcaaggaatcccgggccaagaaattccagcggcagcatatggactcagacagttcccccagcagcagctccacctactgtaaccaaatgatgaggcgccggaatatgacacaggggcggtgcaaaccagtgaacacctttgtgcacgagcccctggtagatgtccagaatgtctgtttccaggaaaaggtcacctgcaagaacgggcagggcaactgctacaagagcaactccagcatgcacatcacaagactgccgcctgacaaacggctccagggtaccccaactgtgcataccggaccagcccgaaggagagacacatcattgtggcctgtgaaggggagcccatatgtgccagtccactttgatgcttctgtggaggactctacctaaggtcagagcagcgagataccccacctccctcaacctcatcctctccacagctgcctcttccctcttccttccctgctgtgaaagaagtaactacagttagggctcctattcaacacacacatgcttccctttcctgagtcccatccctgcgtgattttgggggtgaagagtgggttgtgaggtgggccccatgttaacccctccactctttctttcaataaaacgcagttgcaaacacctgaaaataaaaaaaaaaaa

SEQ ID NO: 53779 - DNA, 410 bp, Homo sapiens
gggggacgtgtcgcgcggccgggtggcctcggtcggtaccctgggcgcggagcagctgcctcattagtattcgtacccacgaggcggcgcagcgggccctcggggacagcgagcgtcgcggccatggcttatcactcgggctacggagcccacgctgcaccgttttgtgtctgtgagcaaactcaagtatttttttgctgtggacacagcctacgtggccaagaagctagggctgctggtcttcccctacacacaccagaactgggaagtgcagtacagtcgtgatgctcctctgcccccccggcaagacctcaacgcccctgacctctatatccccacgatggccttcattacttacgtgctcctggctgggatggcactgggcattcagaaaaggttctccccggagg

SEQ ID NO: 53780 - DNA, 1620 bp, Homo sapiens
gtttcaagaacacatgaaattcttttaacaccagattagtgtgttaccccaaatgaacggttctagccctctattaagaaataaagggaccataagcattttggctgcttatggctgtgtgttactacttacaagagtcttgaaaattatacagaactttgccttctttttttaatgtcttccacaatgttgtgactgattataaccctgtttcccctcagagaagagctatggctcagggatctgtgttgactctggcatttagtggctttgtgaaggaaagaaaccattaaatgacctgacaaaaactgactcatgtctttaaagtagttgaagccacttttagaatgttactctcggttgcttttgtctaattctaatgggcttaaagccaagaaaaccatagtataaatctttttgtgtacctatgctagtgtttaaatggcagttcgttgtgataaagtatcagtcacttcaagttttctgtgaaagtttttaattaggttaaaaataattttggcatacgtctctactcagtttataaagcagttccacaccatgcaaacaaaactctaacagcaaagggttatcttgacctgatgttacttgaatctgagagaaagtcattacttactactgcactcctgcttttgtgggaaaaattttcttcttccccagaagagttaacagttgagtgttcagctcctgacttacctttaatttagaggcaatattattactgtttaagtgattatttgcttaacacaggttttattttgtctttttgctggtagattatacaagggacaactttagtgatgaggcatgtggatgatttggtgggagtaggtatatacttagtggaatggtttattttatggaagagaattcattggaggtgagattgaagtatattgtgaagtgggatttgaacagcacatatgctctggtttgctcaaataactgcagtttatgcttacatctaaattttgtttctgttacctaaacgggagcttctagaattacgaaggccatacctgccacatttataaaataatggttttatccctgcccccaaatcatcaggttcctcgggtttaagagaagtggtctaatagacaggaatagaagttgtggtggaggtgatttgggatagactaggtttccttatgcaagtggatatgagctcctcatagaaaccagacctactgtattagacagtaacctctaacctcacctccaagcccaagtatatggccctgctgggttacctggtgactacatttcccagattcactctaaattcaaggtagtgacccaaataaattgggaaaggagggggtcaaggaggaaaagctgttgaaaatctttctcctatttaagagaaatatatgccctagagctgctccagcacccttggtttctgatttttttaatattgaatatggattagaagaatgaaatcagatgacacctgactgcaaaaatgtttataagcaaatagccttcttacattttggtataaagctgtgaacttcgtaactttgtaaagcaagatataaagcaaatacaagaggaaaataaagtacttttactaattgaaaaaaaaaaaaaaaaaaa

SEQ ID NO: 53781 - DNA, 540 bp, Homo sapiens
atgcgtctggcacatggcaaggcccaagccaacccggcaccccgtagatgggcagctacactgccacccaagcacggagatgtggccgcggcactgggtcccccagtgggtcccatgggggaagaacttccctttgctggggtgggcagcctgccctgagctatcaacactggatttgttgtcttctgcacagctactgtgaagataacgtaaggagaagtggtcagttttcattttataactgacacagttgggacaaaatatatacgtgtacatatatttaagacactaattgtgtgggagagtttagtagaggcctgtgcagacacaaggcaaacagcgtcagcagcgtgggggtctcctgggccagctcggcacctgtgggtgctctgaccctgggggtggggacagctccgtgctaaccccagcagacagttgttggtgcacagtgtctaggaggcgtgggaatgggtgctgtcttcctcttttcacatcatggcgacagtaataaagcccacctccagtggaaaaaaaaaaaaa

SEQ ID NO: 53782 - DNA, 420 bp, Homo sapiens
gcggcacgaggggatctgctcccaagcactctcaggttgttggcagaatttgtttccttatggctgtaggattcatggcaagttgcttcttccaaaaccagcattggagacagactagcaagatgggcactacactcttagataatcaaataaatgcaatcatgtgcctcgtgtcaccttttttgcattccattcattaagaacaagttgcagttcctacctacactcaaggaagggaggaattacacagaagtgtgaccacaggaggcagggctcatggaggcctccttaaagtcccccagccaaacctgaaaagtcaatcctggaccttatcatagtggctgtatagtttagaagggttcttcagattggcattcctttgcctcatatcatcacttcaaaaccctataaggggtttgt

SEQ ID NO: 53783 - DNA, 2306 bp, Homo sapiens
ttttttttttttttcagtctgtcatttttattaagcctgcagagctgttttttttttctacacacgacaaatactttgatataatctaggataataaaatagttgaacaactttttaagatttatatttgtatagaaacaatctgtggaactcctcccctcaaaatgaaggtgtctaaaaacagtgattcatcaggcattgctttaaataattgtttggttaaaagttgtggtttccattctcaaccgaaatgcgtctccatgcagttttccttgggtccaaagcttaaggccttgggaagggggccaagaaaaaaagaacggccactctcctttctgtccttcccttgtgtggaggacagtgattgaaacaggggagttaaaaagccaggaagaaaagaaatcaattgcacatctctagttcgcaagcgtcaaagtcacaacaagtctgtacacaacaactctctatctgtagatatgaaattccatcatgatagcacagcgcctgcttgcccctaaatgttcctttcttctgctaatcatgtcagttactatggatgggctgtggccataagttctccctcaagggctggtccttctgtcaccttgaagtgtcagcccctgaattatgccacttggatgctatgtcttgatacccaataaaggtctaccatcccctaagaaatcccttaccccaccctcaaacccccaaagtgcctaagagtgaagacgaagatgccatggagacggcgtcttcagtgaacacctccccaaagatgcccggggactcgggcctatatcatcccattgatcttagtccactcgtagatgtcctgttcgcacactatgtcagagttgatgaggaggtatctgtcacctacacagaaatgcttctgacaggcggcgcacttgaaacattccaggtgatacactttgtctttcacccgcattgtcatctcataggcacgaatccgcttgtcacaggatgcgcagagaccgtcttgcccaaaaagcctgagatagtctctccggcagagcttccggcccagtttgtagtagaggcgccgccccacctcacccagccggcagccacagaggtcgcagctcaggcagtcctcgtgccagtactggtcgatggccttcaggaagtagcggtccccgatgttctgctggcagccgccgcatgtcagcagggatggggggatctgcagcacctcatccactggttcctctgaagggtccaggctcttcctttcgatggccgaggacattggggagggaggcggggtgccgggcggcgggggcgctccctttgtggcgcggggctggccggctgccggggctcggaccccctcgggtgctcgggcgccgccgccgccgccgccgtcgccgccgctcctgcctccgcttgctcggcctccgccggcgagctcgcccctccgcgctcaaggacagtcaccgcgctcccttccatcccggtcccgccgccgccaccgcccggtccctctcgcgcgctgtcgccggctccgcgccgcccgcggggatggtgtgcgcccgcccggccgcccggagcccctggcacctttccggccccgggtcgcggcgccctgctcgccgccgagggcagagagggggcggcggcctaggggcggggaggggaccgtgcgtctctctccgggcttcctcctctctcgggaaggtctattttggctcaggcttccctctgtctctgtttcatttcctttttcctgcctctccactagctactgcaagttcaggttgaaaaatatcttcttttcagagcagttgttacagcagatgatgtaatcctggtggcttcccccatcagatctaggctgcctgccccacggataccttctgggctaattgcctgctttgcacctgttccttctcgggaggccctggcaccctagcacctggtgcctgtgccatctcccctctctgccaggacacccagaggcccttgtgaatagcaaagcccacttaacggctgagggcaggtgggggtatttccttctcaattctgctcaaggcccgttgctgttctttgaggatgttgcaaatccagggtttggagggctgggcctcttggtggcctggttgtctatctgatagggcggagccttcacccttgcagcgagctctctcacaccagatgtgctctgcgtggaatcctaggccatcaggggattccttagcaagccctgcaggacccaaatcctaactcagaccctcatcctcctactcagaatgtggagacttgtgatcctcagtttggacgaattc

SEQ ID NO: 53784 - DNA, 1986 bp, Homo sapiens
ggaagagcctgctacggtggactgtgagactcagtgcactgtcctcctcccagcgaccccacgctggaccccctgccggaccctccacccttcggcccccaagcttcccaggggcttcctttggactggactgtccctgctcatccattctcctgccacccccagacctcctcagctccaggttgccacctcctctcgccagagtgatgaggtcccggcttctgctctccgtggcccatctgcccacaattcgggagaccacggaggagatgctgcttgggggtcctggacagggagcccccaccctctcctagcctggatgactacgtgaggtctatatctcgactgggcacagcccacctctgtgctggacaaggccacggcccaggggcaaacccaggccaccccacaggccagcccaggcctgccggaaagggccgccctgctgtgtccctgcgaaaaaatcaacgcacgtttcagtgggccagcagcccacactgcccatggcttgaatactgtggacccccctgggactggcttttttggggaatccccaggaaaagcagccaagccagagggacctgccaaggaggactggcccctctgctggcctctggggtccacatagacagatggacagcagcaagcccatgggggcccccagagggaggctctgtgaagccaggatgcctgggcattccctggcaagaccaccgcaggatgggcagcagagctctgacctaagaagctggacttttgggcagtctgcccaagccatggcctcccgccaccgcccccgccccagcagtgtcctcagaacactctactcgcacctcccggtgatccatgaactctgacccctccccagtaaaggcttctgtagagagcatgctgggtctgcatctcctctcgtctcctccatggtggtcactgcccctggcaggtctctgaaagggaaatgcttttctgcagaggcccctgcttgggcagttcacagtgagaccgaccccctctgaatatgataacagcctgtttcacatgaggagatgttaccaatcccgttcgctctgacccttgctggctgatcaccttgagcaacttacttaacatctgtgttcctcagtttctcatgggtaatatagggataattactggcacctgcctcccaggccattctgacgtgtaaccgcatataggagcccactggctgagtagctaccatcatcgctggtggggaaactggtggtaggggtgtgagggtagtgggggtgtcagccccccaggtgtttcagaacaaggcctcgggcactcccaagtctgcctcttggctcccaccctcaaagcccatgttctgtgaggcccaagagaacacatggagtcttagcaaatgcactaatgtattccgggggactgtcacctggcaccactggggcactctgctggctacaactcatacgtcctgtggtggcattgggagagttcccccatgatgagggccaagatagaatctgtaccactcagtgctaccatccccacccctacaccacttccacacaggggcctcatggcatggtcagggtcccagctgtgggtgagagcagggcactgtccagctgtccactggggaagtcaagatgtcctaaggcccaggtcagggcatctggagtctgaaggaccctagttcctagaggcatctggcagcaagaaggtgaggcatcagggaacgggaatcaggctgggactgatcagaggtgaagggacagagagaggagaggaggaagattgagctgggggcaacagccaagctcacctgggcaggtctctgccacctccttgctctgtgagctgtcagtctaggttattctctttttttgtggctatttttaattgctttggatttgttaaatgttttctgtcttctgttaagtgtgttttctctggagatagaatgtaaaccatattaaaaggaaaaagtttcagacaagc

SEQ ID NO: 53785 - DNA, 437 bp, Homo sapiens; identical to SEQ ID NO: 21918

SEQ ID NO: 53786 - DNA, 1803 bp, Homo sapiens
  misc_feature (1)...(1803): n = a,t,c or g
gcggcacgagctgaccacagaagcttatgaatgggagccacgtgttgtgagtacagaggtggtcagagcccaagaagaatgggaagctgtggacaccatccagccagagacagggagccaagctagctcagagcagcctgggcagctaatctccttcagtgaggccctgcagcacttccagactgtggacctttcccccttcaagaaaagaatccagccaactattcgaaggactgggctcgccgcccttccgacactacctctttcgggcctccaaagctccaccagcgccttcgggaagaaaggggatttggtcctgacccattgctcagtgtggcctggatagccaagacccagtgcatggccgagtcctccagaccatctataagaagctgaccggctccaagtttgactgtgcccttcatggaaaccactgggaggacctgggctttcagggagcgaatccagccacagacctgagaggcgcaggcttccttgccctcctgcatctgctctacctggtgatggactcaaagaccttgccgatggcgcaggagattttccgcctgtctcgtcaccacatccagcaattccctttctgtttgatgtccgtgaacatcacccacattgccatccaggccttgagagaggagtgtctctccagagagtgtaatcggcagcagaaggtcatccccgtggtgaacagcttctatgccgccacattcctccacctcgcacatgtctggaggacacagcggaagaccatctcagactcgggctttgtcctcaaagagttggaagtattggccaagaagagcccacggggncttgctcaagaccctgggagctgtacttggccagggtgtcaaagggacaggcctccttgttggggagcacagaagtgctaatgggccagaagccccttccctttcaaggatctcacctttcacaggtgagagtgacctgcagtctcattcattccgaaggcgtatggctgatctgacctccgagatgaatggaggcttaaaggctgagctgcaggggctttcagggggtcagtggagccatgtcaggagcctggccaggccgcaccccttgctgtctcagcagatgggatataggaagctcctgggcttagctgtgggaagccaagtaccctcaccggcatgggacatgaggggcagctagacttcacccccttcccgcagacctgcctccagagcaaggagaattctgccttaatctgttgggctccagtctccgggttgaattccagtgtatcccactgggagtgaatggaatcatgaggtgggntggccccatctggaatgtnatgcaaaattccccacatgggaggagattcccaattagaggcagccagaattctgactccctggcagcagcagggctttcaggcaccagtgtctgtgttgttagaactcagaggaagaggcaggggcagcagccgacagggggcagcatgacccaagcaaggggcctgaggcctcagtgggggtagggcaaggaggtacctcacaggtgggtgtgaggccccctctggagtttctggccattcacttacccactctcttctccccctgacccccgctccattgtttatgatggaaaaacggacatttggctaggtgtctctcacggctgctccatcctagcccccacaagctggggcttcctcctgtagatgctgtgcatgccccatgatgagtttctggcctaattgagggaaggaggaaattcataccagcagttttcaaataaaagaattgttctaaaaaaaaaaaa

SEQ ID NO: 53787 - DNA, 324 bp, Homo sapiens
  misc_feature (1)...(324): n = a,t,c or g
aaatgtctttcggtatttgagatcactaatgactatgttccctacagtttaaaaagaaaaaaagaaacacacacacttgtcatcttttataatggttttgtcacaattcataatagacaaaatagaacaacaaacataaaattccaactgctccctcttttctctttgaaagagtctgataggtaagggaaaaaatagcatcaaacttggccatgatattanctaancngnatacncangnnataantntnntnnnanctgnatgtgatctcaaatggtgatcttganccgnntnattttttacagagaacananctgangccc

SEQ ID NO: 53788 - DNA, 433 bp, Homo sapiens
gaagaaccctgaggaacagacgttccctcgcggccctggcacctccaaccccagatatgctgctgctgctgctgctgcccctgctctgggggagggagagggtggaaggacagaagagtaaccggaaggattactcgctgacgatgcagagttccgtgaccgtgcaagagggcatgtgtgtccatgtgcgctgctccttctcctacccagtggacagccagactgactctgacccagttcatggctactggttccgggcagggaatgatataagctggaaggctccagtggccacaaacaacccagcttgggcagtgcaggaggaaactcgggaccgattccacctccttggggacccacagaccaaaaattgcaccctgagcatcagagatgccagaatgagtgatgcggggagatacttctttcgtatgga

SEQ ID NO: 53789 - DNA, 957 bp, Homo sapiens
tttttttttttttgaggagctaatgcattcgctctggtttattgaacaacagtccaactttacagcattaaataaggggcaaccgttcaggaggggaacgatggcttaaaaataaaaatgaagacagagccgggacagttcacatttccacgtgagtgaggaaaagcgaaggattgttagagacgtgaagagaacgctggcaatgctacagaatggagcccacggaggcgtgggctgccctgcgtccccggcctcggggcagaacagggagcaaccccaaagcctgccccactgtgtcccttccagctgcccttctgccgagaacacccggagctgagggttccaagttcacggcggaaccgcttcccttaaaaagaaagcaaaggttacgtggatttctcccgtgcttccttttccacagacttaaaccggctcaggacgtaaggataacattctgtgctgcttgcagccctgagaagtcagcagccgtgaaaggcaggtagttcctttgccctctgacaccccgagttcttggggtctcggcagaacactgcctggagctgagtggggtcatccctcctagacaccgtcctccccagcccagcttgtcttcacggaggcagagaacccgctgcacgtagaatccaagcaatatgctaagcctcctgaagtatttttcctccagttaaaaagcagttctacatgttggaaaacgtctttctgtttccctgaatgactgaaagcaactcgcaggaatccagccacggaaaacccctccgggggcaatattttaaaattcatttcccctatggtattcagtttaaaagagaagaatcaagagtcctttccggtaatcaaatcaaaaacaccttatgtggaaaagctggccgcacgggggaactggacttttagggctgagacaccgaagacataacctccggacccgtgagccaccca

SEQ ID NO: 53790 - DNA, 634 bp, Homo sapiens
gcctcccgtgtagagtgggtcaagacgagatacataaactctgcctggggccagtacagtagcgcgggccacggtgcccttaccaggctccagaaggagagggccccgagccttctacaaggggttcatgccctccttttctcgcttggggttccgggaagtggtgaatgttgtcaccttagagcagcgtgaaacgagccctcatggctgccggcacttcccgaggaggctcccttctgagcctctcctgctgctgacctgatcacctctggctttgtctctagccgggccatgctttccttttcttccttctttctcttccctccttcccttctctccttccctctttccccacctcttccttccgctcctttacctaccaccttccctctttccccacctcttccttccgctcctttacctaccaccttccctctttctacattctcatctactcattgtctcagtgctggtggagttgacatttgacagtgtgggaggcctcgtaccagccaggatcccaagcgtcccgtcccttggaaagttcagccagaatcttcgtcctgcccccgacagcccagcctagcccacttgtcatccataaagcaagctcaaccttgaaaaaaaaaaaaaa

SEQ ID NO: 53791 - DNA, 390 bp, Homo sapiens
cggacgcgtgggcggacgcgtgggcggacgcgtgggtttgatttttcaaaagtctattggaatcctcgtctgtctacagaacacagccgtatcacagaacttctcaaacctggggatgtcctatttgatgtttttgctggggttgggccctttgccattccagtagcaaagaaaaactgcactgtatttgccaatgatctcaatcctgaatctcataaatggctgttgtacaactgtaaattaaataaagtggaccaaaaggtgaaagtcttcaacttggatgggaaagacttcctccaaggaccagtcaaagaagagttaatggcagctgctgggtctgtcaaaagaaagaaaaccctctgtgcacgttgtcatgaacttgccagcaaa

SEQ ID NO: 53792 - DNA, 2028 bp, Homo sapiens
ggcggagtcgttgaggtctccgcgccgctccctgtacaaactggtgggctcgccgccttggaaagaggctttccggcagagatgcctggagagaatgagaaacagccgggacaggctcctaaacaggtaccgccaggctggaagcagtgggccagggaattctcagaacagctttctagttcaagaggtgatggaagaagagtggaatgctttgcagtcagtggagaattgtccagaagacttggctcagctggaggagctgatagacatggctgtgctggaggaaattcaacaggagctgatcaaccaagagcagtccatcatcagcgagtatgagaagagcttgcagtttgatgaaaagtgtctcagcatcatgctggctgagtgggaggcaaacccactcatctgtcctgtatgtacaaagtacaacctgagaatcacaagcggtgtggtggtgtgtcagtgtggcctgtccatcccatctcattcttctgagttgacagagcagaagcttcgtgcctgtttagagggtagtataaatgagcacagtgcacattgtccccacacacctgaattttcagtcactggaggaacagaagaaaagtccagtcttctcatgagctgtctggcctgtgatacttgggctgtgatcctctagagccagcttggactcacatcattctatggggttgaagacaactcattccctctgaggagccttgtacatacaagccttttatttataacttattttgtattgaaacttttaaacaatactgaagaaaaaaaaacttttccgacatctgttcttggtcttttgtgacgcaggttgaagggggaggaatagaaaaagacaaactgccttggaggagataaaccaattttatgtctatcatgttatacaaaaatctagaaataatagatttgtacagaaaaaaatgataataaatgagagcacaaaacatataatttaaatctggtattttttcccccatgatattaggatgataatcatttcaaagcacatgtctagcttcagagtaggatttgttcactggccaaagcctgccatgaaactatggctttcagcatctgtctgctctactggctcttgacaaaactcttgaggtcttcaagaaaagtaatgtactcctggtgctccagggctgtgctgagctccaccagctcatctgcaaaagtgttgtccacccctcggtcggcaaggaaatccattaggtggtcatataaggcccagtccaaggaatctgtgttgagtgtataattagtatccttccattcagactcgccagtggactgaaagctaacttccctgatagagaagatgtcactctcagcctcgtcttcttgtccaacctcatcctctggataatgacagtccaacacaagggccttcttgccatcatcattctttataacttcaaccacgaaattgggagttgatgtcagttcaggctcctgttcttcaaccttctgcccttgcgagggttcctcctcaccatcaaatgttggtgggatgctgttgttaatgttgaaagtgaccgtgattttttccccggcaactttccgcactaatttcgcttctgtcccattcagttccagctcccaacctccagacatcttagggagggttttatgcttctgaatttttctttcctccttaatttcatcactcaggaaatcaacaaaagctttgtctccgtcggtgtgcagcgagccgcagccacagccacaggcgcagggtccgcgaggccgcaggaggcccggccgccgctcggaacctgcgcgcacgctgagcagcccgaagggccgggtgcacagccggggtgccggctgcaggagctgccggaaaggcgaggcgggcgcggcagcgcggaggccggcgacggaggagcccagcacacggggcacgcagcgcagcagaggcagcatcgcggaaacgactgcgaacacgtgcagatgcgaaggacaacccaggcctaggcgccccgcgacctgaggcgccgccgg

SEQ ID NO: 53793 - DNA, 409 bp, Homo sapiens
gctactgactttaaggctttttcccccttgaaatgtccagattcctgtggttcatcccaaggaaattttcacacaaagcttggcctttgccctcaatataggtgttttaggatggtgacaaaccatggctgctgctttctgcccagctcgccagtcctccccaaagagttgcgcatcagcacctggggatctggaccctgcgggtgaagggatggggagggacgtccctggagtctcttctgtctttgttccttcttattttggcattcgatatcagcagcctctccccaaagtacttgaagtcagttttagatgctttattttatttttctagtcaaaaacgtgtttcccccagtgtttgaaaactcgtccgaatcttttcagtattttccatgagtattgtggtact

SEQ ID NO: 53794 - DNA, 348 bp, Homo sapiens
  misc_feature (1)...(348): n = a,t,c or g
ggctgccattgccagaaagcctgccaaacctcaaccgaaacttaaacccaagggcaatgtgggaattgggggttctgctgtaccaccacctcctataaaacacaacatgaatattggaacttgggatgaaaaagggtcagtggtaaaggctccaccaacccaaccagttctgcctcctcaaactataatccagcagcctcagccattaattcaaccaccaccattggtgcaaagcccaactgcctcaacagcagcctcaaccaccacaaccacagcagcaacaaggacctcagccacaggcccagcctnaccaagtgcagcctcaacagcagcagctgcagaatcgct

SEQ ID NO: 53795 - DNA, 2650 bp, Homo sapiens
gcggccgcattgcggagagcggctgatcgcagtccggaggtgaggcggaactctgagcaggtggtccattatggctgacatgcaaaatctggtagaaagattggagagggcagtgggccgcctggaggcagtatctcatacctctgacatgcaccgtgggtatgcagacagtccttcaaaagcaggagcagctccatatgtgcaggcatttgactcgctgcttgctggtcctgtggcagagtacttgaagatcagtaaagagattgggggagacgtgcagaaacatgcggagatggtccacacagggtttgaagttggagcgagctcctgttggttacagcttcttcagtgtcaacaagccagcagaaaataagctttccgatttgttgggcacccatctcagagcagattcaaagaagtgataacctttcgggagaagaaccgaggcagcaagttgtttaatcacctgtcagctgtcagcgaaagtatccaggccctgggctgggtggctatggctcccaagcctgggccccttatgtgaaagaaatgaatgatgccgccatgttttatacaaaccgagtcctcaaagagtacaaagatgtggataagaagcatgtagactgggtcaaagcttatttaagtatatggacagagctgcaggcttacattaaggagttccataccaccggactggcctgggagcaaaacaggggcctgtggcaaaagaactgagcggactgccatctggaccctctgccggatcaggtcctcctccccctccaccaggcccccctcctcccccagtctctaccagttcaggctcagatgagtctgcttcccgctcagcactgttcgcgcagattaatcagggggagagcattacacatgccctgaaacatgtatctgatgacatgaagactcacaagaaccctgccctgaaggctcagagtggtccagtacgcagtggccccaaaccattctttgcacctaaaccccaaaccagcccatcccccaaacgagccacaaagaaggagccagctgtacttgaactggagggcaagaagtggagagtggaaaatcaggaaaatgtttccaacctggtgattgaggacacagagctgaaacaggtggcttacatatacaagtgtgtcaacacgacattgcaaatcaagggcaaaattaactccattacagtagataactgtaagaaacttggcctggtattcgatgacgtggtgggcattgtggagataatcaacagtaaggatgtcaaagttcaggtaatgggtaaagtgccaaccatatccatcaacaaaacagatggctgccatgcttacctgagcaagaattccctggattgtgaaatagtcagtgccaaatcttccgagatgaatgtcctcattcctacagaaggcggtgactttaatgaattcccagttcctgagcagttcaagaccctatggaacgggcagaagttgggtcaccacagtgacaggaaattgctggataagcgaagtgcccactgggttctttgccctcccttcacaccatgggataaatctgtatcaagacggttcttttctagatttcctctacctttttgctcttaaaactgcttctctgctctgagaagcacagctacctgccttcactgaaatatacctcaggctgaaatttggggtgggatagcaggtcagttgatcttctgcaggaaggtgcagcttttccatatcagctcaaccacgccgccagtccattcttaaggaactgccgactaggactgatgatgcattttagctttgagcttttggggggttattctaccaacaaacagtccattggaaagaaaacagtcccctggaattaacagatcagaatgttcacactggttaatctttttttaacaatgagcatgaaggtaagcagaagctggtgtgtttccagatggttcttctaaccaaactaatttttcactgttgacaagcgaggcaagggttgcactggaccaaaggctgaggcttggccatctagcattccatacaaaattgtttcctataagcattccttttattctctattctatcctgggtctgcctcaaccgtgagataggagagtctctggtactagctgctgtagcagtgcccttcatccagggcagttaatggagtcttggaccctttctttctctgggatccctgcccagcaccttcctatagagatgactttaaaaggaaaaaaaaaaaaaaaaacaaacccacatgatttcaaggagtctggcattcctgaatccttcttccctgccaggtgcctgtcacctgtcttcactgcctccttttccctgtcatgctcatcagcttatggcttctgtctaagcacctgaacagaggactgaaacctccactgcaggctggttttaggtcttgaattatgtaagaatcttgcacagcactgctaatgtaaatttcagttgtttttccctctaggacaaacacttaccaaaatatgcaacttttttttggtgggaagagagattgtcctgtgatttctacccatttcctgaggcctgtggaaataaacctttatgtacttaaagttatacagaaaatagaataaagttaataccaaacttgaaaaaaaaaaaaaaaaaaa

SEQ ID NO: 53796 - DNA, 399 bp, Homo sapiens
cgagggacctgggtctacgataacgcgcttttgctcctcctgaagtgtctttggtccaacgttgttccagacctgtgcaacagacctgcagaccaaagctgaccgattggcacagatgagcatatgttcttcattggcccggaaattccccaaactcacaattataggggaagaggatctgccttctgaggaagtggatcaagagctgattgaagacagtcagtgggaagaaatactgaagcaaccatgcccatcgcagtacagtgctattaaagaagaagatctcgtggtctgggttgatcctctggatggaaccaaggaatataccgaaggtcttcttgacaatgtaacagttcttattggaattgcttatgaaggaaaagccatagcaggagttat

SEQ ID NO: 53797 - DNA, 931 bp, Homo sapiens
ccttgctttgcaaacagaatgcaagcgttaactttggtcttctgtattttggactaaatactaattgactagagtgctgtaaacttgctgtaacatttatggcaattgcaagttgccctgctaggcagttgtaatctggcattaacttattttctatatccagtttaatatgaatctggtgttgatgcaatgcctcagtgatgcattagatctctaataaagtctgtatatacatgtacactttgatcctgctggaaaattttatcagcaaacacattgtctaatctttcaaaacagatttaaggaaaggactgaaagtacagactgaacagtgtggttctttgaaaggtttggttttttaatttttattctaaaattcaaccttttttttgtcgatttaaccatttccattttgaactgctatttgtattgtgctttttacttgagtcgtcttcaatgttaataagtttctgtacagtaataagcacgcagaattctttagagaaaaagaaaacaagcgttgtttgggtagttgaaactgagacgtaacattttgccttgtaggtatattcacgatagaaaatgtgtgctggaatttcacaatgctgctaagtatagcatcttgaacaaccttcagtggagaaaatgtagatgctcttgtatatacaataagaaatatcactttcattcaaatgtacatatgttccttacaagagcaaatgcttcttcttgatcaagagagcaggtatagtgtttgtttattttgtcttaggtatggaagaaaaaaattggactgttacatgcactttcttggaaagttgaaaggaaagggggggtccaatttctttaacatttaatacttactaacaacagagatactgtaattttactcaagtaatcaaatacattttttttgcaacagaaaaaaaaa

SEQ ID NO: 53798 - DNA, 2087 bp, Homo sapiens
  misc_feature (1)...(2087): n = a,t,c or g
ctgaatgttggctcgggagacgtacgaggaggaccgggagtacgagagccaggccaagcgtctcaagaccgaggagggggagatcgactactcggccgaggaaggcgagaaccgccgggaagcgacgccccggggcggggnacttgtgcggcggcggcggcggangccttctctcagccggacngngtnggaagtcatcataaagtttctgtttcacccgtcgtccatgttcgaggactctgtgaatctgtggtggaagcagacctcgtggaagcgctggaaaaatttgggacaatatgctatgtgatgatgatgccatttaaacgacaggctctagtggaatttgaaaacatagatagtgccaaagaatgtgtgacatttgctgcagatgaacccgtgtacattgctggtcaacaggcttttttcaactattctacaagcaaaaggatcactcggccaggaaatactgatgatccatcaggaggcaacaaagttcttctgctctcaattcagaatccgctttatccaattacagtggatgttttatatactgtatgcaaccctgttggcaaagtgcaacgtattgttatattcaagagaaatgggatacaagcaatggttgagtttgaatcagtcctttgtgcccagaaagctaaagcagcactcaatggagctgatatatatgctggatgttgcacactaaaaattgaatatgcacggccaactcgtctaaatgttattaggaatgacaatgacagttgggactacactaaaccatatttgggaagacgagatagaggaaagggtcgccagagacaagccattttgggagaacacccttcttcgtttagacatgatggctatggatcccatggtccattattgcctttaccaagtcgttacagaatgggctctcgagatacacctgaacttgttgcttatccattaccacaggcttcttcctcttacatgcatggaggaaatccctctggttcagttgtaatggttagtggattacatcaactaaaaatgaattgttcaagagtcttcaacctgttctgcttatatggaaatattgagaaggtaaaatttatgaagaccattcctggtacagcactggtagaaatgggtgatgagtatgctgtagaaagagctgtcacacaccttaataatgtcaaattatttgggaaaagacttaatgtttgcgtgtctaaacaacattcagttgttccaagtcaaatatttgagctggaggatggtaccagcagctacaaagattttgcaatgagcaaaaataatcgctttacaagtgctggccaagcatctaagaatataatccagccaccctcctgtgttttgcattattataatgttccattgtgtgtcacagaagagaccttcacaaagttgtgtaatgaccatgaagttcttacattcatcaaatataaagtgtttgatgcaaaaccttcagccaaaacactttctgggctattagaatgggagtgcaaaactgatgcagtagaagcccttacggcactgaatcactatcagataagagtgccgaatggttccaatccctatacattgaagctttgcttttctacatcatcccatttataagaagagaagagcatgttagaatttatgttcacctttattacaatttcaaagctacacttcattaaaaaaaaatctaaaatggttgatctcatgttgccttgcttactttaagatcctgttctgtaataaacatattttgccttgagtaaatttgttgtaagcttaaatattgaattgttttcattttaagatagaatatcataatgtagactatctacagcttcattgtagattatacagatatatgatttctaaccttattactggaatttttcttccacagtaaaaatatatttgcattcttaatgctaattatctgcaagtattttttcattgtgtaagagattaatgcaggtgaaagtattgcattttaatatagaattcctattatatgtttagatgtttaagtatgttgcagttacncatattaaacataacttgtatatttattattttaatgaagtttg

SEQ ID NO: 53799 - DNA, 1255 bp, Homo sapiens
tttttttttttttgctacaaaatgcatttatttccagtcagacaaaattcttgaactgtatattcgggtacatattataaggtcatctttgatatatgccctgtttacaagatccatttctaattattaaagtgaatatcaaacacacatctttgcatcttaaaacataaataaactgctaatgtttataagccacaaatctggtcactgacatgagtggcctgcaattcttcagtgatgagcacacggcgatacagacaagatcagattacccaggtaggcaggcagcaggcacctgtaattcacccgctgactgtgctgttgtggcagtgacccttcttgtgaaaaaagagttatgtgcagacaaaagtgtgacatatgcaacgtggagaggcatttcacagaatgcaaacaccattcaggtaaattagtagactccagaatgaatgaaagcttcatgaatgcaaacctgttggtttacaatactgggcattgtggcaccttttcactggacagtttaataaatatctattaaagaaagtaaggataagagaagaagctgaagcagtcgtcttggtgcaacaacatattttcaagattgggctttaggttgtgagtttccagagataccattgtttgtttcttcagagtaaatcattctatttggaaagcccttcatttccttaaaaagacctttaaattcttcattagcattaagagacttcttgtagactgcccaggaattggggttcattggcttaaagaagagcacagcacagttgacagaacgtcttggtttgtctcttgaattaagaagcctgattggctcagaatttctcagatctactttattcttcacactttccctccttttggctcctgttaacatcccaagcccacagagacagacgctcataggtggagcggtatacttcataaaatctcatttcattatcaactatttctagtgccatggctccctctggactctaaatagttgatatctgaaagttccatccttcacagagttcttcacttgctccttgaaggtaaggttcttgttctaaggctgatgctgggaaggtcccatagaggaaattcctggagaatctctatttcctttgggttctcgtgccctctctctcactccccataaggctatggttgcaattctggagacacataggaaaagtttctaaactcatcctggttaatcattggaagatgtccctcatcaattggagttaaaactggc

SEQ ID NO: 53800 - DNA, 413 bp, Homo sapiens
aagcagggcgccgcagcctgtcgtacggaccttctgtgggtctgtcggtgccgagggcaggatggagaagctgcggctcctgggcctccgctaccaggagtcgattcgccgattcgcacgagctgtcagagctggtgtactctgcctctaacctgcttgtgctgctcaatgacgggatcctacggaaggagcttcggaaaaagttgcctgtgtcgctgtcccagcagaagctgctgacatggctgagcgtgctggagtgcgtggaggtgttcatggagatgggagctgcaaggtgtggggtgaagtgggccgctggcttgtcatcgccctcatccagctggccaaggctgtactgcggatgctcctgctgctctggtcaaggctggcctccagacttcaccccctatcgttcc

SEQ ID NO: 53801 - DNA, 721 bp, Homo sapiens
acttgagggagtagggggccgggtttgggccctcagttgctaagggctacccgagtgggaagcggttcaagagatggggtgaagggtggttcaccggttcttcaagtcctcagccttctggcccgcggaagttaagcaaccaagaggcgggcctaagaccggaagcaggaaggagggcgcaggaagcagggcgccgcagcctgtcgtacggtccttctgtgggtctgtcggtgccgagggcaggatggagaagctgcggctcctgggcctccgctaccaggagtacgtgactcgtcacccggccgccacggccgctgctgcacttgctcagcctgggcctgtggggtcagaggtcgtggaaaccctggctcttggcttgtgttgtgaacgtgaccagcctgagcctcctgagtgacagaaagggcctgacccggagggagcggcgggagctgcggcgccggaccatcctgctgctctactacctgttgcgctctcctttctacgaccgcttctccgaggccaggatcctcttcctgctccagttgctggccgaccacgtccctggcgttggcctggtcacaaggccgctcatggattacttgcccacctggcagaaaatctacttctacagttggggctgacagacctcccggaaggagggtgtggggaggggtggggcagggagcccctcttccctaataaaactgactccggcagcgtc

SEQ ID NO: 53802 - DNA, 667 bp, Homo sapiens
ttttttttttttttaaaagaaaatcatgtacagattttatttctgctgaagatcacaaaacaatttcaacctctgtggttcaaaataatttaaggatcttgtacctttgtgtttattttctgtttcaactaaggatagacttcagaaggcatagcttcccttgtaacgtttttaaacatctttttcatttgtagaagaacatttcaaaagcccaaattaaattatcattaaaatactttgacactttacaatcttccaagtggaatttaagttgtatgccttgatactgtagttttacagtttccccatcattggtaaatattcttctatgatgccactataatgctactggtagaaaatatgtgcatataatttatcagtatattttcatgtaaaattttataaaaatctcaaagttatgaagatagttttacacaccctctaaactaggtgtcagcaaactataaccccataagcccaaattcaaccccacccacaaaaatatttgcctatcaggcctttacagaaaaagtttgctgaaggtgtctggaattctggacagattgtttacagtggaatcagtgtatgacttaattttgcttcctttatagatatcatatacattattgcttttgaatattatcatctacttggaaaacaaataaag

SEQ ID NO: 53803 - DNA, 415 bp, Homo sapiens
  misc_feature (1)...(415): n = a,t,c or g
aaaacattctcctaaacctctgagtgttttgtgggttctgggtgttactttcctatgaattctttgaagattattgagtcagaaaggaaaaatatagccccaaattcccaggcttttaatgcattacattaactgcctattgaaatgagaagttcttcacaaacttgtatacccactaacaagattgcacataaacatgcattaaagtatatactaagaaaccctctgtccaacggctcatgcatatgaagtccgaacatgggagtttgccaattgcattcatcaagtcgttttgcggagtcagatccctgatggaagagctcacaggctctgccttccaagtcctgggttcctaactggtgaccttacctggggtctgtggggagaccaaccctggcttncaagaaaaccacat

SEQ ID NO: 53804 - DNA, 970 bp, Homo sapiens
ttttttttttaggagttaattacatgtattgattaatggatagggtaaacagacgaaaatcaataaacctgagccaggctgccccagagtgctcccatgcctgggctctgtctgctaagagggtcagaggcagtctttcctggtcagtgccaggatgaagccagtcctgggccagggtgctcaggcctccagatggattgccctggtgggtgacatcagcatgggctacagatcagtcctaggatcccgctcatcactcgctattggcctcggccttcactgcctgtgcctgcccagcccatatggggtgcaatggcctgcctgagaggagaggacactggggagggggagaaggcctggcacagtactggggaagatggaagcagcaaacaaggctgtgaacacagccaaggatgcaagccagtggagcccagtgccagagcacacatgctcagatgatgttgttctcctggatcttctctcccaagtaaaagcgggtaaagaggaaggggctcaggtcgatggtctggaacctgcccttcagtaccatctctgctacagctcgcccaatgccaggggcctgctggagcccgtgaccactgaagccagtagcaaagtacatgttgacaactagcgggtgggggcccaccacgccattctggtcaaaggtgttgtagtcgtaatagccggcccaggcgctctgaaccttcagagtctcaaaagctgggaccctcagggccaaatggggccacaccttgtcctggaagaaatcatggtccacttccaggttcgccgggtccggttcttcctgctggagtgagaggtggggacaacgcttacattgcctgggacacaaggacaggcccagacttgtttaacaatccctgtgcaggtaggggatggggagaaatggtcccagttcaaatctggagggggctctaatatcaattaacacagcacacagcccccc

SEQ ID NO: 53805 - DNA, 414 bp, Homo sapiens
  misc_feature (1)...(414): n = a,t,c or g
cgcggcttgcgctccgtagtggactccgcgggccttcggcagatgcaggcctggggtagtctcctttctggactgagaagagaagaatggagaagcccctcttcccattgaatctagaaaactgtatctgaagttgttcctacctgaagccgttgcattgagaggtgctaagtggatcctctggccagctgactgcacttcttttttgagaaaggaaggaatatatcctgactgattnnnnnnnnnnnnnnnnnnnnnnnnnnnnnnnnnnnnnnnnnnnnnnnnncctcagagaagaaggaaatgttttaagacttcagcatcaattcctgctgagtttctaacctgctggcctgctctacaaatttcaagcttgctagccctccaatcacatgaataaattccttaaaataa

SEQ ID NO: 53806 - DNA, 1663 bp, Homo sapiens
ggaagcgctgcaaggacaaccggctggggtccttgcgcgccgcggctcagggaggagcaccgactgcgccgcaccctgagagatggttggtgccatgtggaaggtgattgtttcgctggtcctgttgatgcctggcccctgtgatgggctgtttcgctccctatacagaagtgtttccatgccacctaagggagactcaggacagccattatttctcaccccttacattgaagctgggaagatccaaaaaggaagagaattgagtttggtcggccctttcccaggactgaacatgaagagttatgccggcttcctcaccgtgaataagacttacaacagcaacctcttcttctggttcttcccagctcagatacagccagaagatgccccagtagttctctggctacagggtgggccgggaggttcatccatgtttggactctttgtgggaacatggggccttatgtttgttcacaagtaacatgacctttgcgtgacagagacttcccctgggaccacaacgctctccatgctttacattgacaatccagtggggcacaggcttcagttttactgatgatacccacggatatgcagtcaatgaggacgatgtagcacgggatttatacagtgcactaattcagtttttccagatatttcctgaatataaaaataatgacttttatgtcactggggagtcttatgcagggaaatatgtgccagccattgcacacctcatccattccctcaaccctgtgagagaggtgaagatcaacctgaacggaattgctattggagatggatattctgatcccgaatcaattatagggggctatgcagaattcctgtaccaaattggcttgttggatgagaagcaaaaaaagtacttccagaagcagtgccatgaatgcatagaacacatcaggaagcagaactggtttgaggcctttgaaatacttggataaactacttagatggcgacttaacaagtgatccttcttacttccagaatgttacaggatgtagtaattactataactttttgcggtgcacggaacctgaggatcagctttactatgtgaaatttttgtcactcccagaggtgagaccaagccatccacgtggggaatcagacttttaatgatggaactatagttgaaaagtacttgcgagaagatacagtacagtcagttaagccatggttaactgaaatcatgaataattataaggttctgatctacaatggccaactggacatcatcgtggcagctgccctgacagagcgctccttgatgggcatggactggaaaggatcccaggaatacaagaaggcagaaaaaaaaagtttggaagatctttaaatctgacagtgaagtggctggttacatccggcaagtgggtgacttccatcaggtaattattcgaggtggaggacatattttaccctatgaccagcctctgagagcttttgacatgattaatcgattcatttatggaaaaggatgggatccttatgttggataaactaccttcccaaaagagaacatcagaggttttcattgctgaaaagaaaatcgtaaaaacagaaaatgtcataggaataaaaaaattatcttttcatatctgcaagatttttttcatcaataaaaattatccttgaaaa

SEQ ID NO: 53807 - DNA, 1113 bp, Homo sapiens
  misc_feature (1)...(1113): n = a,t,c or g
tttttattatttatagtaaactttattttcattgatatttcacttaacataatttcaaagtcagtctgtggtctaagatgagcaaaagaacagatattgtaaatctcctaaaagactttttttcacactgttcctcagagcagggaatggggtttcagagccctgaaagctgacacctaacattttacccttgagatttacctacagatacagaaagaaaagacaacatcaatatacaagaatcaagctctatgagggtcttatttaagctcttgtgttacatactcggccacctctgtaggtttgtaatcatgactgattttcccacctctctgccaagtttggtgtctttttttttaggtaaaatgtcagatgcaaaaatgctgcacttatttctcttaatatattgaaaatagtggaagatgcagatttttaattcttcatcagtctaagctggaacatgacttctgctaatggggtctgttgaacatactaactccaactttggcgaccatcagcaaactggcacctgcaattaaacctgcaggcatgaattttccagagtggtagaacctcattccccataatgcccagcccaaggtaccagatgtagcttaggaaaacccaaacgttccttggatcctgagacagctggtaagccacccaggccggctagactgccaaagagcagccctgcagccagggaacggcacgctgcctgcttttacatagccaatgatcccaccaggaagcaaccagtgctgcgtagccaaagccaaaccaatgcaaaggcactactgagcccagtgtcctgcatttttctcttctctgtccagacaggagactaccccagggcctgcacctgcagaaaacaagcggtctcacgaaggccccggctgtcgacaagggcgcgcaagccgcaggaatgactgcgaggtgtcgccggaaatgcagcggcgggcgctctccgtcccggtggcggggcgaggagaggggagcggctctgttgtgcctgcgcagtgtaccggctcgtgccgaattcttggcctcgagggccaaattccctatagtgagtcgtattaaattcgtaatcatgtcatagctgtnttcaaa

SEQ ID NO: 53808 - DNA, 1158 bp, Homo sapiens
ttttaaccagcaagtttttattagggagtttcaaaaggggagggggtatacgaataggtgtgggtgacagacatcaagtacttcacaaggtaatagaatatcacaaggcaagtggaggcagggtgagatcacaggaccacaggaccaaggcaaaattaaaattgctaatgaagtttcgggcaccattgtcattgataacatcttatcaggagacagggttttgagagcagacaactggtctgaccaaaatttattaggcgggaatttcctcttccctaataagcctgggagtgctatgggagactggagtttatttcatctctgcagcctcgaccatagaagatggccacacccaaggaggccatttcagaggcctaccctcaggggtgcattctctttctcagggatgttccttgctgagaaaaagaattcagcgatatttctcccatttgcttttgaaagaagagaaatatgactctgttccaccaggctcactgttggtcagagtttaaggttatctctcttattccctgaacaattgctgttatcctgttcttttttcaaggtgcccagatttcatattgttcaaacacacatgctctacagtttgtgcagttaacgccatcatcacagggtcctgaggcgacatacatccttctcggctgacaggattaagagattaaagtaaagacaggcataggaaatcacaagggtattgattggggaagtgataagtgtccatgaaatcttcacaatttatgttcagagattgcagtaaagacaggcataagaaattatagaagtattaatttggggaactaataaatgtccatgaaatcttcacaacccatgtttttcctgccatggcttcagccagtcccccccgtttggggtccctgacttcctgcaacaatgtcctgcaggaaaagttttttctttatatccagtttttacatgatgaattatttcccaatatttcatagtttatgaggctgaattcctcttgaatttattaaatgcttccttcacatcctctgtgatgatcatgtttatttactgataaaactcaatacctagaactgcacctagctcatgatggtacctaataaatacttcaatgaaatgatgtggtgatgcatgcctatagttttagctact

SEQ ID NO: 53809 - DNA, 989 bp, Homo sapiens
  misc_feature (1)...(989): n = a,t,c or g
ttggtgttggaggtctgtgacacttccttatacatttaaagccccctttgaatagttgtatcaatagttcaaaagcctgtagatatcttgcttttctattctgacagcccagcttctgcagactcaggccaaccttaggtatgtcacatcagttccccatctgtgtaaattacctgaacctctctgtggtattcactgagagttgagcttctactaagggatttccttgacctggggcttttaacaccagatttgtagtgggagtgtttattaggtaaaggcaaagggagtaaggtcaggaggatggctaggcccctgctctcagttaaacagaactatcctccttcctgaatatttaaacataaaattaattttaaactactataaaaatcatgttccattgcttgccaaatcttataccattataatgctgtatttttacatgttagtatacattgtgtccatagggatataaatatgagaatttcagcaactgtcttgcagggttaagatgtgctatttgttgattttgcaaatttttctcatgtggtacagtccctccaaagaaaatttccttagacctaaatggtagcataataatttctcctccatatccgtgactaacaagttcctgaaaacagaagtagacatattttatgcccaatttagtacctaataattgaggcttaaaacaaaattttcttgggcaagttgggtgattaaatatgaattaaaacttctagagaaagatttccagatgcccctgttttccattttgattatggttttagtttcatagcaacttgggggaaaaaaatcatttactttatgtcgtattacaacaacaactttgacagcttaaatgtagtgacctctctgaaggtaatatgcacattataatttaggatgaaagcagatttaaactaagactttctgagatgaaagaaaagtnccnattcntaatangtcatgtttattgcngcantatc

SEQ ID NO: 53810 - DNA, 2806 bp, Homo sapiens
caattaaaacagacagctgtactgaggtaagatatgtgtggaccttccttgggaaggaatattgtctttagaataccctttgataagctgagctgtcccgtgtagatgcaattcggtttaatggcattgatgtatagtcactgtgcctttctttttctttcttccttctcctctacccctccttccacccctccccattagagtagtgtggagataaggctggactggtctatcagattgaactccaagaatgatcacacaaaatgtttagggagatgttccccgtggtgtatcctcatggtaacaacgacaaaaaatgccggttgtctttgttctcttttcactattcctaacatgtgtacatgatagctttgattctgcaagtaaaagtaaatcctgtgttgtgactggtgctttcatatatttgtgacaatttttgagtaatattgcatgaaaatgtccctatgttacatccattcagaagttttgttgttttactctaaagctgggaaaggaaatgagagggaaaagaccccggagagggaagaaaatctcagtattttgaaaattgagattacttcagagccttagccacacctaaaatacctcctagttaatagtggtataaatgcctcttcaatacgttttccagaatccaaagcattttggtttatccaggacccagggcagcacagctgtcaccaagcaggagagttaaggattcaccatgagctgggaaatgcttttgccatgagtatgagcaaattccctctttccctgaatcatggacattctagattaaaagaacatttttttgtgctcttaacaagaaaaccatggccctcctttgttcaagtatcagaagaaataaacccacagctccagagaaggtgaccattctcagaactccagctattcactctccagggagaaggacctcaaatcgccactctttgggcggcaggtgcggtccccacggccggctctacgaggaagagttctggctcttttgttccactgagatggtcttggtttttcacttaacaaattttttaatggaatctttgtttttgttctccatcttgtttgttagagtctctcggcctttatttacaaattccttgcaactagagcgctccttccccaagatatggtagtgagagtaatttttcattgtagctgtagtctccatcagtaacagcaggccctggaagacttgatcacctttttctgtgtcattttcagtcaaagagggcctctcttacatcttgtttgctttcaaatccccaaatatcatctccatctcccaattaattttattgtctctttcctctctattcgctttctcctgttttttttttttaaaaaaaagcatgaaaaaggaagagaaaaagtttgatatgccaaggacagattttgaaacagacttggtaaatgttttccttagctccttcatgggcatgctggtgaaagaataaatacatccaattaaagctcatgctggggtcggggagaagaggatactgaaacatttgtgaaatgtatgaatgcacttctgtaaccagatacttctgttcttctgttcaaattgtggggtttttgttacagttaggacgcccatgaagatttaggggtgaaaaaaacagcagagtatttattaaactacagcattgtacaattagcttagtaacactatggaataagctaaaacatatcacagtttttacatgggccaaaacatgaattgagtatgtggtcacatgaaaacacggatgaatgaataaaacactctttggtggtgactgaggcatcattagaaggcccagacgatttccactattcacagcatttccttttctcagaaggactctttatatttccatgtaaatctagatctttggagcaattaagatggaattacaatttctagggagcattttaaggaaaatgttttggctttttcataattttatgtcttacagtatggaattataatacgaaaatctttatatgagttttggcttcttggtatttgtacttattcaggggaaaaagtctttcgattacttatgcctctatagagcttaatttcttgagaaattcaacagtcattttcaccagcataattttatcttaaggaataactaataggaaaagtcagcttaattatttaaggccctagtttctacatataatatattcgatagaaatgaaaatctgccgtggaattaactaataagtagtaacaataaacttcatatttagaatgcaaagtctataaagaataattttacatgatcctcaatatcaactccagtttaaaaagtgttatttttaaaacatttgaaaccaagtactgtttaatttcaatcagaagatgcaaatacatactttgatctatgtttgattttgctaataatatttgaaggagattgcctaccaaggacaaaacaataaatttaaaaatcaaacgatttctccatacgctcatagtcacatatggaattttgagaaaataaagcatgctgtctttaggaatttttatacttctttgtctttcttccttaatatttgcttctagctgctcttggcaatgatgaattgttatgtatgcattaatgttttgcagcccaaaagttgttcacatttttcctatataagatctgtggagtgtgtgtttcaaagagagaactacagaaatgttaaagcaggaaaacctgaatgtgatgtgcacattttcatcccacatggacaatgtatgtgttttaataaatggaattttcagattcatttcaaaaaaaaaaaa

SEQ ID NO: 53811 - DNA, 1934 bp, Homo sapiens
gcggcggggacgagcaccggcctgcgcgcggacggcaccggatgacccaacatgagtgaagtttcctgcaagaaacgggacgactatttggaatggccagagtattttatggctgtggccttcttatcagcacagagaagcaaagatccaaattcccaggtcggcgcctgcatcgtgaattcagaaaacaagattgtcgggattgggtacaatgggatgccaaatgggtgcagtgatgacgtgttgccttggagaaggacagcagagaataagctggacaccaaatacccgtacgtgtgccatgcggagctgaatgccatcatgaacaaaaattcgaccgatgtgaaaggctgtagtatgtatgtcgccttgttcccttgtaatgaatgcgctaagctcatcatccaggcaggtataaaagaagtgattttcatgtctgataaataccatgatagtgacgaggcaactgctggcgaggctcctgtttaatatggccggggtgacattccggaaattcataccgaagtgcagcaagattgtcattgactttgattcaattaacagcagaccgagtcaaaagcttcagtgagttacatctcattcaatctccagaagattgggattatcgtcttctaagaggttgctaatgcctttcatcttgaagttacacataacttcttactagccagtatggcaaaagtaggcatctaaagaatataaagcctcaaatcttccttactgtctctcttgtcacatggaatctacatgtgtttgaactattgctttaggatttaaaataggggagcctgtggtggcctggtgcacagggctagaacgagggtgcctccccttcctgtgtcctggctggctgggatgctggtggctcttcagaggagcatcagctgtctgtcatctgctgcgatccggcagcctctcttcactgctacatgtgctggaaggacaaataaataattgtggttgtgttcttaatggggacgagcagacacactgatctgaacatctggcccaagtgaagcatggcatatagtgcccttgggaagaaaattaggcctcaaatgacagtagcattgaagtgtttgctgcagagttgaggggaaacccccagccaccctcccggaatccgagatagggtggcacatctgtcctgacagacgaggagtgtaactgaaccaggaatatttcctccattcctgctctcccactgcacacagggtggtggcaacattatccctctgggggtggggacgcctgttgttttggctcaatttgggtttgttggtcacatggagctcttccatttcgtttagctgaataatgagttgttcctagaggagacagcctgtctctccttgttgcccccaaagcccatgccctgccgtggtggcagctggggctgtggatgggaggggtccccaacatggatgtgttgcccctcctccgcatgccaacgcagttcatgtacaaggcccctctccagttgcagaggggccttgtacatgagagaaaattaattcctatcccgtgagtggattgtgagaaattccacccacgtggagacagcttactgcagcactgttggtgttcggagctcttctgtgccctggctccatgctttcacctacacaagcatcaccttcctaatcaccgcggggcggggagcgtgtggctgtgccccttctctttaatctcatttaatttttattaaacatgctcagtacctgtgttgagaaaaggctttctttatcctaaagattattacctttttaaagtgctcttatattttcatgagtttttattttgtctctgagattttgtattccacattctagggtattctgtaatttggctccttaccaatattattaaaatcttattaaaatctaccctaccaaagcaaaaaaaaaagtcgacgc

SEQ ID NO: 53812 - DNA, 333 bp, Homo sapiens
  misc_feature (1)...(333): n = a,t,c or g
caatgccacactgtttttgaagtggcccataacttgaaggaaaagtttaaagacagttcaatttaatcatcagaatgcattcnnnnnnnnnnnnnnnnnnnnnnnnnnnnnnnnnnnnnnnnnnnnnnnnnnnnnnnnnnnnnnnnnnnnnnnnnnnnnnnnnnnnnnnnnnnnnnnnnnnnnnnnnnnnnnnnnnnnnnnnnnnnnnnnnnnnnnnnnnnnnnnnnnnnnnnnnnnnnnnnnnnnnnnnnnnnnnnnnnnnnnnnnaaaaaanagggggtttccccaggtngccaggctggcttgnaaacncctggcctcaggggatctgcc

SEQ ID NO: 53813 - DNA, 608 bp, Homo sapiens
ttgtcactttggacgtttgcgtctttgaagaggcgatgggagcatatcatgactgcctgccaccattgcttttcagactaccacaactcaatcatgctgtccaggacttctggccctgtgttcaccactgggaaaacgtacttcagactggatagcctaaaaaggagcaatgcccttgtaggatgtggagaagggaaaatacggacattaacattaaaagacaccagtgaaattgttaggtctctaggaagttggagcacaaggcttcacgctttaagaccatctgtggttttcagtgaacaagcgctgagcaccagcagcagaaaacaacaacaaaaaaacacctcgtttttaccttgtcttctagacatgaaaaggcagttgcattccactctgcattatgttctacatgttgctttatcagtatatgcttagctgtaagtgacaagtattttttctggaacagaagtttacttaggaattaccatgcacttgggggtaccatttaaccgcctgaaaattagcatattgatagttcttagagagaccagatattaatctaaggatttatatggaaaggtttgtatccttaggagccagaaataatt

SEQ ID NO: 53814 - DNA, 2111 bp, Homo sapiens
  misc_feature (1)...(2111): n = a,t,c or g
tgaagactgagcgggacgtgagcgtgcgacagggccgtggacctcctctacgccatgtgcgaccgagcaacgccccacagatcgtggccgagatgctgagctatctggagacagctgactactccatcccgagaagagattgtgctgaaggtcgccatcctggctgagaagtacgcggtggactacacctgggtatgtggataccatcttgaacttgatccgaattgctggtgattacgtgagtgaagaggtgtggtaccgagtcattcagatcgtcatcaaccgggacgacgtgcagggctacgcggccaagactgtgttcgaggctcttcaggctcccgcgtgccacgagaacctggtcaaagtgggcggctacatcctgggggagtttggaaacttgatagctggagacccgagatccagcccgctgatccagttccacctgctgcactccaagttccacctgtgcagcgtccccacccgcgcgctgctcctgttccacctacatcaagttcgtgaacctcttcccggagtgaagcccaccatccagggcgtgctgngggcnggctcccagctgcgcaatgctgacgtggagctgcagcagcgagccgtggagtacctcaccctcagctcagtggccagcaccgacgtcctggccacggtgctggaggagatgccgcccttccccgancgcgagtcgtccatcctggccaagctgaaacgcaagaaggggccagggcgggccagcgcttgggacgatggccggagggaccccagcagcaacgacatcaacgggggcatggagcccacccccagcactgtgtcgacgccctcgccctccgccgacctcctggggctgcgggcagcccctcccccggcagcacccccggcttctgcaggagcagggaaccttctggtggacgtcttcgatggcccggccgcccagcccagcctggggcccacccccgaggaggccttcctcagcccaggtcctgaggacatcggccctcccattccggaagccgatgagttgctgaataagtttgtgtgtaagaacaacggggtcctgttcgagaaccagctgctgcagatcggagtcaagtcagagttccgacagaacctgggccgcatgtatctcttctatggcaacaagacctcggtgcagttccagaatttctcacccactgtggttcacccgggagacctccagactcagctggctgtgcagaccaagcgcgtggcggcgcaggtggacggcggcgcgcaggtgcagcaggtgctcaatatcgagtgcctgcgggacttcctgacgcccccgctgctgtccgtgcgcttccggtacggtggcgccccccaggccctcaccctgaagctcccagtgaccatcaacaagttcttccagcccaccgagatggcggcccaggatttcttccagcgctgggaagcagcttgagcctccctcaacagggaggcgcagaaaatctttcaaaggccaaccaccccttggacggcagaagttactaagggccaagcttctggggtttggctctgctctcctggacaatgtggaccccaaccctgagaacttcgtgggggcggggatcatccagactaaagccctgcaggtgggctgtctgcttcggctggagcccaatgcccaggcccagatgtaccggctgaccctgcgcaccagcaaggagcccgtctcccgtcacctgtgtgagctgctggcacagcagttctgagccctggactctgccccgggggatgtggccggcactgggcagccccttggactgaggcagttttggtggatgggggacctccactggtgacagagaagacaccagggtttgggggatgcctgggactttcctccggccttttgtatttttatttttgttcatctgctgctgtttacattctggggggttagggggagtccccctccctccctttcccccccaagcacagaggggagaggggccagggaagtggatgtctcctcccctcccaccccaccctgttgtagcccctcctaccccctccccatccaggggctgtgtattattgtgagcgaataaacagagagacgctaaaaaaaaaaaaaa

SEQ ID NO: 53815 - DNA, 4216 bp, Homo sapiens
aaccacaagtcaaatagaaagaagttaaaagaatgtttatgcaaacacatgagaaaagaagggtgcagatgagaataggggtgtggttaacaactcagaggaggagggagaatctaacctgtcagcccttttactcagccacagcctccggagccgttgcacacctacctgcccggccgacttacctgtacttgccgccgtcccggctcacctggcggtgcccgaggagtagtcgctggagtccgcgcctccctgggactgcaatgtgccgatcttagctgctgcctgagaggatgtctggggtgtccgagcccctgagtcgagtaaagttgggcacgttacgccggcctgaaggccctgcagagcccatggtggtggtaccagtagatgtggaaaaggaggacgtgcgtatcctcaaggtctgcttctatagcaacagcttcaatcctgggaaaaacttcaaactggtcaaatgcactgtccagacggagatccgggagatcatcacctccatcctgctgagcgggcggatcgggcccaacatccggttggctgagtgctatgggctgaggctgaagcacatgaagtccgatgagatccactggctgcacccacagatgacggtgggtgaggtgcaggacaagtatgagtgtctgcacgtggaagccgagtggaggtatgaccttcaaatccgctacttgccagaagacttcatggagagcctgaaggaggacaggaccacgctgctctatttttaccaacagctccggaacgactacatgcagcgctacgccagcaaggtcagcgagggcatggccctgcagctgggctgcctggagctcaggcggttcttcaaggatatgccccacaatgcacttgacaagaagtccaacttcgagctcctagaaaaggaagtggggctggacttgtttttcccaaagcagatgcaggagaacttaaagcccaaacagttccggaagatgatccagcagaccttccagcagtacgcctcgctcagggaggaggagtgcgtcatgaagttcttcaacactctcgccggcttcgccaacatcgaccaggagacctaccgctgtgaactcattcaaggatggaacattactgtggacctggtcattggccctaaagggatccgccagctgactagtcaggacgcaaagcccacctgcctggccgagttcaagcagatcaggtccatcaggtgcctcccgctggaggagggccaggcagtacttcagctgggcattgaaggtgccccccaggccttgtccatcaaaacctcatccctagcagaggctgagaacatggctgacctcatagacggctactgccggctgcagggtgagcaccaaggctctctcatcatccatcctaggaaagatggtgagaagcggaacagcctgccccagatccccatgctaaacctggaggcccggcggtcccacctctcagagagctgcagcatagagtcagacatctacgcagagattcccgacgaaaccctgcgaaggcccggaggtccacagtatggcattgcccgtgaagatgtggtcctgaatcgtattcttggggaaggcttttttggggaggtctatgaaggtgtctacacaaatcataaaggggagaaaatcaatgtagctgtcaagacctgcaagaaagactgcactctggacaacaaggagaagttcatgagcgaggcagtgatcatgaagaacctcgaccacccgcacatcgtgaagctgatcggcatcattgaagaggagcccacctggatcatcatggaattgtatccctatggggagctgggccactacctggagcggaacaagaactccctgaaggtgctcaccctcgtgctgtactcactgcagatatgcaaagccatggcctacctggagagcatcaactgcgtgcacagggacattgctgtccggaacatcctggtggcctcccctgagtgtgtgaagctgggggactttggtctttcccggtacattgaggacgaggactattacaaagcctctgtgactcgtctccccatcaaatggatgtccccagagtccattaacttccgacgcttcacgacagccagtgacgtctggatgttcgccgtgtgcatgtgggagatcctgagctttgggaagcagcccttcttctggctggagaacaaggatgtcatcggggtgctggagaaaggagaccggctgcccaagcctgatctctgtccaccggtcctttataccctcatgacccgctgctgggactacgaccccagtgaccggccccgcttcaccgagctggtgtgcagcctcagtgacgtttatcagatggagaaggacattgccatggagcaagagaggaatgctcgctaccgaacccccaaaatcttggagcccacagccttccaggaacccccacccaagcccagccgacctaagtacagaccccctccgcaaaccaacctcctggctccaaagctgcagttccaggttcctgagggtctgtgtgccagctctcctacgctcaccagccctatggagtatccatctcccgttaactcactgcacaccccacctctccaccggcacaatgtcttcaaacgccacagcatgcgggaggaggacttcatccaacccagcagccgagaagaggcccagcagctgtgggaggctgaaaaggtcaaaatgcggcaaatcctggacaaacagcagaagcagatggtggaggactaccagtggctcaggcaggagggagaagtccctgggaccccatggtttatatgaatgataagtccccattgacgccagagaaggaggtcggctacctggagttcacagggcccccacagaagcccccgaggctgggcgcacagtccatccagcccacagctaacctggaccggaccgatgacctggtgtacctcaatgtcatggagctggtgcgggccgtgctggagctcaagaatgagctctgtcagctgccccccgagggctacgtggtggtggtgaagaatgtggggctgaccctgcggaagctcatcgggagcgtggatgatctcctgccttccttgccgtcatcttcacggacagagatcgagggcacccagaaactgctcaacaaagacctggcagagctcatcaacaagatgcggctggcgcagcagaacgccgtgacctccctgagtgaggagtgcaagaggcagatgctgacggcttcacacaccctggctgtggacgccaagaacctgctcgacgctgtggaccaggccaaggttctggccaatctggcccacccacctgcagagtgacggagggtgggggccacctgcctgcgtcttccgcccctgcctgccatgtacctcccctgccttgctgttggtcatgtgggtcttccagggagaaggccaaggggagtcaccttcccttgccactttgcacgacgccctctccccacccctacccctggctgtactgctcaggctgcagctggacagaggggactctgggctatggacacagggtgacggtgacaaagatggctcagagggggactgctgctgcctggccactgctccctaagccagcctggtccatgcagggggctcctgggggtggggaggtgtcacatggtgcccctagctttatatatggacatggcaggccgatttgggaaccaagctattcctttcccttcctcttcggccctcagatgtcccttgatgcacagagaagctggggaggagctttgttttgggggtcaggcagccagtgagatgagggatgggcctggcattcttgtacagtgtatattgaaatttatttaatgtgagtttggtctggactgacagcatgtgccctcctgagggaggacctggggcacagtccaggaacaagctaattgggagtccaggcacaggatgctgtgttgtcaacaaaccaagcatcagggggaagaagcagagagatgcggccaagataggaccttgggccaaatccgctctcttcctgcccctctttctctttcttcctttactttcccttgcttttccctcttttcttactcctcctctttctctccccaacccccattctcatctgcacccttcttttctcatgtgtttgcataaacattcttttaacttctttctatttgacttgtggttgaattaaaattgtcccatttgcaaaaaaaaaaaaaa

SEQ ID NO: 53816 - DNA, 826 bp, Homo sapiens
caggcggacaccaatagactccacagcagctccaggatcccagacaccggcggccagaagcaaggctaggagctgctgcagccaatgtcggccctcagcctcctcattctgggcctgctcacggcagtgccacctgccagctgtcagcaaggcctggggaaccttcagccctggatgcagggccttatcgcggtggccgtgttcctggtcctcgttgcaatcgcctttgcagtcaaccacttctggtgccaggaggagccggagcctgcacacatgatcctgaccgtcggaaacaaggcagatggagtcctggtgggaacacgatggaaggtactcttcgatggcggccagtttcaggtccagtgagcatgagaatgcctatgagaatgtgcccgaggaggaaggcaaggtccgcagcaccccgatgtaaccttctctgtggctccaaccccaagactcccaggcacatgggatggatgtccagtgctaccacccaagccccctccttctttgtgtggaatctgcaatagtgggctgactccctccagccccatgccggccctacccgcccttgaagtatagccagccaaggttggagctcagaccgtgtctaggttggggctcggctgtggccctggggtctcctgctcagctcagaagagccttctggagaggacagtcagctgagcacctcccatcctgctcacacgtccttccccataactatggaaatggccctaatttctgtgaaataaagactttttgtatttctggggctgaggctcagcaacagcccctcaggcttccagtgagtccccatcttaaa

SEQ ID NO: 53817 - DNA, 1183 bp, Homo sapiens
  misc_feature (1)...(1183): n = a,t,c or g
ttttttttttttttttgaatcaaaagcagggtttatttttctatcaaatccccaatccatgttccagccaatggatgaagggtgaatcaagccccacatagactcttggtaaaaacaattctaactttctaaaaaaaaaaaaagccaacacacttttttctttcttttcaaaaagctcccaggcctttgggaacagctgaaacaaattcatatcctgactaggtctgttttctcttaggtatttggatggtccctctctgctgcgacttctgcacagatgaggcactgataatggcctgcaggtcactcacaatcctagctccacatcactccatggtttgataacctagaaccacgttatgatttccatttataatgccctaagaacagctgaaaagatctgtattaaattctgcaaatctttattgagtgcccaactatttgctgggcacaggctaggcactgattctgctggttctgagaaacataaatggtaccatagggaggtgtttcctcctaagtggcaggaggatgtttgctgggagttaagtgaaccaattcctcctctgcttacaccacgtgggggtaggtccagaactcaggccttgggaacatatgctgtgctctcttctacaggcgctgtgtggaagaaccaatagcagttgttaaatagctgtggaatttcctccacaatccacatagtgatgtgtctccaaggagctctggggtcatgaggccaatgtatgaaatcttcactgaagttcgcatgaagatcactatgttgtgcaccaggatctcaggtaccgtgcagaagaagtacacataggaaaacggtcctcccatctcggccttcccggtaaaattcaccagttgctcactccgaggtggaataagggagacgttagtagtcacatatgtactgaccactgtgttcatgtactgaatctggctggacaggctggtcactgccaccgtgtagaagttggagttcctgattttcagggtggccatgatggtgagaattacaagggagtcttgcttattaaatgtgactttcaccactttgatgccgtcatcatccacaaggactgaatgcggaaacaggaagaaaaccaccaaaccagatgccaggagacaaagcanggatggacaggaggacatattgcttagttcgctgagggcg

SEQ ID NO: 53818 - DNA, 860 bp, Homo sapiens
accatgtaagtgtggtgttttaaagtataaacacaataaagatcttttgacagttatgaatagtattataaattaacatttttcttgtaataaagggaacatttttgtcttggtgcttgtctttgtttcctacctttttaattgctttaaattagtgttatatttttgttcacttttttatctttttttaaatagctggggctctcagtgcacataggtatttccgagataatccttccgaattatgctgtatcattgttgatagtggatattcctttacacatatagttccttattgtagaagtaaaaagaaaaaagaagcaattattcggataaatgtgggaggaaaactcttaaccaatcatctaaaggagatcatatcttacaggcagctacatgttatggatgaaacacatgtgattaatcaagtgaaagaagatgtatgctatgtgtctcaggatttttatagagacatggatattgcaaagttgaaaggagaagaaaatacagtaatgatagactatgtcttgcctgacttcagtacaattaaaaagggcttttgtaagccaagggaagagatggtgttgagtggaaaatacaaatctggggaacaaattcttcgtttggccaatgagagatttgctgttccggaaatactctttaatccttctgatataggcattcaagaaatgggaattccagaagctattgtctattcaattcaaaatctacctgaaggaaatgcagccgcatttttttaaggaacattgtcttggacagggagggaaattcccttttcccggggtttaggggatcgggtttactcaggaagttccgatgtctttactcccaacaggttt

SEQ ID NO: 53819 - DNA, 471 bp, Homo sapiens
gaatttaatacgactcactatagggaatttggccctcgaggccaagaattcggcacgagaaagaattctacgccatgaccaagtagggattattccagggatgaaggttggttccgtatttgagaatcagtcgatgagatccacacgttaccagctaccgaagataactcacacgatcacatctgtcagtgttgggaaggcccgtgacaagtttaacatctattcatgatttaaacttggaaaaacagagaaggagaggaacttcctccactggataaagagcatctgtacaagccctgcagccagcattctcctcgagggcaaggaatcacccttcaccattcagatccggaacaagaaaggacgtctgctctaaccatcggatccggcatggtgctggaagcgctgggcactgcagtacgcaggacaaggaaagaaaaggcgtgtcgatcacaaaggaagaaacgaaat

SEQ ID NO: 53820 - DNA, 1662 bp, Homo sapiens
ctgctctttctggttccgctgctgtgggccccggctgcggtccgggccggcccagatgaagaccttagccaccggaacaaagaaccgccggcgccggcccagcagctgcagccgcagcctgtggctgtgcagggccccgagccggcccgggtcgagaaaatatttacaccagcagctccagttcataccaataaagaagatcctgctacccaaactaatttggggatttatccatgcatttgtcgctgccatatcagttattattgtatctgaattgggtgataagacattttttatagcagccatcatggcaatgcgctataaccgcctgaccgtgctggctggtgcaatgcttgccttgggactaatgacatgcttgtcagttttgtttggctatgccaccacagtcatccccagggtctatacatactatgtttcaactgtattatttgccatttttggcattagaatgcttcgggaaggcttaaagatgagccctgatgagggtcaagaggaactggaagaagttcaagctgaattaaagaagaaagatgaagaatttcaacgaaccaaacttttaaatggaccgggagatgttgaaacgggtacaagcataacagtacctcagaaaaagtggttgcattttatttcacccatttttgttcaagctcttacattaacattcttagcagaatggggtgatcgctctcaactaactacaattgtattggcagctagagaggacccctatggtgtagccgtgggtggaactgtggggcactgcctgtgcacgggattggcagtaattggaggaagaatgatagcacagaaaatctctgtcagaactgtgacaatcataggaggcatcgtttttttggcgtttgcattttctgcactatttataagccctgattctggtttttaacaagctgtttgttcatctatatttagtttaaaataggtagtattatctttctgtacatagtgtacattacaactaaaagtgatggaaaaatactgtattttgtagcactgattttgtgagtttgacccattattatgtctgagatataatcattgattctatttgtaacaaggagttttaaaagaaacctgacttctaagtgtgggtttttcttctctccaacataattatgttaatatggtcctcatttttcttttggtgcagaaccgttgtgcagtggggtctaccatgcaattttctttcagcactgacccctttttaaggaatacaaattttctccttcatcacttaggtgttttaagatgtttaccttaaagtttttcttggggaaagaatgaattaatttctatttcttaaaacatttccctgagccagtaaacagtagtttaatcattggtcttttcaaaactaggtgtttaaaaaaagagacatatatgatattgctgttatatcaataacatggcacaacaagaactgtctgccaggtcattcttcctcttttttttttaattgggtaggacacccaatataaaaacagtcaatatttgacaatgtggaattaccaaattaaaagagaatactatgaatgtattcatattttttctatattgaataaacaatgtaacatagataacaatataaataaaagtggtatgaccagtaaaaaaaaaaaaaaa

SEQ ID NO: 53821 - DNA, 1154 bp, Homo sapiens
  misc_feature (1)...(1154): n = a,t,c or g
acgtactataacaagaaaaaatgaattgagaagaaagtagtggttttaagaaggaaaggagaacaaataaattagtgaaacataaggttaagtctatacatattattttctaattgcctattatgtcagactacatgtagttagaaaatacgatgaaagaaaaagccatattataattccaacaaaaagataaaataattaagaataactgcaacaagaaaatataagttctgcaacaataaaactatacaatgaaactaaagagcacaaaaaagaacttaaacagataaaaagcagaccacgtttttggataagaagattaaaaattataaatatatcaattttcactgttaatctataaattcagtgtannnnnnnnnnnnnnnnnnnnnnnnnnnnnnnnnnnnnnnnnnnnnngactgcgtcctttttaagcgaacattttagggcctgggagtttgtcaagtaaggaagtctcaagcccaaagagcagcgtcctgaccatggtggtttcattacgagcccttctgctggctctcaggcagaagccccacagcaccgggaccattcatgaggtcactgcccagctcatgatgtccgtgaggctgtccttttggccagtagccgtgtgcagctgtgtggcacagatggcttcgttcatcctgatcaaggccccacctcagccacagcagtccccccaacctgtgttgtccaccctattattcatgtacctgccaggccctgctagatagcaccccgtggcattacataacacttcatgagtggctgtgtcttgtaattttggggacaggtttctctctttccctctcttttttttgtcaaaagcccagagactgacaaccagctgcagtgtctaagtgttcctcactgacagggtggggcctcaccacccctggagggagcagcgttggcagggagacagcctggcccagtgaccctgggcccaagcccagcccctccagggctttcagggaagcgccatccattttcaaagatgtcaaacgtcacttcttcctgtagggcccgagtcctgcctcctatcagggccagatcatagaaggctattttctattctggggaacgattataacttaaatgattgttttaataaaaattctaagctggaaaaaaaa

SEQ ID NO: 53822 - DNA, 706 bp, Homo sapiens
ccactatttcttttttaatgtaaagtaagtttattaaattaaataagatcttgaaaatatgtatgatgggtcctgggcaggatgttctttttcatcaacgtaatctttctttaggagaggagtactcatttgcttgcaaaggccataatctgttctttgagtggagacactgcatttgtggcctgcaagccccacgtcctgagcaacacaagcggggaggcactggtagaatagagcctttttagtaagtctgtagcagccagaagagcagtgttgtgacgctgtctttctgtttcataacctgtgaggtggctcacggaacctaagtccttcccattgaaggctgccgtactgaggtgatgggccaagctggagatatccccaaagcccatgttgacaccctgtcctgcaagcggatggactctgtgggctgcatccccaatgagcgccacccgaggcctgacgtactcagcagcatgtcccaacccaagaggaaacagaactcggcttttggcatccaccctggctacgcttgggggcagctggcgagccgagaccttagtgggcttcagaaggctgacagcatactgcagcatggcaccagctgtgtcgatgaagtccgtgtggtcagcatcactccactgagcagcatcagccacaagacaaacaaggtgaaatgtgagtagcagggaattaaaaattcaat

SEQ ID NO: 53823 - DNA, 1340 bp, Homo sapiens
agatggtggtgctgttctggatgcttccagtgggccccgaccaggtctgaacaatgcctggcgcccgtcccccgcccctcatctacacacacgcaagaattcggagctccatggggaacagaagcaagatatccgtaaaatcaaagtctagggggtgggaatgaaaagggaaaagtgaggaacggggagccaaacccaggaagatgcctctgttcctgcacattccctctcctttatatactcagctcttggctgtctccagtatgtacccaccctggtcttccaagctgggagccactttttataacacaatcacagtttcacaaaccccaggaaggttccatgtggagagaggttaagtttcgcccttgcccggggaattatgacactcagaatatccccttggtgtaaatggaagacacctgcgctatagcagctgttgtaggcccggtccgggtgggagggcatacttcttatacatcggaatagagtctcctgccttccttggccttctcgagacaccacctgacccatggtgaaagtcacgtcttgaaacaggacctggctatacagcagataaactccagcatcctggattcggacaccatatccttgggcctgtaggcctctcccacgcctaagagctggttgccacatcacctctgtcacatcggagtcatccttggaggtggcgttaatgggaaccaggtgcaggacagagtgctgcttcttctgtttttgggtgagcactgctctccttttccgggatctctccccattctcccaggcttccagggcatcggaactctgctccgggagactctgccagggatacccttccccattctgggaggggcctcctgtcccctgcagccggctcacctctctcctgaggctctgcagctctgtttgttgggtcagcagagccatggcacaagccacggcccccagagctgccccccaactcaaccagagggcaactgagagtgccggctctctgactgggccccccatgttgcctggaggccctttgggggctagcaagaaaggagatgaggctggcatgagctggggaccctgccaacagctgtggtttcaagagtggggtagcaaggaggtggcggggcgggtaagggtacgggcagtggtgcagaagggaagaaggttgttacgcaaggagaaataaaaaggaacttgaaaataaaaaggagggaggaggaaagcaagctaagggtactgttagtgctcctggcactccgtcgtggggccagcgttgccttgagaccctccaccctccctcagcctcaggagaattaggttccagtccctctaggaaggat

SEQ ID NO: 53824 - DNA, 1114 bp, Homo sapiens
tacattgaagtctgtacctcctgcgttcccaacagggagtacgtgcgggtgttcgatgtgacggagcgcactgccctccacagacaccagacaggccggacctgccacaagtgtgggacccagctgcgggacaccattgtgcactttggggagagggggaccgttggggcagcctctgaactgggaagcggcgaccgaggctgccagcagagcagacaccatcctgtgtctagggtccagcctgaaggttctaaagaagtacccacgcctctggtgcatgaccaagccccctagccggcggccgaagctttacatcgtgaacctgcagtggaccccgaaggatgactgggctgccctgaagctacatgggaagtgtgatgacgtcatgcggctcctcatggccgagctgggcttggagatccccgcctatagcaggtggcaggatcccattttctcactggcgactcccctgcgtgctggtgaagaaggcagccacagtcggaagtcgctgtgcagaagcagagaggaggccccgcctggggaccggggtgcaccgcttagctcggccccatcctagggggctggtttggcaggggctgcacaaaacgcacaaaaaggaagaaagtgacgtaatcacgtgctcgatgaagaacagttggcactttgcagatggccagtgtcacggtgaaggctgggttgcccccacgggtctagggagaacgaactctttggggatgacattttcaccgtgacatttttagccatttgtccttgaggaagccccttgcactgctgcggttgtaccctgatacggcctggccatcgaggacacctgcccatccggcctctgtgtcaagaggtggcagccgcacctttctgtgagaacggaactcgggttatttcagccccggcctgcagagtggaagcgccccagcggcctttcctcgctcaccaggccagtctcagggcctcaccgtatttctactactacttaatgaaaaagtgtgaactttatagaatcctctctgtactggatgtgcggcagaggggtggctccgagcctcggctctatgcagacctttttatttctattaaacgtttctgcactggcaaa

SEQ ID NO: 53825 - DNA, 1523 bp, Homo sapiens
agccaccgccgccggcagcgaagacgcggagaaaaaagttctcgccaccaaagtccttggcactgtcaaatggttcaacgtcagaaatggatatggatttataaatcgaaatgacaccaaagaagatgtatttgtacatcagactgccatcaagaagaataacccacggaaatatctgcgcagtgtaggagatggagaaactgtagagtttgatgtggttgaaggagagaagggtgcagaagctgccaatgtgactggcccggatggagttcctgtggaagggagtcgttacgctgcagatcggcgccgttacagacgtggctactatgggaaggcgccgtggccctccccggaattacgctggggaggaggaggaggaagggagcggcagcagtgaaggatttgacccccctgccactgataggcagttctctgggggcccggaatcagctggcgccgcccccagtattcgccctcagtaccggcagcggcggttgcccgcctttaccacgtgggacagacctttgaccgtcgctcacgggtcttaccccatcccaacagaatacaggctggtgagattggagagatgaaggatggagtcccagagggagcacaacttcagggaccggttcatcgaaatccaacttaccgcccaaggtaccgtagcaggggacctcctcgcccacgacctgccccagcagttggagaggctgaagataaagaaaatcagcaagccaccagtggtccaaaccagccgtctgttcgccgtggataccggcgtccctacaattaccggcgtcgcccgcgtcctcctaacgctccttcacaagatggcaaagaggccaaggcaggtgaagcaccaactgagaaccctgctccacccacccagcagagcagtgctgagtaacaccaggctcctcaggcaccttcaccatcggcaggtgacctaaagaattaatgaccattcagaaataaagcaaaaagcaggccacaaccttaaccaacaccaaagaaacatccaagcaataaagtggaagactaaccaagatttggacattgggaatgtttactgttattctttaagaaacaactacaaaaagaaaatgtcaacaaatttttccagcaagctgagaacctgggaattcctgcacggaagacaagagagtagcctctccagtttcagcaaccgctaggtttctatttttttttcctggtttttactgttttggtaatatatatattgaaacaagaaatattaataccacatggggagaaccccaaccaaagaaatctgaaatatatagtaaatgcttttttttccgtttttgttcattttggatgctggtgctaaacctccaagtgtcatgatttaaaaaaaaaaaaaatttatgtccttcttatttatttctaggatgaggggaggataacatttttgctttcttatgtgactctctttgaaaatgtgcagtaagaaattcctcaaaaataaaatttttacccttcagaggacagaatgtttaaaa

SEQ ID NO: 53826 - DNA, 1374 bp, Homo sapiens
gcaacctcacctccttcggtgccgaccaggtgatggatctcggccgcgacgccacccgccgcttcttcaactggttttactggagcatcaacctgggtgctgtgctgtcgctgctggtggtggcgtttattcagcagaacatcagcttcctgctgggctacagcatccctgtgggctgtgtgggcctggcatttttcatcttcctctttgccacccccgtcttcatcaccaagcccccgatgggcaagccaagtgtcctctatgcttaagctcgctctccaaaactgctgcccccagctgtggcaacgacactcggccagagaccgtcaatgtgcccgcgtgctggccgacgagaggtctccccagccaggggcttccccgcaagaggacatcgccaacttccaggtgctggtgaagatcttgcccgtcatggtgaccctggtgccctactggatggtctacttccagatgcagtccacctatgtcctgcagggtcttcacctccacatcccaaacattttcccagccaacccggccaacatctctgtggccctgagagcccagggcagcagctacacgatcccggaagcctggctcctcctggccaatgttgtggtggtgctgattctggtccctctgaaggaccgcttgatcgaccctttactgctgcggtgcaagctgcttccctctgctctgcagaagatggcgctggggatgttctttggttttacctccgtcattgtggcaggagtcctgggagatggagcgcttacactacatccaccacaacgagaccgtgtcccagcagattggggaggtcctgtacaacgcggcaccactgtccatctggtggcagatccctcagtacctgctcattgggatcagtgagatctttgccagcatcccaggcctggagtttgcctactcagaggccccgcgctccatgcagggcgccatcatgggcatcttcttctgcctgtcgggggtgggctcactgttgggctccaacctagtggcactgctgtccttgcccgggggctggctgcactgccccaaggactttgggaacatcaacaattgccggatggacctctacttcttcctgctggctggcattcagaccgtcacggctctcctatttgtctggactcgctggacgctatgagagggcgtcccagggcccagcctcccacagccgtttcagcagggacaggggctgaacaggccctattccagcccccttgcttcactctaccggacagacggcagcagtcccagctctggtttccttctcggtttattctgttagaatgaaatggttcccataaatacagggcatgagcccttcctcacgaaaaaaaaaaaaaaaaaaaa

SEQ ID NO: 53827 - DNA, 360 bp, Homo sapiens
  misc_feature (1)...(360): n = a,t,c or g
cttcacctggtgttggctctgagaggaggaggtggtcttaggcagtgatggaccctccattttacctctttaccctgtcgctcactctctgggacaccatagccactgccccctcccctggatnntgaactatggaantttnnnnatanantggatntnatgnncanattnttnttggacctanattcttnntgaatnttntatnanggagggnttgntgnnaagcnttgtacttttttgtaatnggtttgngttctttnnantnttnctannnnttntngntnntnatantntgttantnnntnctannttcntnctnctagnatttntcntnnaanntgngntattctttntctgtct

SEQ ID NO: 53828 - DNA, 3791 bp, Homo sapiens
  misc_feature (1)...(3791): n = a,t,c or g
gccgcgttaagtctgagtgccgctttgagttgttgaatgaagtgaacttcatttgtcagcgttcggttcatgaactggaatgtaagaggcaccagaggattcctgctctgtcccctggtttgcggcttggacgttggacatcccggattgttgtttaatagagaaaactcacctgccttcttgcttttaagtagccccaaaagcagaaccttgatttgtctgtaaggaagaaacacaaaccttttaaaaagttccacttcgactctgcaccgccgacccccaatctctttaattttgccatagaagaggggttttttcaacatctctctcactatctggtgctgatctcactgcataatgactttctatttgtttggtattcgaagctttccgaagctttggaagagcccataccttgggctaggcccagggcactcttatgtctcgctgtttctggcagaccgctgtggcatcaggaaccagcagaggttgttttctcttaaaacaatgtctccacagaataccaaagcaacgaatctgattgccaaggccagatatctcaggaaagatgagggcagtaataagcaagtttattctgttcctcatttttttttagctggagcagctaaggagagatcacagatgaattctcaaactgaagatcatgccttggcacctgtgaggaacactattcaactcccaacacaacctttgaattcagaggagtgggataaacttaaggaagatttaaaagaaaacaccggaaagaccagtttcgaaagttggatcatttcacagatggctggctgtcatagctctatagatgtggctaaatctctgctggcatgggtagcagccaaaaataatggtattgtaagttacgatttactggtcaagtatttgtatctctgtgtctttcatatgcagacatctgaagttattgatgtctttgaaattatgaaagccagatataagactttagaacctagaggttacagtcttctcatccggggattgatccattcagacagatggagagaagcattgttgctgttagaggacatcaaaaaagttataactccttcaaaaaagaactataatgactgtatccagggagctctccttcatcaagatgtaaacacagcttggaatttatatcaggaattgctaggtcatgatattgttcctatgttggaaactttaaaagctttctttgattttggaaaagacataaaggatgataactattcaaataaactactagatattctttcatatctaagaaataatcagctgtatccaggggagtcatttgcacacagtataaaaacatggtttgagagtggccagtgttcgggctgtggaaaaaccatagagtctattcagctgagtccagaagaatatgaatgtcttaagggaaaaatcatgagggatgtgatagatggaggtgaccagtacagaaagacaacacctcaggaacttaagagatttgagaacttcataaaatctcgtcctccttttgatgttgtcattgatggtctcaatgttgccaaaatgtttcctaaagttcgtgaatctcaacttctcttgaatgtcgtctctcaactagccaaacggaatctgcgactgctggtcctaggccggaagcacatgctaagacggagttcccagtggagtcgggatgagatggaagaggtgcaaaagcaagccagctgtttttttgctgatgacatctcggaggatgatccattccttctgtatgccacactgcactccgggaatcactgcaggtttatcacaagagacctgatgcgggaccacaaggcctgtctgcctgatgccaagacccaacgcctgttttttaagtggcagcagggacatcagctggcaattgtaaataggtttccaggatcaaaactaacctttcagcgtattctcagctatgacacagtggtgcaaacaactggagactcgtggcacataccatatgatgaagacttggtagaaagatgttcctgtgaagtaccaaccaaatggctttgcctccaccaaaagacatagagattcttacctctatgctaagtttgtgtttgggtaccctctaggttggcatcagaggctcttgagctggtgtttgtttagggcattgcctctgtcctgaagataaaaggattctattaacagcattgacattgattttttaatgaaatgagatatatcttttcataaccagctgcgtttttttcccctaacatttgtttttggaggcttatcaagagttggagaacttagtgtagagcaaaacctgcatttctcctactgggccagctattccacttagcttgggtgactaatagtgcttttggtatccattttttgctacttctgacctttcgttccaggcctaccaatagcagaatcaatccatctgtccctgagatactcatgttgtttcaaatgcctcctcccatttctggcatagtctcattctctgtatgttatgccctatccacatggaatcatttatcgtcctctgtaataaactggccaagatactaaaggcttactattcatagcagtttttaattacttatcatccaattatttggattggagaagagggggcattcactcctctttttcttattttttttggaaatagagtctcaacnnnnnnnnnnnnnnnnnnnnnnnnnnnnnnnnnnnnnnnnnnnnnnnnnngtgctggaattgcagacttgagccacagtgcccagcctcacttctctagactatgatggttttttcttcattctataatctcttttccaaattggttcaacattttgtgaacactattaatttcatcattcagtatatgtgggctttctaaaatatgccaatttttttccacttaatcaagtttgacttaatttaacaaagtgattatattttaatagttacatttctgttttttccactcactagccagcttacagtttattagcccttgatttcagctgaaaatattcatgtctgcaccccttcatgatagttctttctttacgtatacatactgtattcaatatgcaagaacaggcaaaaactactctattgtgataaaaatcagaatagtaattgcctgaggaaagggatatgagagaacttgagagaactttctcggggtgatggaaagtttcttatattgatttgggtaatagtaacatagctatatgtatatattagttaaaattcctcacactaaacattttaaattgatatatttacatttatgacaatatacctcaaagtaagttagggtaagaaaagataattacttacatgaaataaacaatgacctcttttatatcaaaccatatacatgtgtataattagggtatgtattatgcacagagaaacaatttaggaaaatccaaggaggggacgttttatcttcttacctatttactgaatgcaacattactgcacaccaagacaaaagagctctccaggaaaacattggatatattgagagcattaaaagatactgcaaaagctctaataaattcagtctgcttattttccaaatttcataaactacatacttaggaaactgtgctttcagtgagctaaacttctttttttaagtaactatcatagttttaagaaaaacattttaagaagacaaaaagtatttattaagcccatctaaaaggctaatgcaaattcccaaaaaaggagcacatagagatagaggaggaggccgaagtggtggctcatacctgttaattccagcactttgggaggccaag

SEQ ID NO: 53829 - DNA, 817 bp, Homo sapiens
  misc_feature (1)...(817): n = a,t,c or g
gatcaggagtttcgtttctcacacaatgggcagcacgagcccctggggctgctgcgggcccagcccagctgggtgtagtgctggacttgcaggttcaggagctgctcttctatgagccacgtccggcacagtgctctgtgcccatcatgtgtccttcccggggcccctcttcccagtctttgctgtggccgatcagaccatttctatcgtccgctgacctctggccacaggaagccaggtccaccgcccaccaccctttcaggccatgtttctactcagtgtgcttttcccaaatgatgtgtgtggtgtttctaagagaaacagggcccataaccagtgggcagctttaggagggatggggatctgtttcagatctaggcataacctgtaaatcacannnnnnnnnnnnnnnnnnnnnnnnnnnnnnnnttttngagaangatttttcttgggccacataaaatacactaacgatagctgatgagctaaaaataaataatgaaaaggtctgtgtataaatctcatcatgttttaagaaagtttacaaacttgtgttggaccgcattcaaagctgtcctgggccacacgtgtccctgggccatgggttggacaagcttggggtatacagtatggatatgctgcacaaagggttgattcacaacctttaggcaggacagtatgagattttatcactttacccagaacagcatgcaatttacaacttaggaattgttcatttgaattttccatttaatattttcagactacgattgaccacaggtatttgaaactgcagataaaagggggaaatactgta

SEQ ID NO: 53830 - DNA, 593 bp, Homo sapiens
  misc_feature (1)...(593): n = a,t,c or g
gggaagtgtttctaaatttagcaaaatgaagcaggcagttcctcaaagattgctttaatagtctagattttaatctgaggcctcaaattctctgatttgtcttatttcctcctaagataatgccatgggtgctttaggggtgcagtgtgtgagagtatgaattttgaagtcatatagacaaaccatagttcaaagcgaagttttgttaatatcttgatgatgttggaaaagtgtgacatgggaatgattaatattaatagcacttcccacataggattgttacagggattcagtgagatgatatttgtgaaaacattaacataggccgggcgcaagtnnnnnnnnnnnnnnnnnnnnnnnnnnnnnnnnnnnnnnnnnnnnnnnnnnnnnnnnnnnnnnnnnnnnnnnnnnnnnnnnnnnnnnnnnnnnnnnnnnnnnnnnnnnnnnnnnnnnnnnnnnnnnnnnnnnnnnnnnnnnnnnnnnnnnnnnnnnnnnnnnnnnnnnnnnnnnnnnnnnnnnnnnnnnnnnnnnnnnnnnnnnnnnnnnnnnnnnnnnnnnnnnnnnnnnnnnnnnnnnnnnnnnnnggtgacata

SEQ ID NO: 53831 - DNA, 219 bp, Homo sapiens
cggacgcgtgggggccggcttgatcctggtggtccttgggattctgatatttcaggattggcacagccagagaagcccccaagctgcagctggaaggtgaacagaagagagaacaatgcaccattgaatgctggagccttggaagcgaatctgatggtcctaggaggttcgggaagaccatctgaggcctatgccatctggactgtctgctggcaattt

SEQ ID NO: 53832 - DNA, 372 bp, Homo sapiens
ggatttttactgtatgttcattagggactttttttggctgttgtttccttagtatcagagtaatgctggtctcagaggtcaagtttgaaagaattcgtgcctcttcatgtttttggaataatttgagaattaatgttagttgttctttataagttgaatgtagcagcaatgccatctggtcctagatttttcactgttgggagactttttattatggattcaacctcattacttattattagtctgttcaggttttgtattcctttttttttttcaagattgaaaaattgctatttatttaaaaaaacttctgaattaaataggcaaatggcaataactggtatatacattaattcaaagtattttcactga

SEQ ID NO: 53833 - DNA, 2138 bp, Homo sapiens
atctggggacgcgggaagggtgggactcctgggctgggaccacaagatgcctgcgccgaaccgacgagggggacacatacaggaccgagccaccaacagcactgagctgggggcaaaccagtgctttttttttccccccgccctcccagcttggaaaaaaagacaacagaaattaataaagaaccaattttttttttacttaaatagattcaataaaaagaacaaacacacacaaacacaaacacgtcttaaaataaactctttagagactaagtgcgtgtttcttttccacagtacggtgcagagaggggagggcagggggcgggggtccccttcccaatgtccccgcgggcttgagtaccaggcggcggggccagctccgccgcgatcgccccctcttcccctccctgttaaatacacaaatatattatattcaatatgaatcgagtctgtttccagcagaaaaaaaacatacaaaaaaaagtggaagggggggcttgtaaacgtcgaggtggaaggactgggcgcagggtaaggagggccggagtccagtgtggtttgcggcgcccctaggtcccagggtgggtgcccaccgcctgctccctggaccccagtgggaggcgtgtgcccagccgtccaagcgagggggtgtccgtaaaggggcaggggacgttcagaaggcgtgtcccttgaccccaagcagcagctgacagccgttgctgacgtgggtcatgaccttctgtttgagctgggccacctgctcccggaggaggccggcggtactcgacagccccgcgttctcggccttgagcgtcttcaccttgtcctccaggcgcgcgatgcgctgccagcttccgcttccggcacttggtggccgccagccggttccgcagccgcttgcgctccactttgatgcgctcttggtcttccatgttgatgggggacaccggcggcgtggcgtcccggctgcgcgcctccggcacggtctgcggttcctccttgaaggtggaggcgccgcggcccaagcccagctgcgccgggtggccaccggcgaagggcggcgcgtgtgggaggtagctgatggtggtcgtcgggtacgagctcccggtcccgacggcagccccggcgcctcccgaggacgcagaggctggggagtagctgctgaggttggtgtaaacgggaggtggctccgggccggcgtagacgcccccgggcccagccgggggccccccggtagcgcccagggacacgttggggggtgtcacgtggttcatcttgtgcagatcgtccagggctttgacaaagccgtcggcgaagccctcctgctcctcggtgacgccgccccctgcgccccctgcacctccaccgctgccacccccgcgggggtaaaagtactgtcccgggggtgtaggcgtcgtcgtgatcacgccgttgctgttggggacaatcaggcgttccagctccgaagaggcgagcttgagagacgcgccggtgtccgagccctgaccagaaaagtagctgccgccaccgccgccctctgggccgggtccgcgagccccaggcgctttgagactccggtaggggtcggccaggttgaccgccaggctcggtttcaggagtttgtagtcgtgtagagagaggccaccaggggcccggccgtatcccgtagctgtgtatgagtcgtcgtggtagaagggctgttccattttagtgcacatccgggcggcccaggcggtctggggagggtccctgcggggccgctccgggcctcgctgcagcgagcggcgagctctccgctgcggtgaccggactgggtgcctggtcgcgcgttctcgggggctggcgcgggcgggtagcagccagccggcagctgtgcgcaaaagccctgtcaggcttcccgagcccccgtcgccctctctggcgcgatagctttcctggcgtcgtttcccccagctcccagctccctgctggctccgaggctggcctggccgctctcaaggtcccagccgctcagcctgagccacacgcctttataccgcgctagtcagccacggaagtgcgctccgattggccgtcgccggagccgggcccccgcgcccccctcctcgagcgtggggaaggggaggaggcggctcgcg

SEQ ID NO: 53834 - DNA, 977 bp, Homo sapiens
tttttttttttacacatctgcagcagatttttattagatggaagataacaagcattacctcataggtaagtggtaagaaatggcaagtacagccaagccacagaggagtgaggacattactggctatgggaatgggtacttatgaaatctaagggttgggtctcctgatgaactctaactacccagtaagctcttctctttggcactcaatatgaccactgctggcatgaaagggtctacagtagctacttcaaacttggccaacagttcttccagttctggtcgagctttgaaatcgtcccttgaagtcttcttcagtgtgctccttcactgacagtctgactccttcaggaagactgctttggattatttccaagaaaatttctgcaaacgtagcactcaaaccgctgatctgaaccactcgctcatgggtggtaagcactgagtccaggagcattttgctgccttggtcctggcaactgcaacacttctatggttttggttggcattgcataactttcctcgactttaatggagagagagttgcagaggttgtgaacatactgggcataactctctgccagggtcatatcatatgcagtcagatgaatatttaaaaccccatattcataatctgtccccaaattaatggctctcacttccacttttcccttcttcttcttgggctcttctgctttaattaagtgcttgtactttccaatgccgtgggtgggctttgtcttgtagggccgactgatacttagtagaattccacctacagaatagatgggcttctctcctgaagttctaaaccttaagagagaaaaggcttgcttaaaaatggtattgttcctcaggcacagcaccttttccaaggttccgctcatcctttgctgctgcgcggcctctagctgtgcaaaccgaagaccggaccctgcagccgcgttcccagggcgtctgaaaacaccctcgtgccg

SEQ ID NO: 53835 - DNA, 1533 bp, Homo sapiens
  misc_feature (1)...(1533): n = a,t,c or g
tttttttttttatcaaagagaaccctaaaaattctaattgagcaactttattcacataatttctacaccaagaactcgaggttatctctgatggaaccaatttcactaatatttactttaagggcagagaagtcaaccaagtcctcacagtctcaagaatcaaaaacaaaacaaaaatacaaacagagagcaagtggggaagataaataacactccgaaataacctaggctacacacttttaggtttccaatttttctaggcatggaaatcacttttctcttccatcctgtaaggacgtgttctctcctctcccttctgagttgggctgtgaagagctgccctggtctcccggtctgacggtgttgtccaccccatctgaggcacccagggaattgccctggcgtccggagccctggggttctgatagcctgggtctttttgcagggaactgatggtccctcgtgccatccctcgtgatggcacgagcaacacatgtagatgaaggagcctcaattgcagttgagcccagtagactttttctgcaccccaggggtgatgatggcaacttctggaaaccctggaagtgagggtctggatttaattttcctaagaagccttctgtttgatatcgaacttccatacttgctttatctgtagacactccaatacataaaggcactgtcatctgcccaggagatttgaggcaatacttttgatgaagcttgtcaaattcttctttaatttcatcgtaacgattccttccgtggcctggcacttctttatctgggactgaaagagttttgctgggtgacactgactttctaaatattccagaactatttctaggtactaaggccatgtctgtggaggaaggatgcaaaggatcccattctctgggagatgaagctggtttcgctgggtcaccaggactctttccggagatacgactgcagtatccgggggcaggcacggcaggtgaggccagtgaaggcagcggagtcacacgtacatcccttccagctctgttacctgcacactcaaaatactctgcaccttgtagcagtatatccacttgggtcaagtatttccttcttaattcatttttcaaagggctttgaggcactgcaggctggatcaaaaaagagaagtcagaatttttaagagcttctaagtatagctgaccttttggcttctggaacaaactggcaagctcattaatgtacaaatctttacatgatcctactcaaagtcactttcacctccatgatgttattcaaagtcactttttcacttcctgctatgttaataatccaaaagaatgtaaaaagacacacacacacaaaaaaaccatgtctagagaagtttatgacagcattgctagaccaggaaaaaaaaaatctgaatattcataggtgagttcaggactcaactactggtaataacttcctcgtgccgaattcttggcctcgagggccaaattccctatagtgagtcgtattaaattcgtaatcatgtcatannggtatcgaatt

SEQ ID NO: 53836 - DNA, 637 bp, Homo sapiens
ttttttttttttttaaaatgatctctttttaatttcttaaaaagcacattcacagcacactccaagaatgccacacagcagtggtttgctgctctttgtcagaatatgtcagaaaacaaaacaaaaaaagttttaaatgctaaagattttaaaaattagttctctgaaatttctgtaaagccagtatcaccagtcatataaatctttattttggaatcataaacctttcaaaaatgtaatgagcatctaccccaaaattacacctctctgaaatgtaattaaaagctatccaacaaaaacaaaaataaatatttttctagaaagaacatatttggcattttaaaataatgttaaaaacagctttctcaaatgtaaatgatgtctagatttttactttctattaccagacagaaagtttggatctttagtggttccaatctgacttcagtaataggaggcatgattacattgaagttaatgaactttaatcctaacaaagccaatatacttttctagcacagtgattgctttttaaaagtggtgtccagcacgtactaaaaactactaagagtaaggccagatagctcaaattagttgattaatttggtatcccaaattgggtttttttttttttcct

SEQ ID NO: 53837 - DNA, 3833 bp, Homo sapiens
tcccactcggctcctcttacggagtcctcattccaccccccttgtttccgcattcatcctgagtggctggtgggaacgtgaaaagggagaggaaaaggcgcaagaagccagagagaggggtgtgggaaaagcgaaaacaggctgccaaatcaggggattccttccaatttaaaaaggaagtctgctgacgttagttagttaaatttaacatctttttatgtgtaacacttgactttggaagcaaaaatgaactttgcggagagagagggctctaagagatactgcattcaaacgaaacatgtggccattctctgtgcggtggtggtgggtgtaggattaatagtgggacttgccgtgggcttgaccagatcgtgtgactccagcggggacggcgggccgggcactgcgccagctccttcccacctgccttcttccacggccagcccctcaggtcctcctgcccaggaccaggacatctgcccggccagtgaggatgagagcggacagtggaaaaactttcgactgccggacttcgtcaacccagtccactacgacctgcacgtgaagcccctgttggaggaggacacctacacgggcaccgtgagcatctccatcaacctgagcgctcccacccggtacctgtggctgcacctccgggagaccaggatcacccggctcccggagctgaagaggccctctggggaccaggtgcaagtccggaggtgtttcgagtacaaaaagcaggagtacgtggtggtcgaggcggaggaagagcttacccccagcagtggagatggcctgtatctcctgaccatggagttcgccggctggctgaacggctccctcgtgggattttatagaaccacctacacggagaacggacgagtcaagagcatagtggccaccgatcatgaaccaacagatgccaggaaatcttttccttgttttgatgagcccaacaaaaaggcaacttatacaatatctatcacccatcccaaagaatacggagcactttcaaatatgccagtggcgaaagaagagtcagtggatgataaatggactcgaacaacttttgagaagtctgtccccatgagcacgtacctggtgtgctttgctgtacatcaatttgactctgtaaagagaatatcaaatagtggaaaacctcttacaatttatgtccagccagagcaaaagcacacagccgaatatgctgcaaacataactaaaagtgtgtttgattattttgaagaatactttgctatgaattattctcttcctaaattagataaaatcgctattccagattttggcactggtgccatggagaactggggactcatcacgtacagagaaacgaacctgctttatgaccctaaggaatcagcctcatcaaaccaacagagggtggccactgtggttgcccatgaacttgtgcatcagtggtttggaaatattgtgaccatggactggtgggaagacttgtggctaaatgaaggatttgcttctttctttgagtttctgggagtaaaccatgcagaaacagactggcaaatgcgtgaccaaatgttacttgaagatgtattacctgttcaagaggatgattctttgatgtcttcgcatccaattattgtgactgtgacaacccctgatgaaataacatctgtttttgatggaatatcctatagcaagggatcttctattttgagaatgcttgaagactggataaaaccagagaattttcaaaaaggatgtcagatgtacttggaaaaataccaattcaagaatgcaaaaacttctgatttttgggcagcactggaagaggcaagtaggctaccagtgaaagaagtaatggacacctggaccagacagatgggttatcctgtgcttaacgtgaacggtgtcaagaacatcacacagaaacgctttttgttggacccaagagctaacccttctcagcccccttcagatcttggttatacatggaatatcccagttaaatggactgaagataatataacaagcagtgtgttatttaataggtcagaaaaagaaggaatcactttgaactcctctaatcctagtggaaatgcttttctcaaaataaacccagatcatattgggttttatcgtgtaaattatgaagtagcaacttgggactcgatagctacagcgctctccttgaaccacaagacattttcttcagcagatcgtgcaagtcttattgatgatgcttttgccttggcaagagctcaacttctagattataaggtggctttgaacttgaccaagtatctcaaaagggaagagaattttttaccatggcagagagtaatttcagctgtaacctacatcattagcatgtttgaagatgataaagagctatatcctatgattgaggaatacttccaaggtcaagtgaagcctattgcagattctctgggatggaatgatgctggagaccatgtcacaaagttactccgttcctccgtgttagggtttgcgtgcaagatgggagacagagaagccttgaacaatgcttcctcgttatttgagcagtggctaaatgggactgtaagccttcccgtaaatctcaggcttctggtgtatcggtatgggatgcagaactctggcaatgagatttcatggaactacactcttgagcaataccagaaaacttcattagctcaagaaaaagaaaaactgctgtatggattagcatcagtgaagaacgttactcttttgtcaaggtatttggatttgctcaaggacacgaaccttattaaaactcaggatgtgtttacagtcattcgatatatctcatataacagctatgggaagaacatggcctggaattggatacaactcaactgggactatctagtcaacagatatacactcaataacagaaaccttggccgaattgtcacaatagcagagccattcaacactgaactgcaactgtggcagatggagagcttttttgcaaaatatccacaagctggagcaggagaaaaacctagggaacaagtgctggaaacagtgaaaaacaatatagagtggctaaaacaacatagaaacaccatcagagaatggttttttaatttacttgagagtggttaatgtattcaaatgttagagtttaattttgtgaatctattgtttctcctctgaagcatttggtggcctaatttacaagcacgatggagagagccttataaacagataatgcttttactaagcactgtgtttatatgtcttgcaaagcctttaaattgttcctctttgtttatgaaggaaagatactaatagagtacttaatatactcagggattccttctaagtgtacttcataagatattctttacaaactgaagataatgaaatagttattttaatacctttaaatatcattctttgtatcttaaatctgtgaagtagaacaatttggtcttagctttacattttcagtaccaaagaaacaccacttaatcttctctcttgattgatttttaaagtttaaataccagtacttgagggaccaatattaccatcttaatctttattttattattcagaattatacagacctaatatcattttattcacatatgtcttactactttaaatcctaccaaagtaacctgggcttaagttttacttgaggatcatatgaattagccaaaagaatggctgactgttgcctttgctcttataaaatcaataagagaactctcctctttttttaaaaataaatctaaatgattatcttgaaaaagtattgttttccagtgtcacttgactcttgaataaaaataactgcagtgttccccaaa

SEQ ID NO: 53838 - DNA, 1131 bp, Homo sapiens
  misc_feature (1)...(1131): n = a,t,c or g
aacttaagatgttgaggtgactgttggatatttgaatccagagtttgggaaagaggtctgtaatatcccttggtatgtgttaaaatccttaggccagtacatacagttcacttatttaatcagattgttaagataatagttttctccttatcctatatgtagagccaatacaatttatttttcaccttagggagttaggaaaagagggaacaaattcaaccccaaataagtagggaaataaggaaatttcatggaaatagggggaacaaacaatgggaggaaatttttaaaaggtggaaaagttggccttttgaaaaggtaaataaattgataaaccccaagcaagacttaccaagtgtattaggcctgttcttcacactgttgtaaagaactacctgagactgggtaatttatgaagaaaagagatttaattgactcacaggcccacaggcttaacaggaagcatgactgggagtcctcagtaaacttacagtcatggcagaaggtgaagggcaagcaagcacctttttcacatgatggcaggagagagagtgcaatnnnnnnnnnnnnnnnnnnnnnnnnnnnnnnnnnnnnnnnnnnnnnnnnnnnnnatcacaagaacagcaaggggggaaattggcccctgtgatccaatgggtccccccacccaaacccctcccccaattcaacatgagatttgggcaaggatgcaaatccaaactatatcaccaagaaaaaaagtgaaaacataaattatccacatcacaaatgaaaagagggcatcagtttagaccctacatatattaaaagtaaagtgggtatggaaaacttcattgacaagccgcaacttgatgaaattgacaaatactttaaaagacacagtttaccaaaactgacacaagaagaaatagaaaatcttaaggaactccatatctactacagagattgaatttgtaataaaaaattttctaacaaaaaaaactctaggcccatagtagcagtaaattttatcaaccattcaaagaaggaagaaaaaaatacaattttacatagactctcagaaattagaggaaggcaatacttcttaaatccttttataagccaggttaactttgatataaaatcccaaca

SEQ ID NO: 53839 - DNA, 877 bp, Homo sapiens
ggaataccgttatgacatgattacgaatttaataccgactcactatagggaatttggccctcgaggccaagaattcggcacgaggcatatctgattgttcaccctccctgtttgtctatgttatgtataaatgcagattcactgagagaaaggcatggatgactgtagcagtctgttctcacccctctgcccacctgacacaaatgcatatctgattgttccccctccctgtttgtctatgttatgtataaatgagattcactgagacaaaggcatgaatgactgtattagtccgttctcacactgctataaagatactacctgagactgggtaatttataaaggaaagaggtttaattgactcacagttcctcatggctggggaggcctcaggaaacttacaatcatggcagaaggcaaaggggaagcaaggcaccttcttcacaaggcagcaggagaatgtgtgccagcaggggaaaatgccagacgcttataaaaccatcagatcttgtgagaactcacccactatcatgagaacagcatgggggaaactgcccccatgattcaattacctccacctggtcccacccttgacacgtggggattatggggattacaattcaagatgagatttgggtggggacacagagccaaaccatatcacagtccctacctcaaggagttctctggctttctgctcatcttcagtccacctgtccttctagcagagcctctgctgccttccaacaggtaatcatggtcccctccgctgaacgtcaaatccctgtgagatcctaagagggcctcgtgccgaattcttggcctcgagggccaaattccctatagtgagtcgtattaaattcgtaatcatgtcata

SEQ ID NO: 53840 - DNA, 1559 bp, Homo sapiens
ttttttttttttttttgccttgtaaatagtagaattttatacaaatataaagttttgcaccttcaaagctatcactccaataagacacttattcaattaaacaaataatcttaaaaactattttaacaatgtacaaatatattcacaacataatctgctgattaagacttcaacaaagtttataatacctacaacagaatttacagatgcctacaatagtttgtagattggtttaatttacagttacatagattgctttaagaaataccattaatacaaatgcataatttacaatatccccattatagcaagaaaaaaatagattcagaaaataaaatgtcttttaggcatttattatgccaagtatgtaaattattattctcattatgacatgagaataatgctcttttagtggtaaaagatctattagctcaaggtccactgaagagctttcaatctagctaccctttctgtaaaataaatagaacagcagcaatctctgggtattccttaaactatgatgattccacttatattaactgggccttaagtagatgacttcttacaaacaaaaataaaattttataaagtagttaataccactggccctaattgttttcacttgcttgcatacgtctaagaaatttccccacgaagtgcatattaaaaactaacaattatttctaacttatacataagccaaagtgctcactcttaccatagaagcaaaactttctcctgaaaacaatctacagaaataatatgtaaacatatagagctttgagacagactaagaacatcctcctatgttctatggatcaaaatgcaaaggtctccattgcctatgtaaatgaacactttcattaacttgggatatactgatattacatggccgtgtgcatacctatggaatgtgcatacctacaccacagaacaaatcttgacaatgtttctagtgccaacacatactttctagccccaactgctggaaaggaaataaaaacttaatatgaaaactacttttcctttttataaataaagtttttaagtggaaaaacaaagccaacactcctcgttgcaacatggactaagctctaaaaggttgagtcaagaatctcttcagttgttccccaatgtaacaaagcacataagctttctctattcaggaagtctgatcatctccagtgttttgtcttaaaaactgctttccaaaatatgaagtagccatgctggttaaatgctttctgctgcgcaccttacacctgatgtaaccatacaggttggcaccttgtagcaccacacccatgataaccaccgccagccactttactctgaaggagaagagtgcactaaaagcaaatatcacccacagtactggacaggcaataagtcccaaccaaaagattcttgattcagcctctgacacagttttattctcttgagaagactcctttctagattcaaacacccaatggctacttccatcgtcatcaatgtgattccaacaacggaggggcaaccattagtctacctgtggaattctgcaatggccaaagttc

SEQ ID NO: 53841 - DNA, 931 bp, Homo sapiens
atgaaagaccagcctccttgtatcagtcctctatagacagaagcctggaaagacccatgagttctgcaagcatggccagtgacttcaggaagcggaggaagagcgagcctgcagtgggtccaccacggggcttgggagatcaaagtgcgagcaggactagcccaggccgagtggacctcccaggatcaagcaccactcttacaaagtctttcactagctcttcgccttcttccccatcaagagcaaaagaccgtgagtcccctagaagttactcatccactttgactgacatggggagaagtgcaccaagggaaagaaggaggaactccagaaaaagagaaattgcctgcaaaagctgtttatgattttaaggctcagacatctaaggagttgtcatttaagaaaggagatactgtctacatcctcaggaaaattgatcaaaattggtatgagggagaacaccacgggagagtgggcatcttcccgatctcatacgtagagaaactcacacctcctgagaaagcacagcctgcaagaccacctccgccagcccagcccggagaaatcggagaagctatagccaaatacaacttcaacgcagacacaaatgtggagctgtcactgagaaagggagatagagttattcttcttaaaagagttgatcaaaactggtatgaaggtaaaatcccaggaaccaacagacaaggcatcttccctgtttcctatgtggaggtcgtcaagaagaacacaaaaggtgctgaggactaccctgaccctccaataccccgcggcctcccgttgtcatgccttacggtttccaatgcgccgtcaccatctccacctgccaccaaaccaccagcagagtagccgccgtttctgttagcctggggacgacatgacaggttggtccccctccgtaaaagtgtggatg

SEQ ID NO: 53842 - DNA, 484 bp, Homo sapiens
aaagaccttactgtttgtgagccaccaaaaccacagtgttctttgcctcaagacccagctattgttcagtcctcactaggctcatcgacttcttcattccagtccatgggttcttatggacctttcggcaggatgcccacatacagtcagttcagtccgagttccttagttgggcagcagtttggtgctgttggtgttggtatgttttctttttcttttctttttttgtttttgtattcttcctttctttaccacaaaggtatagaaactcaacacaaactattagaaatgttgtttgatgttccttttgtaactttgttttatggtattcagaacacactttgatgatatcttaaagcctttattgatattagtgggtttttaaaagtcagctttcacagagtaacatttttttttactaggtaaaaaaaaaatggatatactaggtatatccaatatctaccaaatctaccaaattggatat

SEQ ID NO: 53843 - DNA, 437 bp, Homo sapiens
gccgctaagagccaggagtaagccagctgggcaacatagtaagaccccgtctctaatgttaataattttaaaaaaatttaaagaaaggaatccaaaaagaagataaaggtctttcatattcctttccacttccagtgttttattgcaatgtttcccacctccaatttctacctgtgcttccccacctctgttcctctctatccccaactcttctaattgccttttcttgtcttcattcccagggagggatgatcatcattctcttgtgcagtgtggccgtcacagttctctctgccatcaatgtggggaagagcatcatgtttgccatgacaccactcttgattgccacctcctccctgatgccttttattggctttctgctgggttatgttctctctgctctcttctgcctcaatggacgggtaggtatttttttt

SEQ ID NO: 53844 - DNA, 196 bp, Homo sapiens
  misc_feature (1)...(196): n = a,t,c or g
ctcactgtagccttgacctcccaggctcaggtagtcctgagcctcaggtggcatgtgccaccacacctgggtgatttctttttagtttttgtagagatgagggatctcctttgttgcccaggctgttcttgnacttntgancttnagcnngccttctgcnttggcctntnanattnctntnattnttggtntgttc

SEQ ID NO: 53845 - DNA, 1458 bp, Homo sapiens
cccacgcgtccgacagaaggttggggccatccaaccaggcagtccgcctgcacagcagctgtccctgctcatcgggctggaggacagaagacagaaccctaaaaccacaggttgctgaaaagccaggagtcaaaatgactgagcgctttgactgccaccattgcaacgaatctctctttggcaagaagtacatcctgcgggaggagagcccctactgcgtggtgtgctttgagaccctgttcgccaacacctgcgaggagtgtgggaagccatcggctgtgactgcaaggacttgtcttacaaggaccggcactggcatgaagcctgtttccactgctcgcagtgcagaaactcactggtggacaagccctttgctgccaaggaggaccagctgctctgtacagactgctattccaacgagtactcatccaagtgccaggaatgcaagaagaccatcatgccaggtacccgcaagatggagtacaagggcagcagctggcatgagacctgcttcatctgccaccgctgccagcagccaatttggaaccaagagtttcatccccaaagacaatcagaatttctgtgtgcccctgctatgagaaacaacatgccatgcagtgcgttcagtgcaaaatgcccatcaccacgggaggggtcacttaccgggagcagccctggcacaaggagtgcttcgtgttgcaccgcctgcaggaagcagctgtctgggcagcgcttcacagctcgcgatgactttgcctactgcctgaactgcttctgtgacttgtatgccaagaagtgtgctgggtgcaccaaccccatcagcggacttggtggcacaaaatacatctcctttgaggaacggcagtgccataacgactgctttaactgtaagaagtgctccctctcactggtggggcgtggcttcctcacagagagggacgacatcctgtgccccgactgtgggaaagacatctgaattcaacacagagaagttgctgcttgtgatctcacacacagatttttatgttttctttctcacccaggcaatcttgccttctggtttcttccagccacattgagactttcttctagtgcttttcagtgatactcacgtttgcttaaaccctttagtgctttgtgatagttcagtcccagggaaagagaaaactcgccctaggccctaggtgggaagatggtttgaaatttttgtaatcgagtaaggcacacccaaatgtaaaaatccttttgaatgatgcctttataaatctttctctcactgtctatttaagtgcaattaacatatgtcacgaacttgaaagttttctaaactcaataaggtaatgaccagttgttatttacagctctgtaacctcccgttgcgtcaagtctaaaccaagattatgtgacttgcaataaagttattcagaacagaatcttttgccaggcaaaaaaaaaaaa

SEQ ID NO: 53846 - DNA, 443 bp, Homo sapiens
ggcgaaccgcaacatataatggccctcctgcctctcccagcctgtcccatgaagccacaccattgtcccagactcgaagccgaggctccactaatctctttagtaaattaacttcaaaactcacaaggagaaacatgtcattcaggtttatcaaaaggcttccaactgaatatgagaggaacgggagatatgagggctcaagtcgcaatgtatctgctgagcaaaaagatgaaaacaaagaagcaaagcctcgatccctacgcttcacctggagcatgaaaaccactagttcaatggatcccggggacatgatgcgggaaatccgcaaagtgttggacgccaataactgcgactatgagcagagggagcgcttcttgctcttctgcgtccacggagatgggcacgcggagaaccccgtgcagtgggttatagaagtgtgcaag

SEQ ID NO: 53847 - DNA, 2381 bp, Homo sapiens
  misc_feature (1)...(2381): n = a,t,c or g
ttttactgagaaaaagtgaatttttaattatcttgtgaatctacttagaaaaacacacacaagcaatgttcacaactataaatttaaaccttttgcactaaaaaaacacaaaacaacaaacacaaaaccacaggcatgaactgtaaacctgtattaactatgaactggtcttaaggttaattcttagcagtcattcagtattttcctccttggcaactgtaatgttttagcaccggatgatctcccgcagaggtactagtaatgactggctgccagtgtagggagatgcttcccatatacaccacttcacacacataccggtccactctcacacccacccagacgggaggcacatggagatggggccacacgccgactctcagggtaacggaagtagggcagggggcgcataggttgcacatctttaatgtagtgcattcgtagaaaaaaggccagctttcgctcccaggcgtgctctcgtcctcagactttaatttcatgatttagaagatgcagacgttattgcctaaatattattctatacatttccatcagtgttcaggaaaacactttaattgctacttaatttacatcataatcactgggttacagctttagctcattggcaattttggaagcaatatttttgaaggctatggatgtccccgatatccgcttaaaccggaccccgttcagagacagtcttggcagcttgcacacttccatttcccactgcacgaggttctccgcgtgcccatctccgtggacgcagaagagcaagaagcgctccctctgctcatagtcgcagttattggcgtccaacactttgcggatttcccgcatcatgtccccgggatccattgaactagtggttttcatgctccaggtgaagcgtagggatcgaggctttgcttctttgttttcatctttttgctcagcagatacattgcgactccttgtgagttttgaagttaatttactaaagagattagtggagcctcggcttcgagtctgggacaatggtgtggcttcatgggacaggctgggagaggcaggagggccattatatgttgcggttcgccgttcccggggctggccgtggaaagtgctacgactggcagtgcctcttgggaagcggattcgatctggggtggctgcactactgatactgtgtgttgaagcaactggagttctctgatcaggaatagtgctgttttctttgccattctgaatcactgagtgtctatcagctgtagttctctcactgcaaacaataagtatttcgtcgtgtcattccaccagatgctgtgttaactactagggacagtggagcttttcttgcgttcaggaatatccgccttattaggattacttgcattcccaagcatgggactggctggagcaattccctttcctccaacagcactgccacttgatttccgggaggaaattccatcttctttgaggtcactatctgcagtgctggtctgactccttttcggatacgccacaacagaaggaatagctggtccagcatggtcactgtagcgtctttgcttttggcttgaagaaacacttctctgcactttgtggtgaggagactggccagtactgttgttgagatcactgctcggcctaaccttagcaagtgaaagattgctgctagaactggaatcactagcatccagctctgaagattttctccccaataacaaatatgtagctgtgatttcatcgtatttcatcttactaagagattcttgaatctcttcttgtgaatatcccattcccaccataatatctattcttttttggtctgagatgtctagctctggttcaacaaatggtttgagttcatcttcttcatgccctgcattgatccacctgtccttcatgatttgcttaaaaaaggtaaactgttcattagcagagtaaaatgaaatattctgataacccgtantatttacaaaaatttattttcaacatttcattgactatcgttcaaagcataaactcaaaaaatattttttaatgtttcaattcttgcttaaaaagccgcaggatatatccagtatggcatacaaatcaagcaaagatctaaggtcactctaaagactctccaaagttactgcttgtttccacctacatgattacctctagagtgccgcgtttaattggatttagcaccaggaaacgtttgagaaggttttcacagtctgtagacatgtagaagggaattctgtatttccctcttaatactctctctctcagttcctttaggttttgcccatcaaagggaagtgagccactgactagtgtgtataaaatgacccccagactccacacatccacttctggcccgtcatatttcttgccctggc

SEQ ID NO: 53848 - DNA, 1517 bp, Homo sapiens
tttttttttttgaacttaacagatactttattgctcacctttcacacaaagcacacctccagccattttctttcacagcttgacaatgtttacatgtacaaaaacccagcaagaagcatcatgtcatgtagatttcagtaagggagaatgtaaaacatcaactcagccaggcttttgttttctgcagcaataataaagggcctcctgcacttagcaaaaatctgtcttaactttgtagtgcatttcttccattacaaaaaaagttacctgcttaaagcaaactaacttgtatttgctgagccagtggtattaactcatgcataaaacaaatttcggtttgctatttcttctagcaaatttcaagtaaaaataaggttgaaggaggaatttgttttggatggatgcaggtcagtttgaattgctatacttaactaaatgcctacatgtactatagcttcacaacttagtttgcttttataatctttatggattttggccgtgttcaaggttttcagagttgagcatatgatacagtattccatcaacaaaataaggctactgaatgtgctatctgcagaagagctcatttaataggaactgacctaaaagttccatcatgaagcacacgtggcataaaagtcaaccggggggcagaactgtgcttggaaaataggcattggaatactttaagcaaaacacatataaatggttattcatatgaggaaggtttcctagtagtaaatctaaaaaagtctaggtgaatcctcattttcaaaactgcatattgaaaacatgaaaactacttattcaagtaatttcttcaaaaaagtttgcatgttctgactgtggaattagtctactgggcaattaaaggcaattttaaccaccttttaaaaaatttttcatagaaaggagagatgttatgtgtttctcaaataaacggcattatgtaagtccaataaaaaaatctaacagaattgaatgaagacctacaaatgcttatgccaagcaggaatctgcctgccacctgtggtctcacattaattcaaaataggtgctgaattcaggattctgaaactaagtttctattacttgagctctagcaaaatgtaaggttcggtagcctcaactagtgtaatgtcttccctgtccaaatccagaatgattatactgataacctccatgctggaaatgctgttcaaattgacccccttggtgataattctggctccctcttcctccccagcctcctccctggcctgcacgaccacctcggcctccacgaccacctcgcccaccacggaccaccaccacgatcaccatggtgcccgccatcttggtatctattgtcctgctggtagccaccaccctggtatccacttcctgtatatgaagaagatgtttggaagccaccataacctccgccttgatagccaccactgctgtggccaccatgatagccacctggctggaaacctgaatctcgataaccaccatcttggtagccacctcctcca

SEQ ID NO: 53849 - DNA, 873 bp, Homo sapiens
caaaataaataagctagttggagattattggaaaataccaatattcaatgcagatgttaaaccagatacagaggagacccaggcatgctatttaaggttatggtttctgaattggcaacaagatcttttcttaggttatatcaatttacttaacatagaacagcatatttcaggccttttccatttaataacaaaaacaatctgtacagaaaacccaaaggcaaccacatagcatatgtaaaatgtgcaaatacactttaaaatgcaagttattctatagcatttgcaagatagaatttcactgtaattagggaatctagttcatcctaacttaatagtcttttgcatgtatagacaatgcaattctacaaggcacaactcagcgttgatgctaaagtatgaaacacatcctcagattatttatttgaaaatattaaaatagcatcatgtttattattttttaatgagtcatgagctcatttctaaagcttcataaagcattacactgataacatatgtgtggtcaggacaaactgttccctgaacttaaaaggtgaaggacaagaccccatattattatcctgtattaaaaaaggaaatatacatatatgtacacagacaccccatatcacagacaagaaacttcccataattcaaagggagaccatttccttattagcaaaggtgcgcattacagtatttcatgacagttaaaaattacacacctaccacctgttttggtcaatcttgctaaaaaagacactgaaatagacaattttcttctttaaggtaaagacaatgtctaatttagaaaatcttcctcttgagattgcacagtgaaaggtatcagttaattaaatataaaagcttacc

SEQ ID NO: 53850 - DNA, 6444 bp, Homo sapiens
gctagtggaagttactgccgcgccaccgagtccggaccggagactttggggcctaactagtgaatggtagtgtctagaaagggtatgtcccttcaagagagaggtgccaatgtccaaccggcctaataacaatccaggggggtcactgcgacgttcacagaggaacactgccggggcccaaccacaagacgactcaataggaggaagaagctgcagttcatcatctgctgtgatagttccacaaccagaggatccagacagagccaatacttcagaaagacaaaaaacggggcaggtgcctaagaaagacaattctcgaggagtgaagcgcagtgctagtccagactacaacaggaccaattctcctagctctgcaaaaaaaccaaaagcacttcagcatactgaatctccctcagaaacaaataagccacatagtaagtcaaagaagagacatttagaccaggagcaacaactgaaatctgcacaatcaccatcaacaagcaaggctcataccaggaagagtggggccactggcggttcacggagtcagaaaagaaaaaggacagagagttcttgtgtaaagagtggctccgggtctgaatcaactggtgcagaagagagatctgcgaaacctaccaagctggcttcaaaatcagccacctcagccaaagctgggtgtagcaccatcactgattcttcttctgctgcctctacttcctcctcgtcttctgctgtagcctcggcctcctccactgtaccaccaggtgccagagtgaaacaaggaaaagatcagaacaaggccaggcgttcccgttcagcgtccagtcccagccccagaagaagtagcagggaaaaggaacagagtaaaactggtggctcttcaaaatttgattgggctgctcgtttcagccctaaagttagccttcctaaaacaaaactgtctcttccagggtcttctaagtcagagacatcaaaacctggaccttctggattacaggccaaattagcaagtttaagaaaatctacgaagaaacgcagtgagtctccacctgctgagctccccagtttgaggcggagcacacgccaaaagaccacgggctcctgtgctagtaccagtcggcgaggctctggcctgggcaaaagaggagcagctgaagctcgtcgacaggagaaaatggcagaccctgaaagcaaccaggaggcagtaaattcttcagctgctcggacagatgaagctccccaaggagctgcaggggctgttggcatgaccacctctggggagagtgaatcagatgattccgagatgggacgtttgcaagctttgttagaggcaaggggtcttccccctcacctatttggtcctcttggtcctcggatgtcacagcttttccatagaacaattggaagtggagctagttctaaggcccagcagctactacaaggattgcaagccagtgatgaaagtcaacagcttcaggcagttattgagatgtgtcagttactggtcatgggaaatgaggagacactgggagggtttcctgtcaagagtgttgttccagctttgattacgttacttcagatggagcacaattttgatattatgaaccatgcttgtcgagccttaacatacatgatggaagcacttcctcgatcttctgctgttgtagtagatgctattcctgtctttttagaaaagctgcaagttattcagtgtattgatgtggcagagcaggccttgactgccttggagatgttgtcacggagacatagtaaagccattctacaggcgggtggtttggcagactgcttgctgtacctagaattcttcagcataaatgcccaaagaaatgcattagcaattgcagctaattgctgccagagtatcacgccagatgaatttcattttgtggcagattcactcccattgctaacccaaaggctaacacatcaggataaaaagtcagtagaaagcacttgcctttgttttgcacgcctagtggacaacttccagcatgaggagaatttactccagcaggttgcttccaaagatctgcttacaaatgttcaacagctgttggtagtgactccacccattttaagttctgggatgtttataatggtggttcgcatgttttctctgatgtgttccaactgtccaactttagctgttcaacttatgaaacaaaacattgcagaaacgcttcactttctcctgtgtggtgcctccaatggaagttgtcaggaacagattgatcttgttccacgaagccctcaagagttgtatgaactgacatctctgatttgtgaacttatgccatgtttaccaaaagaaggcatttttgcagttgataccatgttgaagaagggaaatgcacagaacacagatggtgcgatatggcagtggcgtgatgatcggggcctctggcatccatataacaggattgacagccggatcattgagcaaatcaatgaggacacgggaacagcacgtgccattcagagaaaacctaacccgttagccaatagtaacactagtggatattcagagtcaaagaaggatgatgctcgagcacagcttatgaaagaggatccggaactggctaagtcttttattaagacattatttggtgttctttatgaagtgtatagttcctcagcaggacctgcggtcagacataagtgccttagagcaattcttaggataatttattttgcggatgctgaacttctgaaggatgttctgaaaaatcatgctgtttcaagtcacattgcttccatgctgtcaagccaagacctgaagatagtagtgggagcacttcagatggcagaaattttaatgcagaagttacctgatatttttagtgtttacttcagaagagaaggtgtaatgcatcaagtaaaacacttagcagaatcagagtctttgttgacaagtccaccaaaggcatgtacgaatggatcgggatccatgggatccacaacttcagtcagcagtgggacagccacagctgccactcatgctgcagctgacttgggatcacccagcttgcagcacagcagggatgattctttagatctcagccctcaaggtcgattaagtgatgttctaaagagaaaacgactgccaaaacgagggccaagaaggccaaagtactcacctccaagagatgatgacaaagtagacaatcaagctaaaagccccaccactactcagtcacctaaatcttctttcctggcaagcttgaatccaaaaacatggggaaggttaagtacacagtccaacagcaacaacattgagccagcacggactgcgggaggtagtggccttgccagggctgcctcaaaggataccatctccaataatagagaaaaaattaaaggttggattaaggagcaggcacataaatttgtagaacgttatttcagttctgagaatatggatggaagcaaccctgcattgaatgtccttcagagactttgtgctgcaaccgaacaactcaacctccaggtggatggtggagctgagtgccttgtagaaatccgtagcatagtctcagagtcagatgtttcatcatttgaaatccaacatagtggatttgtgaagcagctgttgctttatttgacatctaaaagtgaaaaggatgctgtgagcagagagatcagattaaagcgatttcttcatgtatttttttcttctccacttcctggagaagagcccattggaagagtggaaccagtgggtaatgcacctttgttggcattagttcacaagatgaacaactgcctcagccagatggaacaatttccagtcaaagtacatgatttccctagtggaaatgggacaggaggcagcttttctctcaacagaggatcacaggctttaaaatttttcaacacacatcaattaaaatgccagttacaaaggcatccagactgtgcaaatgtgaagcagtggaagggtggacctgtcaagattgaccctctggctttggtacaagccatcgagagataccttgtagttagagggtatggaagagtaagagaagatgatgaagacagcgatgacgatggatcagatgaggaaatagatgagtctctggctgctcagttcctaaattcaggaaatgtaagacacaggctgcagttttatattggagaacatttgctgccgtataacatgactgtgtatcaggcagtacggcagtttagtatacaggctgaagatgaaagagaatccacagatgatgagagcaatcctctaggcagagctggtatttggacaaagactcatacaatatggtataaacctgtgagagaggatgaagaaagtaataaagattgtgttggtggtaaaagaggaagagcccaaacagctccaacgaaaacttcccctagaaatgcaaaaaagcatgatgagttatggcacgatggagtgtgcccatcagtatcaaatcctttagaagtttacctcattcccacaccacctgaaaatataacatttgaagacccgtcattagatgtgatccttcttttaagagttttacatgctatcagtcgatactggtattacttgtatgataatgcaatgtgcaaggaaattattccaactagtgaatttattaacagtaagttaacagcaaaagcaaataggcaacttcaagatcctttagtaatcatgacaggaaacatcccaacatggcttactgagctaggaaaaacctgcccatttttctttccttttgatacccggcaaatgcttttttatgtaactgcatttgatcgggaccgagcaatgcaaagattacttgataccaacccagaaatcaaccagtctgattctcaagatagcagagttgcacctagattggatagaaaaaaacgtactgtgaaccgagaggagctgctgaaacaggcggagtctgtgatgcaggacctcggcagctcacgggccatgttagaaatccagtattgaaaatgaggttggtacaggtcttgggcctacactggagttttatgcgcttgtatctcaggaactacagagagctgacttgggtctttggagaggtgaagaagtaactcttagcaatccaaaagggagccaagaagggaccaagtatattcaaaacctccagggcctgtttgcgcttccctttggtaggacagcaaagccagctcatatcgcaaaggttaagatgaagtttcgcttcttaggaaaattaatggccaaggctatcatggatttcagattggtggaccttccccttggcttacccttttataaatggatgctacggcaagaaacttcactgacatcacacgatttgtttgacatcgacccagttgtagccagatcagtttatcacctagaagacattgtcagacagaagaaaagacttgaacaagataaatcccagaccaaagagagtctacagtatgcattagaaaccttgactatgaatggctgctcagttgaagatctaggactggatttcactctgccaggggtttcccaatatcgaactgaagaaaggagggaaggatataccagtcactatccacaatttagaggagtatctaagactggttatattctgggcactaaatgaaggcgtttctaggcaatttgattcgttcagagatggatttgaatcagtcttcccactcagtcatcttcagtacttctacccggaggaactggatcagctcctttgtggcagtaaagcagacacttgggatgcaaagacactgatggaatgctgtaggcctgatcatggttatactcatgacagtcgggctgtgaagtttttgtttgagattctcagtagttttgataatgagcagcagaggttatttctccagtttgtgactggtagcccaagattgcctgttggaggattccggagtttgaatccacctttgacaattgtccgaaagacgtttgaatcaacagaaaacccagatgacttcttgccctctgtaatgacttgtgtgaactatcttaagttgccggactattcaagcattgagataatgcgtgaaaaactgttgatagcagcaagagaagggcagcagtcgttccatctttcctgatcatagcaagaaatgcagtgtctgcctgttacagcaaaagaaacaaatcatgatttcttttctaatgttatcacctgagtcaaggaaacatgttacgccttcttgttgtaggaaaaacggcttgcagattataaagagacatttggttgatattcattaatggccccatggacttaaagtgatcaggccctaaaacgttgttgtgatgaggtttctttagcaagttcttgtttaaattatcatttatttgatgagtgaagtttttaacatgctttgctgtgtgaaatttaaaaaagggatgtttttccaggctggaacaataaatgtggctgtgcagtttaattctgaaaaaaa

SEQ ID NO: 53851 - DNA, 1880 bp, Homo sapiens
ctatgacatgattacgaatttaatacgactcactatagggaatttggccctcgaggccaagaattcggcacgagatggcatctccactctgtgacccagactcccacttggccccaaaagaatatttcttctgacagtggacagctgacatatcaccactttccttctactgtgagtgtctctggatgggcagaaaggaatggccagcccctggttatggtcatctaaggtcacctctgaaatgctgtgagcccctcttccttcctctcctctgctatttcccatctctgctgttggcaggagaatagaaccctgggctgccagagatgcaagtgtgtgacgatatgggtgctggtgcatatttagtatgtgcctgtgtccagccatgtgcatgtgtgggtgtgtgagtgtgtgacccagcccttcccccgtgggccaagcagagagagtggccttgaggaagccatagcagcaggaccagcatgggcctctgctgcctctgtgaccagcctgggcagatgaagtcaactgcccccatctgtcagggtaccctgagggagccggtcactatcgactgcggccacaacttctgccgggcctgccttacccgctactgtgagatacccaggcccagacctggaggagtcccctacttgcccactctgcaaagaacccttccgtccctgggagcttccggcccaactggcagctggctaacgtggtggagaacattgagcgcctccagctggtgtccacactgggtttgggagaggaggatgtctgccaagagcacggagagaagatctacttcttctgtgaggatgatgagatgcagttgtgcgtggtgtgccgggaggctggggagcacgctacccacaccatgcgcttcctggaggatgcagcgggctccctatagggaacaaatccataagtgtcttaaatgtctaagaaaagagagagaggagattcaagaaatccagtcaagagaaaataaaaggatgcaagtcctcctgactcaggtgtccaccaagagacaacaggtgatttctgagttcgcacacctgaggaagtttctagaggaacagcagagcatcctcttagcacaattggagagccaggatggggacatcttgaggcaacgggatgaatttgatttgctggttgctggggagatctgccggtttagtgctcttattgaagaactggaggagaagaatgagaggccagcaagggagctcctgacggacatcagaagcactctaataagatgtgaaaccagaaagtgccggaaaccggtggctgtgtcgccagagctgggccagaggattcgggactttccccagcaggccctcccgctgcagagggagatgaagatgtttctggaaaaactatgctttgagttggactatgagccagctcacatttctctagaccctcagacttcccaccccaagctcctcttgtccgaggaccaccagcgagctcagttctcctacaaatggcagaactcaccagacaacccccaacgttttgaccgggccacctgtgttctggcccacactggcatcacaggggggagacacacgtgggtgtggatggcccagggtaccctggggactcaggctgctgccagttctgctcaccaccatccgtgcttggcacagaagtagctgcatagaaagggcactggatttgaagtcagaagacctgggttcttgaaccagcctgtcaaccagttgtatgactttaaacaaggcatctcacctcttttcatcttgttttcttccaataatgttagagttcatgtaatcacattctctagaaccatttagtttgtgttaactatgaaccaagcagtgtggtggccactggtgacttga

SEQ ID NO: 53852 - DNA, 1106 bp, Homo sapiens
aacagatagttcagacccattgaaaccctatcaagacttcattatagattctagggaacctgatgcaactactcgtgtatgtgaactactgaagtaccaaggagagcactgtctcctaaaggaaatgcagcagtggtccattcctccatttcctgtaagtggccatgacatcagaaaagtgggcatttcttcaggaaaagaaattggggctctattacaacagttgcgagaacagtggaaaaaaagtggttaccaaatggaaaaagatgaacttctgagttacataaagaagacctaaaactgatggctactaaaaagcagagcatttctggtaagactaaattttctcccctccctcttaatgagggtttagagatacaccagaataaaagacagtttaggggacctctgtagaacaacaagggtcttattttgtgaattatatatttcaagaactaaacagagatccacctttctggatctgatttatatcactgaaatgtacagttcttttggaatagtttcacctgagaaaacatagttggctattatctatcttaacctgttcaggcttttaaaaaaaactgtttttgcatagggtagtactaagatcttaaaaagtggtaactgtcttgaagaaaaaacgtttattgtttgtttgcaattgaaataacagggttaccttaacaatgactgtctatgatgtgtcagttcttatctgaattccaaaataaacctgtgcttaaaaaagaaataattgaccaagtaagtttgcataaaatgtgaatactaaatgtgtccccagttgctggcattcatatgtacaggatttgttctagcaagctatgcttcagtatgtggttgatatttttctgtcacaatgatttctttatgcatgcagagcctgggaaagtcatgggattaacttgagggtcactattgagcctattaattaattaattattgttttaataaaacaaacattggtattggaagataaatatgtttatgtggtatctgacaatgtgtattaggtgtcatatacaatggtaatatgcctgtctttaaagtgttattttattaattaaaaggatatggctattatt

SEQ ID NO: 53853 - DNA, 538 bp, Homo sapiens
atttcggcacagagcgggactttttttttttcagactgaccgcggggcagcttgcgacatgttcgaccccggcccggagaggctcatgcgggatttcaagcggttacaagaggacccacctgtgggtgtcagtggcgcaccatctgaaaacaacatcatgcagtggaatgcagttatatttggaccagaagggacaccttttgaagatgtgtatgctgatggtagcatatgtttagatatccttcagaatcgatggagtccaacatatgatgtatcttctatcttaacatcaattcagtctctgctggatgaaccgaatcctaacagtccagccaatagccaggcagcacagctttatcaggaaaacaaacgagaatatgagaaaagagtttcggccattgttgaacaaagctggaatgattcataatagacaactggtctgttaatctttttcatcattgttgtgtataatttacctctcattagaaaggctaacaaattttaaagtgcacagggttttaaggattctgcagaaaaa

SEQ ID NO: 53854 - DNA, 2066 bp, Homo sapiens
tggtggttcaacagaatttacttgtatattttccattttctatactatttgaaggcataggatagttttgtattagctttctacaatactgtgttttaaatttatccagtaaactaagatgcagtacaacttttatacaactcaggagattaaaaaaaaaatctccacaagaagaagcaactcagcaggccctggcattaaaacatttcccagaataaacagatatgcattgcattaaaggtaattttcaaatatttaagttacaccaagatttccctccaatatgtgcctttctcaaaccaatgcaactaattcattgctaatactggggcatgaatttttggcaaatgtttatggttttactttcttcattaatcaaaaaattttttaaagtgctaccaagcagcaaaacaagtcgcatcagttctctgctcatggcagaagtgccaactgtgaaatcgcaaaaggtacagttttaacagtaagtaatgcatgaagaaactgtaacaaatggcctaaatacagagttggacagagtcaaaccagttatgtctagaattactcaattgaaactaatagaggtacattcaaaataaagttggagattataatcgctatttagaatcaaatttgaagacttccttgataaaatataagaatgttcttttgaaattgtaaatgaaactatcaatagatggagagctagagacttattaacccctcctacacacataaggaaataagtgacaaagtctcttgcactgaagttatgtattttaacagctttacatgtaatattcatatataaaaaactttaagtgcttttctccaatttaaaaatctaaagaattcaaaaataaggcattcaatatttgaaaaaagtacagatttacaaaatgtgtatattctgtcatgaaaactccacaccaacattatacacttggaaaaaaatacaaacaggatatattacaaatttatgcagcaataacttagttcacaccatgcaataaaaagtacattaatcaagatacacaagcttttgtaggttctaaactgaaggacttttttcttttttttctgcagaatccttaaaacctgtggcacttaaaatttgttagcctttctaatgagaggtaaattatacacaacaatgatgaaaaagattaacagaccagttgtctattatgaatcattccagctttgttcaacaatggccgaaactcttttctcatattctcgtttgttttcctgataaagctgtgctgcctggctattggctggactgttaggattcggttcatccagcagagactgaattgatgttaagatagaagatacatcatatgttggactccatcgattctgaagggatatctaaacatatgctacccatcagcatacacatttggatgaaacattttggataaaaacctaacagttggtggtttatttggatattcttcagaaaattctattactagtttaaaagtaccatcttcaaaaggtgtcccttctggtccaaatataactgcattccactgcatgatgttgttttcagatggtgcgccactgacacccacaggtgggtcctcttgtaaccgcttgaaatcccgcatgagcctcctccgggccggggtcgacatgctccgcagctgcccccgcggtcagtctgaaaaaaaaaaaagtcccgcgcagcccccccacccccggcggcggcggccgaatcactgtggatcgccgccgccgccgccgccgccgccgccgccgccgagactgacaaacaaccctgcaatgacgtctccctccgccgcctccggatccctccgccctccgccgctaccacagtgtgagtgctgggggaggagggggcgggacgcgggagcgcgccttccccgagcccttcagcggggcgcggttccccctgggcttcctgaagtaatcgacaaatttgtgttctctgtgttcagactagaggttgtggattcaaagaccacggaaacagaaacactatcccgtctccctccccgtcactagtttaggctcggcggggtggagaaagagggacg

SEQ ID NO: 53855 - DNA, 2283 bp, Homo sapiens
  misc_feature (1)...(2283): n = a,t,c or g
ttttttttttttttagtttttcaacaaggtttcttttatttatttagcaagaaattactctttattgatcaaatcaccaggaatctgccgcaaaagacttaacatcttaatgaccactgaggcctgggctctgaggcttgctctgcctctcccagtccttaatggggtttagagggagagacgtcattaacagagaccaagtcagatggttgcaggtcctcctttcccagtcatcagacaagttgctcaattcttgtccagagcaggaaagagccagtacttcagtaaaattgaataaagaatttgatgttgcattataagatctctcttaacaatttagatttatcaacaatattggtccaaaactcatttgcttctaatttttttcattttgcaatttactttgtgtgtgtgttactttaataatctcactccctgtgcagaaattaatcaaccccgtgcaaagaaaaatccctcaacctggaatagcttcatcttactttggcaagagaaaacagaggtatttttgctcctcttctacccaagtgatgaacaaatatccccccaaagttcaaaatgttactctggcctcggaatgcatataaagactgctttagatgggctgattccaatcacctagaaagggcagccggaaccactatgcaggcagccttctttggaaatttcttacaatcaactcttgagaaccatccgtgattgtggacaatggctctaaggtccaaacaacttctgttctttcatctcacgagctaggctcagaggaggcatttgaactgtcaggagcaagaacagcagctgtggcccccacgaggcaggacttcaataactcgcggcttgtcaatgatccgggccgttcggtttcccttttccacaatgccaacgatccacgcttggtgaccctctcccgtacttggaggatttgatttcagaacaaaagcgagccgcctgttctcttggcagacaaatcagtaatccccccagaggtttcagctgaggttccttgaagaagcccaaaccgtccactggccttgctgacggccagccatcttggcaattattggcagattatgaataacaaaggacacttcatttctttgttgttttgcaaggttctgggagtgtcctagaatgccaaagcctgtgatatctgtggccgcatgggcattaaatgtgtgcattaaacctgcagcagttctgttgagggtagccatattgaacatggcttcctgataggcccagctccacctcttctctggagaccaccatctttactttattccatctttcaggattatccagccattggtgggcattgacagcaacctgggttcctaacggtttggttaacaccagcacgtccccaacgacggcgctgtccggcattatgaactcatttggttggcatactacagtggcaactccaccgattataatccaagggttgaccaccgtttgcccaccggtcactgccgtccctccttcctcagccgcatcccgaaagcctttgaccatgagtggcgttaccttttcgcgttcctcctcactcatactctggctgacgctgagtaacatcaacatgttgtcacactcagtaatccccatggcgtagaggtcactcagcacgttggcacaagctatgcgccccatcatgtagggatcttctaccaaggggtaaaagaagtccgtggtctgcaccagtgacaggcccccgtgcctcagggggatgacgcaggagtccatcccgatgcccagggctggaaaggtggggctggggcccgctcctgccggcaggccggcttcctgggacgcctcttcctggccacccaccaggccccggcccagcgggggccgcacgtccggccgcgtcagtcccgccaggagtttgagcaagcgcccttcttgcgggaccttgcagcctcagcccttcatgccggagaagcccgtcagccgccaagctcgggcttgaggccccaaacgcctggggctcgaagggccggtagttcgagaagctccggcccagagtcaaaccgccgggcccgaggagccttccgccgctgccatcgcctctccgcaggcgcccgtcgccgaggcttccgccatggcgcctgcccggcagggaagcgagaggagaagagggcccttttattttccactcagattaatatgaagcaaaagtcaaatattacctgcagggattctccctagcgctactcaagccgtcagacccacggcatgcacaatcttcctgatagangaccgcgg

SEQ ID NO: 53856 - DNA, 1504 bp, Homo sapiens
  misc_feature (1)...(1504): n = a,t,c or g
tttttttttaccttaagaaaaaccaatcgctttatttttcctcaatatatgtttagaaaactggtctgagaagaggtttcatgagatagaccagaggactatgtacaaaatcaagagttctaaaccaataagaaaaagggcacaatgaagcacacatccccaggggccacggcagcctaggaccttcctatcagtggggaggcaaggtctttgacggcttttgagttcagctgagggatcatgctgatcttcaggagtttgctgcttgcatacttattcttgatggcgatgaatttagttaagttttcatttactttcaccacattcttggccatgtgctgcatgacttccaatacttcattctctgtgtatcctgtgtaatactgctgctttaagttccattttccttgtcctagaaccttctgagacaagcaggaagcagctgctgctaccttagaaggatgataatgcaccatatcatagtcgatgagagtcagctccatcaaatacttggctaaagtgtgctgttacacatcaacctccccggcttttgatgctcgccttaagaagtgtagtggacatggtcgacccaactcaanttcaantcgttcaaaattagagttccanttctcggatttgggnactggnntatagcatgtctgtgatgtaaacaagtcntacatatttggtagaaacatctcctcataactggaagcccagagcagagcagtaatcccaactaactgaagcttcttccgggaaactggctgaacctgtaaaaatcgatccataatgccaacgcacatgtacagagtctcctgcagaagcctaaacttggagtggacttgtaccagccaatccactaggatggcacgcatgcgtccatttatatctcttccatctaagaaatgtgggtttatggactgcaaaacctccagctgcctgagatactgatagatatccttaacgtagtcactgcagagctgagggttctcccaatcttcgttatcaatgtcctcgattttgcagagcaaggcatcagaaaaagcttgggcagagattctcttcccttcatggagacatcctcaggtgtgggagaaggaccctttggagccaactttttccatctgtactggtttgacagaagcagtaggtttcagttgtttgttgacatttgttgttttggtgggttgaaactggaactttggtgttcctgagctttccttagctacttgtgctgctctggttgtaactctatttcccaatttcttctaaaacagttcgcctaatagtcacatgactcttaactttagaattaactcctgtgtcaatattctccaaatcactggacaccgtcgggcgtcggagcagcgccatgagggacggggaaggcaagagtgccagcccggcccagggagggacgcggactgaaaagggaggacactagcgtacgaggcgccgttaggactgctctccgagcccgcagcgctggggatcttccagc

SEQ ID NO: 53857 - DNA, 2766 bp, Homo sapiens
  misc_feature (1)...(2766): n = a,t,c or g
tgcggccgcaatagtacgctcgcgcggcggtggcgggtggtggtccttggaacgcggtgggcggacagcggcacggcctcccctcccctccggacgcaagccgaagtacgtgagaggagacttccggccactgcgttgtagtcggcccggctgcaaagcgtttttctgcaggctgttttcccaggttccctcggcctgtacctcgcgcactcctcttgctccaggtccttcagtctccgctcgtctcaccgtaggctgtgacgacatgagcaacaaagaaggatcaggagggttcaggaaaaggaagcatgacaatttcccacataaccaaagaagagaagggaaggatgttaattcatcttcacccgtgatgttggcctttaaatcatttcagcaggaacttgatgcaaggcatgacaaatatgagagacttgtgaaacttagtcgggatataactgttgaaagtaaaaggacaatttttctcctccataggattacaagtgctcctgatatggaagatatattgactgaatcagaaattaaattggatggtgtcagacaaaagatattccaggtagcccaagagctatcaggggaagatatgcatcagttccatcgagccattactacaggactacaggaatatgtggaagctgtctcttttcaacacttcatcaaaacacgatcattaattagtatggatgaaattaataaacaattgatatttacgactgaagacaatgggaaagaaaataaaactccctcctctgatgcacaggataagcagtttggtacttggagactgagagtcacacctgtcgattaccttctgggagtggctgacttaactggagaattgatgcggatgtgtattaacagtgtggggaatggggacattgataccccctttgaagtgagccagtttttacgtcaggtttatgatgggttttcattcattggcaacactggaccttacgaggtttctaagaagctgtataccttgaaacaaagtttggccaaagtggagaatgcttgttatgccttgaaagtcagagggtcagaaattccaaaacatatgttggcagatgtgttttcagttaaaacagaaatgatagatcaagaagagggcatttcttagaatctaacgttactcagttactaattcttttgagaactcctaagagaccaatttgtaagacttatttagtatttcatttaactttattgtggcttttacatagaaacatattcagttgtacttgttttaaattgtatacaagctgtacataaaattagccaaatgaatcatttcttatatcttattcatgaaagtttgcatacagatgtttgcatatatgcctttttgaatttttgctggttaacctttatcatttatctttgtaatgtgaacatgcttcagagtgtaccttttgccataacctattttaatttactttttctgaagtttggagtgataatttttagtggaagcaatttgtaatttaagttggtagttatattatatatagaaaagattttttagttaaacttctggacatgagcgtcctgtttaaatttcttgttaatatcgtgccaagcctcaaaaataggcttattccatggaacaagaattaaaaatgaataagctatcaatatataatttaagtacaannnnnnnnnnnnnnnnnnnnnnnnnnnnnnnnnnnnnnnnnnnnnnnnnnnnnnnnnnnnnnnnnnnnnnnnnnnnnnnnnnnnnnnnnnnnnnnnnnnnnnnnnnnnnnnnnnnnnnnnnnnnnnnnnnnnnnnnnnnnnnnnnnnnnnnnnnnnnnnnnnnnnnnnnnnnnnnnnnnnnnnnnnnnnnnnnnnnnnnnnnnnnnnnnnnnnnnnnnnnnnnnnnnnnnnnnnnnnnnnnnnnnnnnnnnnnnnnnnnnnnnnnnnnnnnnnnnnnnnnnnnnnnnnnnnnnnnnnnnnnnnnnnnnnnnntacaagtttataaagtattatagtgaaaaattcgcattctggctgattttaagccatttaaaatttatataaaacaaccttccataaaaatttgacaggtgcccagatgttgctttctccatttattttttgtttttttttaatcacagtaggtctgatagagaattggagctaaattataatatttttgttggtaaagttgagttatatacttgtacatacaatggaaatgcttttagtagtgattatttagcaatttttgtttttgttatattaggcatgtttggaggctttcctattctagcatttaaatttaaattttattaaaattaaataatttaaatctagcatttaaatttaaataatttaagtctagcatttacttttaaataattataatgaagttttgaaatactaagttaatccagacctttagttgtcccatggtgttaataaagttgccaaagaagatgtattatgaacaattcagcaataagacaattgtcaacacagttgagaataacaatggtaatcgttagtaatatttagaattggaatttgcctactgaaatagttatagatgattacttgtgatgtgaaactgaattgagcatgacaaccagacatttccagttggttttgtaagttttgagaatctagatactgggttttattttttgaaagattagctctgtttgtaagggctgattccttgaaaatgtaattttccagaaaaacacctaaagaaaataaaacatggacatgcctagtaaaaaaaaaaaa

SEQ ID NO: 53858 - DNA, 436 bp, Homo sapiens
  misc_feature (1)...(436): n = a,t,c or g
ggaacagacaacatggctgcgacgaaatcttgaagttaagccttctcccaaaataatggtagatggaaccaatttggaatctgatgttgaagatatgttatcacctgcaatggaaaccgcaaacataactccttctgtatatagggtccatgcattgacattactctctgaggttttggctcatcttttggatatgggtttctatagtgatgaaaaggagcgggttattcctttacttgtaaatattatgcattatgttgtgccctacctcagaaatcacagttggagagcaattatggacaatctgatgacacatgataaaacaacatttagagatttgatgactcgtgtagcagtggctcaaagcagntcacttaatctctttgcaaaccgtgatgtggagctagaacagagagctatgcttcttaaaagatta

SEQ ID NO: 53859 - DNA, 443 bp, Homo sapiens
cggacgcgtgggcaagaaacatctttctttggaagtctgcatgcttcattttttctatgcttatattcaaagaattccagcgcccaatttagtggatagctgggcgtcactgttgatacttctgaaagactctatacaactgagtcttccagctccagggcagtttcttatacttggggttctgaatgagtttattatgaaaaaccctagtttggaaaataaaaaagaccaaagagaccttcaggatgtaactcacaaaatagtggatgcaattggtgcaatcgctggttcttctctggaacagacaacatggctgcgacgaaatcttgaagttaagccttctcccaaaataatggtagatggaaccaatttggaatctgatgttgaagatatgttatcacctgcaatggaaaccgcaaacataactccttctgatatagtgg

SEQ ID NO: 53860 - DNA, 874 bp, Homo sapiens
attacagccattgagatggcagaaggtgctccccctctctgtgacatgcatccaatgagagcactgtttctcattcccagaaaccctcctccccggctgaagtcaaaaaaatggtcgaagaagttttttagttttatagaagggtgcctggtgaagaattacatgcagcggccctctacagagcagcttttgaaacatccttttataagggatcagccaaatgaaaggcaagttagaatccagcttaaggatcatatagatcgtaccaggaagaagagaggcgagaaagatgaaactgagtatgagtacagtgggagtgaggaagaagaggaggaagtgcctgaacaggaaggagagccaagttccattgtgaacgtgcctggtgagtctactcttcgccgagatttcctgagactgcagcaggagaacaaggaacgttccgaggctcttcggagacaacagttactacaggagcaacagctccgggagcaggaagaatataaaaggcaactgctggcagagagacagaagcggattgagcagcagaaagaacagaggcgacggctagaagagcaacaaaggagagagcgggaagctagaaggcagcaggaacgtgaacagcgaaggagagaacaagaagaaaagaggcgtctagaggagttggagagaaggcgcaaagaagaagaggagaggagacgggcagaagaagaaaagaggagagttgaaagagaacaggagtatatcaggcgacagctagaagaggagcagcggcacttggaagtccttcagcagcagcttgctccaggagcaggccatgttctgcatgaccataggaggccgaccccgcagcactccaacacccgcaccccgcaca

SEQ ID NO: 53861 - DNA, 1191 bp, Homo sapiens
cgacttttttttttttttccatctgcccagttttattgggaacaagggcattataactgctatcaaagagaagggagcccaagggctccttctgtagcaagatccttcttcagagttgagccagggctgggagggtaagagacccttttttcaggcagggtcacactaccaccctcagcatgacttccccaaaaagttatcctcctttagctcagcacttggcacttaaggaagaaaggaccaacaaaggtagcattaggaagacaagcccagatttatcaggatacccactcagccaactgctttagtgcttcttcatcttcatccactttgggagctggccctgccggcagatgagtagaaggtacactaggcaatttgactgagggttcttcttccttgtcgcccacatttaacaactcctgggccaattcctcctgctccagctcctctagctcctccagcagttcatcctcatccacatcatctccaaagcccataggccgagaaatggcatctgagatctgctgggccacctcctgttgttccgtgatgtcagtcatcagttcatctaccttgtcaatgtccatgtcctggtaggccttcttcatgctttgggcagcaagctccatggtacgaaggacttctgcattggtagtggcattctcaatggcctcacgctgaaactccagggtggataatgtcccgtcagtttgtgccagctgctgttcgaatcttttcttcctccgcaaagcctgtagggcagctctcttattcttggtcccatacttcttggctgtttgtagctcctgttgaatcttctgctccaaaaattcctgtttcttgatcagtatcttctctgtctccttcagtttctgtattgcttcttcaggggttggccctttctccttcttccctgaggagtccagtggagtaggcccaaattttgtgaaggaaaaatattagccaccaatcattgaatacatagtatgtgctagagacctgactgtgttattgctaatccccaaatctctacaatgaacgtgctatctcttcactttaaaaatgtgaaaacaaccacaaagatgttaaaaatcacaactaataagagattgtgcaggaatcaagatgtggcagtatgagttctaaaaccaatattctttttactattcctagctgcctttctttttt

SEQ ID NO: 53862 - DNA, 1665 bp, Homo sapiens
tttttttttttttcctagtagaacaatttattaattaatatgcaataaaatatctccccaaaatctttccagaaatgacaaggcaggaaagtgaatacttttatgcttctctggaaatttttaatgtaaacatgaaatatttgaagaaccgattaaaaagtctcaagtgaatctgtaaatacatttttaagtctgacttcaaatcggtacatgaggcttagacatacacatcattggacaagtgacttaaatatctaaatacaaatcaaatagcattttcctaacttcaactataaaaacacaaatttcagtaggtactgcaaatctaagaagaataacttgaaaaataccataataagtgttgtaaaaggggaggactcatatgacagaccttgaaggaaaggtgggacatcacgggaggcaggtccccctgtggacatgattccacagaggcgtggagtccttttgccaccagcatgatcctgaaatattgaaaaccctcaagacaagtgataccttcaacatagccacaaatcagtgagcacatcccacgacagggtgtttaaagacccaaaggaaaaagaacagtcagaggcagaattccccctagtaactgccacacagtgaccaccagcgagtgatccaatggacgcatcatggatgagggagattcggaattgtgttaagtaagggacgcggcttctgagccgttcaatattctccacacctgtttggaatcaggcatctctacattggtttcaaaccaaatggtgttaaaagtcacatgcttacactactacatacaggagtaacaagagttcacgacatttggggcatcctgcatgcactcctttaacattctgactagtgactctcttaacagatgtccgctcaccagttcatacattttacaagtctaaaaataagtgatattcttctactaaaaaaatgagcaataaaaaggtttaattatcatgaatccctatacattttggaaattaacttttaaaagttcagcaaaacattaggtacttaacaacatgtatgtggatctgtaacaatagtttaaaatttgttaagaattactcccatgtcctcaggaataatttccctcgagtcccgagagtactgaacctcagtttcatcaccgtcttaaattcagacttcattccatgtaaactgggaaactcgaatctcctatttagtgaaaagagaccacggtctttacagtgcagtaaccattcattatccctgggggagggaacaggcggaaacggagctgaggccgaggcttttctggagggcaccagcacatttaaactcacagaaggcacttgagggctttgaggggctttgcaaccaatgttttccgtgacaatgggaaactttaaacaactgtacaaaggtggctccaacaccatgaagcttcctatttcactcaaaaggccacattcagtatataaaaatggggtacattaagatgctaataaattaaacaatttataaacatttaaaattatagatatcttacaaaaacgtgataaaaattatttcttcaaacaggcaataaaacagtataaaaggtctcttaattagcacaaactagctgggagagggagggaaaggaagccttagacctgagatctaaaagcttcagaacagcct

SEQ ID NO: 53863 - DNA, 618 bp, Homo sapiens
gtgactgtccgggtctgtgcatgtgaccaccacgggaacatgcaatcctgccacgcggaggcgctcatccaccccacgggactgagcacgggggctctggttgccatccttctgtgcatcgtgatcctactaggtaaactgggtctccctgcctcctatctccccatggtgaggggctcacactgttactgtgacactctagatttatctgcctcccccattaaggcatacagcctgatctaggtgagtcgagttacatactgagaatctgtgctgtacgatgtgaactcatttttgcttgcaaatggctttggaaaatgaacagatgtgaaacttgctcgtgtctttgcttgcccaggaagcaaagaatctcttgtctatcagactgggaatgaatctcgggggatttcagggcaacataaatgtgcccttttcatttcattcgttgtgtaatttttttacttggaaaacgttgttaagtgtctggcatggagtgtatgatgagggccctttctataaaggtaaagtttaaagatctatgggaaagtgggaagaggagtatgatgacttttctctcatcctagaaaaataaaaactatgaaatttttttaacccaaa

SEQ ID NO: 53864 - DNA, 2046 bp, Homo sapiens
gaattccgggctccggggatgaggtcgcggccggcgggtcccgcgctgttgctgctgctgctcttcctcggagcggccgagtcggtgcgtcgggcccagcctccgcgccgctacaccccagactggccgagcctggattctcggccgctgccggcctggttcgacgaagccaagttcggggtgttcatccactggggcgtgttctcggtgcccgcctggggcagcgagtggttctggtggcactggcagggcgaggggcggccgcagtaccagcgcttcatgcgatgcaactacccggcccggcttcagctacgccgacttcggaccgcagttcactgcgcgcttcttccacccggaggagtgggccgacctcttccaggccgcgggcgccaagtatgtagttttgacgacaaagcatcacgaaggcttcacaaactggccgagtcctgtgtcttggaactggaactccaaagacgtggggcctcatcgggatttggttggtgaattgggaacagctctccggaagaggaacatccgctatggactataccactcactcttagagtggttccatccactctatctacttgataagaaaaatggcttcaaaacacagcattttgtcagtgcaaaaacaatgccagagctgtacgaccttgttaacagctataaacctgatctgatctggtctgatggggagtgggaatgtcctgatacttactggaactccacaaattttctttcatggctctacaatgacagccctgtcaaggatgaggtggtagtaaatgaccgatggggtcagaactgttcctgtcaccatggaggatactataactgtgaagataaattcaagccacggagcttgccagatcacaagtgggagatgtgcaccagcattgacaagttttcctggggctatcgtcgtgacatggcattgtctgatgttacagaagaatctgaaatcatttcggaactggttcagacagtaagtttgggaggcaactatcttctgaacattggaccaactaaagatggactgattgttcccatcttccaagaaaggcttcttgctgttgggaaatggctgagcatcaatggggaggctatctatgcctccaaaccatggcgggtgcaatgggaaaagaacacaacatctgtatggtatacctcaaagggatcggctgtttatgccatttttctgcactggccagaaaatggagtcttaaaccttgaatcccccataactacctcaactacaaagataacaatgctgggaattcaaggagatctgaagtggtccacagatccagataaaggtctcttcatctctctaccccagttgccaccctctgctgtccccgcagagtttgcttggactataaagctgacaggagtgaagtaatcatttgagtgcaagaagaaagaggcgctgctcactgttttcctgcttcagtttttctcttatagtaccatcactataatcaacgaacttctcttctccacccagagatggcttttccaacacattttaattaaaggaactgagtacattaccctgatgtctaaatggaccaaagatctgagatccattgtgattatatctgtatcaggtcagcagaagaaggaactgagcagttgaactctgagttcatcaattgtaatatttggaaattatctacaatggaatcttccctctgttctctgataacctacttgcttactcaatgcctttaagccaagtcaccctgttgcctatgggaggaggtggaaggatttggcaagctcaaccacatgctatttagttagcatcagttgtcaccaacagtctttctgcaaagggcaggagagctttgggggaaaggaaaaggcttaccaggctgctatggtcaactcttcagaaattttcagagcaatctaaaagcgccaaaattcgctatgtttacagtgatactattaagaaaatgaatgtgattctgctctgtctttttaagtatgatcaaataaaaaatttgtacatcacaatcatttctaccaaaaaaaaaa

SEQ ID NO: 53865 - DNA, 1529 bp, Homo sapiens
  misc_feature (1)...(1529): n = a,t,c or g
tttttttttaagtattgttaacaatcctttggaagtcactactggtctttgtgtgctgctttttaataattgagttattttgagcttgccaagtaggatctattgcctggactaaaatttatttcctaatcttctgatgaccaagaaaggaaaaattaagtttgcagatgtgagatgaaatatagccagtgaatatgcatactgattctgaatgaaaggaattaacttttcagtcaagaaacagtctgcatgcagtaaattgaatttttcctgcaactggaatgatttgtttaattcttctttgaacactgccctttctccagtaagaacactaatgatttgctaatattttttaaagaaatctgtttttttaattagttaagctcagacttcctcttattttttatcctagagaaaactgctaaaagggaatgatatatcagtactattcttctaaaacaactttttaaaaatgattatacaaagccaaatatgctcattatataaaatttagaagcaaaaagaaggaaataaaaattttccataattctaccagctagagataatggtgttagaatatattcctttctaatctgttttctatgcatgcacaaacacatatgtgagcacatatttataattttattctaaaaaataggacactgctgtacatattgttttacaatctaagtcatataattataatattctttaaacatatttatgagtaaaatattaaaacttatacaaaaaaataacagaatggcattttagctcattcattgatttttataaaatatttaacacactccctgggtttgtagttagcgttcaataaatgctaaaaatttatcttcaccatcatcattaatttatttattaatcattattaaattattcattgatcattttttgaggatttactattgccagacactgtgctacaagctgggaatgctgacagtataagataaagagggaaatgatgggggatgggtcatgtaaagggagaactttcatttttacttcatatatatctaagcagttataataggttgatttttgtaatttaaaaaatgtaaaaatgcatacatgcactagtgcatgaatggcagccaggatgagtggaattggagaagcatcacacacacagtgacttttgtgtttgatcttgaagaatgagcgaaccaggcagggagtcggggaggagaatcgcattccttgaggaaagagcagcatgtgggaaaacataaatgcacgcaataacctggctcacatgttaagagaactttctgactataatgagggatgtgttgctgccccaagcttcattatctaaggagtttgttgaacactctctagaggcttttaataataggattgttttagctggtctgtctggactggttagatataacactatttttaaatgaccccantcttcatttacatttgttgaagntttcccatttttttttnagggttaccgtaaggganttttttggggaccccanaaattctttggcatt

SEQ ID NO: 53866 - DNA, 377 bp, Homo sapiens
gagctggaacccatctcccgttgaagggaaactgccagatttttgcacctctaagatactgatggctctgcagaggacccattcattgcttctgcttttgctgctgaccctgctggggctggggctggtccagccctcctatggccaggatggcatgtaccagcgattcctgcggcaacacgtgcaccctgaggagacaggtggcagtgatcgctactgcaacttgatgatgcaaagacggaagatgactttgtatcactgcaagcgcttcaacaccttcatccatgaagatatctggaacattcgtagtatctgcagcaccaccaatatccaatgcaagaacggcaagatgaactgccatgagggtgtagtgaagg

SEQ ID NO: 53867 - DNA, 1424 bp, Homo sapiens
cactcacacaaggacgccaaccccacctagatgcaaagcaggattcaaaagaacatctttgcgttttctaccggctccccatcatcgtactagggaggaagaagcgggtgagaaacaaaacttctttccattgtcctgcccgtttctgcggacttgttctgaggccgaggcacctctaagatactgatggctctgcagaggacccattcattgcttctgcttttgctgctgaccctgctggggctggggctggtccagccctcctatggccaggatggcatgtaccagcgattcctgcggcaacacgtgcaccctgaggagacaggtggcagtgatcgctactggaacttgatgatgcaaagacggaagatgactttgtatcactgcaagcgcttcaacaccttcatccatgaagatatctggaacattcgtagtatctgcagcaccaccaatatccaatgcaagaacggcaagatgaactgccatgagggtgtagtgaaggtcacagattgcagggacacaggaagttccaggggcacccaactgcagatatcgggccatagcgagcactagacgtgttgtcattgcctgtgagggtaacccacaggtgcctgtgcactttgacggttagatgccaccatgtagggattatcgcgagtggttgaccttacacttactccttaaatagcagtgagtaatgcatttgagctgtcccaggctctgtctcctcagctcatttcctactctttttctctatataactcattctattaaatacattgcaccaaagagatatggagacataaacctgtaatgaatgaggctgggcttttctgtaataagcttccttttataatactggtcagcttagctctctcagatcctatcctgtggaatttagttattatgtgtatttatgtagtatttcaaacatttcaaaatgctttcatctatgtttatcacattttaataccacagcacttataatgatgtcactacatatagaagctcaaagttaagggatttgctgaagactgtaaagttaatggaagaattgagacaaaaatccagtgtagctggccacttatccagggctttttctacttcatcacaaggaatgttttgaaagtgtctgctttttttatccttaaaattcacctgtcagggaggcattaaaaatttggaaatgtatgccagcaaaatgtgagctctgtattttttggcattcttatgtttgggtttaataagattaagaaaatgatactgggaattttctttttcctgaaactttgaatcaccctagtaagtcaaagtactaaaaaatgtactagatcattaagacttatgtgctcttactgattgaaagattttttatgttttccttgtaataaaggacctaaaccgaaggtacctgaaaaaaaaaa

SEQ ID NO: 53868 - DNA, 981 bp, Homo sapiens
aaaaaacatagtattcagaagttttggaggttaatgtctttctctaagatttgccactttagaaattcaacagaaaagaggtaaaacagaaatggaatgtatctggaacatttttggcctccatagtgcagatatactatattaacaagtaatacatttatttacctgtcagatctccaggttttaagattttgagctttctagtattaggattcattaaatgttcaattcatttcatattctaaggaattaggttatttacttactaattcaggatgttaaaataacatccaagtcggacaaccaccaccaatgcacacagttaatgagatttctaaaatataataagtacaatgtaacaaacgtatagaattttgcatttgttgccaaaattagatgtttaatgacagcttatttagttcccatttgtgggacttctggaacatagaaaccattatcttacctggttatcccttgactaaatagcatatctgcaggaaaatatcttgtttgtagtgatatgccccaatagtgattgatttcactcttgaaatgagttatatcacttaatttgtataaatgttatgagtggagagacatgtacatgttaaaagcatgttgcattatatattcattttttaaactctataaatgttaagaataatataattgcagaaatatttttcttaaatacaatgtgtaacaaaattctccgtagcaactcacccactttgcagtttatgtgatccacacttttaaagaaattccataaatgtatattttgtattatgtattatttcctggtccaaagaaaatatgtgaattcagttctaactttaagaatgtactgtttgttttcaagttcattgaaaaattgcattcagcctgcgaatggttgcagattgtatgttagatgaaaagtagaaataatttctagtttggaaaactggtgccactaaataaacaggcaattacataatg

SEQ ID NO: 53869 - DNA, 802 bp, Homo sapiens
aataagcaaaataaaggagatttttctatttgttcactttaatttattcacttttgtgtacttttatgtactgcaaatcagatttcagtctaaagcgaaacatcagtaagttaataataaacctatctttcgggaagttgaatattaatctgtacccaaaacgtatttagtaaaatatttgcccccgccaccctgccatgctgacataacaacttttataatgttgaatagatgatatgggaaatactaataacaacaatgtaatttttgcagacagctttaacttatatacattgcttgatttttttcaaaagactaaatatgtcatttatactttgtttattttctaccaaagaaggtttgtaaaaatatgcctgctgcttttccttttgaaggacacaaacctggtcccaacatgtgtggattttaactctgagtggggtgcattaaatcaaaagagagaggcagaagatgaaatgctaaagaagggtcaggcaaacttctgtttcagtataaaattcatcatgcaggcttctgagtgaaatagaatgatttgaaaccactactgtattgcctggatacacacacacacacacacacactttatacaaaaatgttaaaagcaggtttcctggcatgttctaaactgttttttctttaggaataaattacatttatctgcacagatgttgaaaatcctgttaaacccttgtcaaggatttgtttattttacattaaacaaatttattatgatgaacgtgaacaaataaattaaaaaataaaaaaggtacttgcgttttgt

SEQ ID NO: 53870 - DNA, 734 bp, Homo sapiens
ctttcaggtatgcaagcctacgcttatccccaggcatctgccgtcacctcccagctgcagcccgttcggcctttgtacccagcaccgctctctcagcctccccatttccaaggatcaggtgatatggcttcatttctcatgactgaagcccggcaacataacactgaaattcgaatggcagtcagcaaagtggctgataaaatggatcatctcatgactaaggttgaagagttacagaaacatagtgctggcaattccatgcttattcctagcatgtcagttacaatggaaacaagcatgattatgagcaacatccagcgaatcattcaggaaaatgaaagattgaagcaagagatccttgaaaagagcaatcggatagaagaacagaatgacaagattagtgaactaattgaacgaaatcagaggtatgttgagcagagtaacctgatgatggagaagaggaacaactcacttcagacagccacagaaaacacacaggcaagagtattgcatgctgaacaagagaaggccaaggtgacagaggagttagcagcggccactgcacaggtctctcatctgcagctgaaaatgactgctcaccaaaaaaaaggaaacagagctgcagatgcagctgacagaaagcctgaaggagacagatcttctcaggggccagctcaccaaagtgcaggcaaagctctcagagctccaagaacctctgagcaagcacagtccaa

SEQ ID NO: 53871 - DNA, 845 bp, Homo sapiens
gaaaagacattgaagaatccaaaatataaagatagagctggaagacgtagggagcaggttggaagtgaaggaactttccaaagagatgatgctcctgcatctgttcattctgaaattactgatagcaacaaaggtcggaagatgttggagaagatgggttggaagaaaggagagggcctggggaaggatggtggaggaatgaaaacgccgatccagcttcagcttcggcgaacacatgcaggcttggggacaggcaaaccatcctcatttgaagatgttcaccttctccaaaacaagaacaaaaaaaactgggacaaagcacgagagcggtttactgaaaacttcccagaaactaagccgtcaaaaagatgacccagggaccatgccttgggtaaaagggactttagagtgaaggctaatcatagaaaaaaaaacctctagtttttttaaaaatagaatttggaaacttattttttctccccaaaagaatcagcagcacaggggaactatgtcacagtttacctcttcctgattcagaaatgtgtatggtttgcagcttttaaaaaccatttttttaaaactaataaatagtgactgaaccaatttatgcagtaaatagactaaagttcacagggcacggatgagtttatcaaacttcgttattttatcttgtcatttacaacatccatataagcaactagccatataagcaaaattcatagaactactaatgacttaagtgtacatctgttcttgtctccaattattcatgtaagatgcacaacaaaagaaacatcagaagtttataaaaataaatctgactatatgcatcctcaaaaaaaaaa

SEQ ID NO: 53872 - DNA, 611 bp, Homo sapiens
caagtaaagctgttgataaacaggcagtggaggacataagtccattggcagagctggagtaacacccaggtcttaacgcacttttatatcttgcctttttttcaaatatgacagtaatggtttttttgggaggggggtataggtgggggtcaaagtcagtgtgagcgacagggggttctgcccagatgggaaagacgcataggggtgacatggtacacccctgccctccaatctgggaagacagtggaaggaaggaaccagggtccaggctccccaccagcagctcaccgggccacccaggcgttggtgttgatgttgaatgaggcaatggtgccagtgaagcgggggtttgtttcaaagagccacaccttcatgttggcacaggcatcccactttgccttgcccttttcttcaaagccattgaagcccaggcccgtcaaaatgcatactccttctgtgaccagccaacaggtgacatatttgtacagcacaaacttgccccagatcagcatgtacatgcagcggaaccagaaggggtggttgtcatagtcttcagtgaggagatagtcttctgtgatgtgggggctgagcagtgtgtagcccactaggta

SEQ ID NO: 53873 - DNA, 398 bp, Homo sapiens
caatcagaggcacatgttgggtcaccatgctgaaatggaaatagccaggcttttgaaggcaaacaacactctcctgaagatgggctaccattttgagcttccgggtcccagaatggtggtcactaatctgctcaccaggaatcaggataaacaaaggcagaaacgacaggaagagcaaaaacagcagcaactcaaggaacagaagaagctgatagccatgttagagaatgggttggggctgccccctgggatgtgggagctgttgggaggacccaagccagattccagaatgcaggaattcttccagccaccgccacctcggcctcccaacccccaaaatgtcccctttagtcaacgcagtgaaatgatgaaaaagccatcgcaggccccgaagtaca

SEQ ID NO: 53874 - DNA, 336 bp, Homo sapiens
gaaggctgagaagcttaaggtatttcagtctgttttatgttactcatttgcgaaaagcaggctcatcgaatacaggtgagtttcaacgcgtcttgaatatggcagcatttaaaagtcttcagaccaggcatggtggctcatgcctgtcatcccagcactttgggaggccaaggtgggaggattgcttgaggccaggagttcgagaccagcctgttcagcatagcaggacccccatctctacaaaaactaaacagattagctaggtgtggtggtgtgtgcctgtagtcctagctgcttgggaggctgaggcaggcggatagcctgagcacaggagtt

SEQ ID NO: 53875 - DNA, 384 bp, Homo sapiens
aaaaaagatctccaagcatagagaagagtctggagggaaacaccaaactcataacagtcttactgcaggcaagtgggataaaggcccagactccatggtggaagttaaagggcatttccaagttaaggctaagacttgcttttctaactaagagaatgtgctcatgcattgcttgtgtagtagaaactagtttttagaaaagaaagcaaacttaagaaacactgactcctgtggagatgacttggcaccactctcctttcacagagcagagtctgaatagtcttcagagataggcctgtgggccagattgccatcccctatggaccagaagccaaggatctctctagtgatggtcagagggcccaaatggcagggatacccagt

SEQ ID NO: 53876 - DNA, 388 bp, Homo sapiens
gaaatcatgtacgactggtcacagtcccaagaggaattacaagagtactgcagacatcatgaaatcacctatgtggcccttgtctcggataaagaaggaagccatgtcaaggttaagtctttcgagaaggaaaggcagacagagaagcgtgtgctggagactgaacttgtggaccatgtactgcagaaactgaggactaaagtcactgatgaaaggaatggcaggtttgtttgaaatccatggagcaacagtggttcccattgtgagtgtgctagccccggagaagctgtcagccagcactaggaggcgctatgaaactcaggtacaaactcgacttcagacctcccttgccaacttacatcagaaaagcagtgaaattgaaattctg

SEQ ID NO: 53877 - DNA, 366 bp, Homo sapiens
ctgaaagtagctaaggcaccccagccggaggaagtgagctctcctgacccttgggacgacccggccccagcgcagctatgaacctggagcgagtgtccaatgaggagaaattgaacctgtgccggaagtactacctgggggggtttgctttcctgccttttctctggttggtcaacatcttctggttcttccgagaggccttccttgtcccagcctacacagaacagagccaaatcaaaggctatgtctggcgctcagctgtgggcttcctcttctgggtgatagtgctcacctcctggatcaccatcttccagatctaccggccccgctggggtgcccttggggactacctctccttcaccatac

SEQ ID NO: 53878 - DNA, 358 bp, Homo sapiens
ctgaaagtagctaaggcaccccagccggaggaagtgagctctcctgacccttgggacgacccggccccagcgcagctatgaacctggagcgagtgtccaatgaggagaaattgaacctgtgccggaagtactacctgggggggtttgctttcctgccttttctctggttggtcaacatcttctggttcttccgagaggccttccttgtcccagcctacacagaacagagccaaatcaaaggctatgtctggcgctcagctgtgggcttcctcttctgggtgatagtgctcacctcctggatcaccatcttccagatctaccggccccgctggggtgcccttggggactacctctcctt

SEQ ID NO: 53879 - DNA, 342 bp, Homo sapiens
ctgaaagtagctaaggcaccccagccggaggaagtgagctctcctgacccttgggacgacccggccccagcgcagctatgaacctggagcgagtgtccaatgaggagaaattgaacctgtgccggaagtactacctgggggggtttgctttcctgccttttctctggttggtcaacatcttctggttcttccgagaggccttccttgtcccagcctacacagaacagagccaaatcaaaggctatgtctggcgctcagctgtgggcttcctcttctgggtgatagtgctcacctcctggatcaccatcttccagatctaccggccccgctggggtgcccttg

SEQ ID NO: 53880 - DNA, 981 bp, Homo sapiens
  misc_feature (1)...(981): n = a,t,c or g
agccatacgagattccagctgtcaatggcaggaggcgaaggcggatgccaagctcaggagacaagtgcactaaatctttaccttatgaaccttacaaggccctccatgggcctctgcctctttgtcttcttaaaggtaagagggctcactccaaatctctggactacctcaatctagataaaatgatccaaggagccagcttgacacagaagtgctacagtaccagcttcaacaccttaaccctccgaggggaccgttgtgtttgctaggaataatacatgaatgacttggagagagcttaaaccaatttaggtcagcctacgcttggctagaaaaaacccactgctgtactctgtacatgactcttcacactatagatggttatatcagctaagtgttcctggaacataaaaattgtttgggtcaaatttgaatacaggaatgaaatcacaggtacttgggggggggatatcattctagagcacgcaactgcaaagaaaacagaatgttgactgttagtttgtatagctttttagctaggaaaaaaaggctttggtacagtaatttcatctttatgattctgacactcaaattgggaatgttacctgcttggttgttgctgacttgatatgattcattagaaatttatatcttcagtactcaagtacttcttgaatctctgtattttactataaaatgtatgtaatgatttgttttatgaaatttaaaacttgaacattgctgaattggaccacnttttatttttaaatattgagtttaaatattttataactggttttgcactgaaaaaattaacatttcagattgacaagagagtaatctttcttcacttgcctcaataatgttattgagcaatgaattttttatttccgcatggaaagttattgatctctatggctgtaaaatatttcctttatagtcgttattaaagtgtgtacttaataaaattaaaaaaaaaaa

SEQ ID NO: 53881 - DNA, 2127 bp, Homo sapiens
  misc_feature (1)...(2127): n = a,t,c or g
ttttttttttttgtatgtggataatatttatttgtatcttatctatagaacaaatatttacagatacaaacggaatcacagcaaagttgctataaaaccatccagacctctcgatggccacttctgaaaacatccacggtgaagggcagggccaggcctggctgtggagtgggccagctgagtacctgggcgtcagacaagggaaatggttggggattatggcttcagcactctgccggagcacattcctgagcgctgacaacgtggagccctcaccgcccccacctaccccaacctcaatggggaaggaaaggggcctgagctgggcagggctgcccgggctcactatgtgcctgctccaggagtccctggcccctgtgctggcaggagcatccctgagctggaccgggaggcctctctggcctggggctgctccctgcccggcaggctgctgtttggcagctggaggtggcaagagctgctggtgctgccagggcgtgttggccaggaatgagctcccagggcagccctgaggaaagggtcttaggaagcgcctcccagctcactactaggagctggggactgtcagtgctgagtggggctggggtacaggagcacctgcctctcctttctttggcttagaagtggggaaggaagagccaggaaaagggaccaaagccgccccagcctttgcccctaggccgcctggggactgtgtgtgtgctgagggggcagtgggaggtgggcagctctggagttccctgcaccctgggatccttgggctgctctcactcccggggtcccagcagggcaaggcctctgccttgggaccagtgctgctcttcctcgctgcttactccaggaggtgaaggtgacagggcggcaaggagaggtaaccacagcatggctggggacaggcgctacactgggccccggacccagcacagggatcacagtgtcggtctcgcgcacacacctctggccacatgtgcacaccacatacatccacacgcacctccctcctgtctggcgggaggctcattctctctcgcagccactcgccctctctgcctctcacatatgcggtcacagagtgaatccgagcatcttattgctgcagggggcaggggcgtcggcatcagggaaagttaatccacgaagagcgagaacagcaccattaccacgatgcccgcacagagcagaagcagctgctgcagggagcgccacgggtcctcttcttccaagaggtcagggagcacgttcaccaaggcgatgtagagaaagccgccagaggtgaagggcaggacccaggctgccgtctcctctactcccttgggggactgggtacagactgcgaagccagcgcccagtaggccccccagcgctgttgagagttgcagcttggtgcgctccatcggtcaaagccggcccggagcaggatggcaaagtcgcccacctcatgggggatctcatgcaggaggatggccatggttgtcaggagcccgatcttcttgctcacaaggaagctggcagccacagccagcccgtgggtgaagttatcgatggtgttggccagcaggttgaggtagccgctgactttgatgctccggaccacggcaccgaggccgggctctgcagccggctgggcccanaacagtggcctccattgagtgcggcggcagcaagcaagtggggtctttgttgggggcctggctggtcccctcctccttgctgtccaggaacatcttctccaacgcccaggaaggtcaggatgccagcaatgacccacagccccagctgttgctgctgctgcagctctgcccctcaccaccaaggctggcgctgcacgtgtaggcccaggcttcgggcagcagatgcagaaacacattgcccaagagtccccccagggcgaagctgagcagctgcttcaggcgccaggccccagcttctgagcgcagcatggtccccatctctaggggaatgacaagcaacgggaagaccccactgagccccaccatgagggaacccaggagggagcagatccaggtgtccagccgctctccgctcagcagagccccccaggactcgctttccttgttgtccaggcgacaggccctcgttccgaac

SEQ ID NO: 53882 - DNA, 659 bp, Homo sapiens
tttttaaagtggtgaaaaccaattttattcagtaattactaacagtaggggaaagagcagcgttccatttcaatgcagagataattgagcagcttaaagagagaataagggagggggaaagagccggaatacatgcaaaacatttcaaagtctgtcagtataaaagtgattagatcagctgcgtcactagctggcgattatcactgaagtcaggattctaccctcccacccaagaatgggagatagcaaccttccagatgattaaatttcaaaggaatggctttcaggtccttaagaaagatactcctgaattgtaggagagaacacatacgtgtcaaggggacagaggaaggactcacaattgtaagctctttttttgtaaatgctccaagaaagggggtcaagggcctatgcaagggttgggcagtgttgagttttctctgggagacatttaaccgagaggcccggggagagatctgcggtcatcctacgaacacgaccttatgctgctacaaggctcgctatagtttggtggtctccttttgctgaggtttggacaaggtcattacgtgacaagagttctgcagttctcatgatccatatgtcattattaggtaaaatctgttaggtttaaaattaattagtgtaatctctttgat

SEQ ID NO: 53883 - DNA, 1499 bp, Homo sapiens
gtccttttaaaccactgtgccttctcaccctttccatcttcagtttgaacgactcccaggaaggcctagagcagaccctttagaaatcagcccaagggggagagcaagagaaaacactctagggagtaaagctccccgggcgtcagagttgagccctgcctgggctgaaggactgtcttcacgaagtcagtcctgaggaaaaatattggggactccaaatgtcctctggcagaggacccagaaaaccacactggctccaacttcctcctcatggggcattacacttcaaaacagtggggagcaacttttccaccaaagctacaaacctaaaatgctgctgccccaaagcacaagagggaagagcaccgccggggccacaggacgtctgtcctccagtcacaggccatccttgctgctccctactgactctagcttacttcccctgtgaagaaacaggtgttctcggctgagcccccaaccctctgcagaaccaggttgatctgccacagaaaaagcatctttgaagacaaagagggtgaggtcttcatgagtctcctgggcccaaagccatcttctgatggaaggaagagagtagggccagtgaaggctgcccagagagaatgtcacagatgaggctgcccctgcccccccccccccagggaggtttcatgagctcatgtctatgcagcacataagggttcttcagtgaaaagcaggagaagagcccacttgcaaggatagctcattaggcccatgaccgatgcagggaaggccatgccggggaagctcttcctgcaggtattttccatctgctgtgccaaggctgagcggcagaaacttgtctcataaattggcactgatggagcatcagctgtggcccacagagagccttgctgagaagggggcaggtaaagcagagattttagcattgccttggcataacaagggcccatcgattccctactaatgagaggcagggagagcatgggcaatggagacccaccaatgatccccaaccccggtgggtactggctgcctgccctgggccaggggaatggctccttataccaaagatgctggcacatagcagaacccagtgcacgtcctccccttcccacccacctctggctgaaggtgctcaagagggaagcaattataaggtgggtggcaggagggaacaggtgccacctgctggacaatcacacgaaaggcaggcgggctgtgtactgggccctgactgtgcgtccactgctgtcttccctacctcaccaggctactggcagcagcatcccgagagcacatcatctccacagcctggtaaattccatgtgcctctgggtacaaaagtgcctcaacgacatgctctggaaatcccaaatgccacagtctgaggttgatatctaaaatctatgccttcaaaagagtctctgttttttttttttaacctggtagacggtataaaagcagtgcaaataaacacctaaccttctgcaaaaaaa

SEQ ID NO: 53884 - DNA, 881 bp, Homo sapiens
gcataacaagatttctgtcaacaatagaccacttatataatgatggtcccataagatagaaggtggtatttttactgcctcttttctgtgttgcagatacgttcagatacacaaatacttaacactgtgttacagtttcctacagtactgtaacatgctgtacaggtttgtagcctaggagcaacaggctataccatatagcctagcggtagtaggctataccatctaggtttgtgtaagcacactatgatgtttgcatgacaaaatcgcctaatgacacatttctcagaatgtagttggaggaaaaaaattgaaaggagagtattacttcatgacacaggaaaatcatttgaaatacaaattccagtgtccataaataaagttcactaggaatgtgggccatgctcattcatttacatgtaatctgtgggtagtttttgtgctactgtgggcagaattgaatacttgcagtggaacttgaatgggctacaaggtgtatttgagtacctggcccttcacagaaaaagtttgctggacctggattggaatgtgcttgtgtgtatcacaggaagctcaccaggactcttggtatgtagcctctagctcccaaaggcatcctgagcccccactggcagggactcagttaccctgtctctgtcctaagcatgactcccaccccattagcgtcccagacaacgaagaaaacttctattttaaagagcttgactaaccccctccttattatctaagttagagtagctgtgccaccccttaagtagcttttccttcttcctttcaaataggggttggaagagtagcaggtgagaacaacctctttcttcctcaattgtagagactcaatagtctaggctatatattaa

SEQ ID NO: 53885 - DNA, 2202 bp, Homo sapiens
gggactgtcgcgtcggcgcccgacgcggagtcagcaggggcgaaaagcggtagatcatggcaaccatagaagaaattgcacatcaaattattgaacaacagatgggagagattgttacagagcagcaaactgggcagaaaatccagattgtgacagcacttgatcataatacccaaggcaagcagttcattctgacaaatcacgacggctctactccaagcaaagtcattctggccaggcaagattccactccgggaaaagttttccttacaactccagatgcagcaggtgtcaaccagttattttttaccactcctgatctgtctgcacaacacctgcagctcctaacagataattctccagaccaaggaccaaataaggtttttgatctttgcgtagtatgtggagacaaagcatcaggacgtcattatggagcagtaacttgtgaaggctgcaaaggattttttaaaagaagcatccgaaaaaatttagtatattcatgtcgaggatcaaaggattgtattattaataagcaccaccgaaaccgctgtcaatactgcaggttacagagatgtattgcgtttggaatgaagcaagactctgtccaatgtgaaagaaaacccattgaagtatcacgagaaaaatcttccaactgtgccgcttcaacagaaaaaatctatatccgaaaggaccttcgtagcccattaactgcaactccaacttttgtaacagatagtgaaagtacaaggtcaacaggactgttagattcaggaatgttcatgaatattcatccatctggagtaaaaactgagtcagctgtgctgatgacatcagataaggctgaatcatgtcagggagatttaagtacattggccaatgtggttacatcattagcgaatcttggaaaaactaaagatctttctcaaaatagtaatgaaatgtctatgattgaaagcttaagcaatgatgatacctctttgtgtgaatttcaagaaatgcagaccaacggtgatgtttcaagggcatttgacactcttgcaaaagcattgaatcctggagagagcacagcctgccagagctcagtagcgggcatggaaggaagtgtacacctaatcactggagattcaagcataaattacaccgaaaaagaggggccacttctcagcgattcacatgtagctttcaggctcaccatgccttctcctatgcctgagtacctgaatgtgcactacattggggagtctgcctccagactgctgttcttatcaatgcactgggcactttcgattccttctttccaggctctagggcaagaaaacagcatatcactggtgaaagcttactggaatgaactttttactcttggtcttgcccagtgctggcaagtgatgaatgtagcaactatattagcaacatttgtcaattgtcttcacaatagtcttcaacaagataaaatgtcaacagaaagaagaaaattattgatggagcacatcttcaaactacaggagttttgtaacagcatggttaaactctgcattgatggatacgaatatgcctacctgaaggcaatagtactcttcagtccagatcatccaagcctagaaaacatggaacagatagagaaatttcaggaaaaggcttatgtggaattccaagattatataaccaaaacatatccagatgacacctacaggttatccagactactactcagattgccagctttaagactgatgaatgctaccatcactgaagaattgtttttcaaaggtctcattggcaatatacgaattgacagtgttatcccacatattttgaaaatggagcctgcagattataactctcaaataattggtcacagcatttgaaaactgtgactgcagtgctgtaaacttaactgttctttgccagaacacaagacaccaaattgaactcactgcttttgaggcatctggaaatttttactttaaaaagtaaccagaatccaaggtatttttattttagcttcccttaagaatttttgaagtgactgggcaggcagcagaaattaaatgaatttttcttcctgattcctttaaatgaatatgaaacactacaaatttattcttggtgaagatgatacctgaagctgtcacctcttgattatctaaactaagcgctcattctattttataaaacaaataaattagtctcttttttctg

SEQ ID NO: 53886 - DNA, 3895 bp, Homo sapiens
catacaattgaagatttatgtaagttacttacttatttttaaactgcacaatgctgaagccagtctaaaaaagaatcaaacacaccactgcaagttaattcaatgagttacttttttttttttttaaacagatttgtacagcaaaaagttcccagatcacagtctctaccatacagtcacctgtccagtgtgcaggaagccacaggggccctggcagaggggccaagagcagaagctgcactgcagagtttacttctacctacaggtgacatgtggctggaagaatcttgagttccctttgttctccagtgtatcttgtacaaaatattacatttgtttaaacacatatttacagagtttgcacaaatagaaaatggttacaaattacaaccaggcttggcaggataccagttcccctccccactgaccaaggtcagatgtgatgaccatttcatatttacagttgcaatttaaaaagtctgtgtttagagacctaaatgaagtttataaaaactggttaaatatcatcaactcatttatgtaagctgtacaagtagtggataccaattagtcagttcatgtcttgctccctgaagaaagattttgaagtaaaagaaaccctctcaagcaagcaacatacatccctggcctgtctgccagtttgtttggtttttgccggggaaggagatagaaggaagaagaggggaatggaacagggggaataggacaatctggttgaaactgtttctattcctttttttttttttttttaaacagctgagaaccaggataagccagctggcttgttaaacactatcctttggctttgcgaagagaacccatagttccatccttttttctcagagacgaaatgtcttctcaataggactacagtatggataaagaaaggactttctggagaggacaatgtttgttattccgatgttcatctttgacttgagtgccaagcccaatttcaacagtgcaaaaaaagactctcaggaagcagcatgggggtcaaaggcttgtgtagtagctgtctacccactgggcaaggcctcgctccaccagggaccggtttatcaacaccacttcatctccaaccacactccacagctgaatcagaggaagaccagttggactgtaacttgtcacctgagcaagcagtgctgtattccccgtcatctcgctcatggcggcatctgcttccggtgaaaactggtcatcgtctgacaggggcatcacactgtccagaaggacttctgctccctgaaacggcagggtgacaaagtcagacctgatttgccggagcacgtctactttcaccctcttatatccgccgtagtccacgtatcgaatctccacttcgttggtctcctcgtaggaggcaaccacttgggctcgccaccaggccccgtccgcaccaggggcggcacagatgaccgttatttccactggggtgggcaaggtggggattccaggctgagagtaacagaggtacatctgctggtcgaggctgcgcagcgcgtggaaggtagggtgtgtgtgctgctgcacgaacaggtgcccggcattgacctggttgaccacaatgacctccacggtgatgccatcaggcagcatgagccaggatgtcatcggcagagaaggcagtgccagtgaaggcaatgggggagcgtagatattggtgaggttcaagctctttgaacttcttcccaatcaagttcagcgctttgtctacatgatgttgagagccttctatgtggcagatctggacgctctgggtgtaaggcagggttgaaatgtagatcttggcaccagatgtttgcttcagaaaactcacatagcgcccctgcttgccaattagccgaccgactaagtgctttggcacctcgatctcccagatgatgaggtcgaccttcttagggttggagcctgcctgggcattttggaagctctcagtcttcttgagactgcaacagctatccacggaatccatgctgttcctgtcagaacctgtaagttagcggtctgaactgtctacgctggggtcagcactcgaaaaacccaggacacctcgttatcaaagtgccccgctttcccgggggtggagctgcaactcctgaatgatctgcttccgcatccatggtccatccatcctcagcccccaagtctgacaactcccccttcagcaccccattgctgaagggcacagtactttctggcagtggcggggtgatggccttgtccctggggctcgagctggtctctgtgcaagagtcttcaagccctgaagtgctgaaagaatctgagcagtgtcctggagaagccaccaaagggacactttggctgctgtctgacatgcaggtgacacaggtggcatcttccaccaggatgcctgcccggtccggcaactcttcactgggggtggtcagtgccaggcaggaggccagggagatgtggtgtgcagagatatttggcttactgtccttggtggggctggacagaaggctcttcaggcagctcacgtaggtctttggtggtggtgagccctctgctggtaggcctggcaaggggaggccagcatccggcggggcaacagctgcctctgctgtggcaggctccgcagtgtctgggcccaagacagttttctggtgaactgggacacagctctcttccttctgcccttggagctgactggcctgacacacacgacctgcaaccttgccaaccgtggtggccagcacctgttcggttgcttctgagatcacttgggagattatctggaaggcagcccgcttaatctcctcatttctatccaagccctcctcatttctatccaagctctcctcatttctatccaagccctcctcatttctatccaagccctcctcatttctatccaagctctcctcattgcccagttctccctcgacacctctgtcctgggctttggcgtctgcgactgggggtgctggcgccgcatcgtcctttgccagctctgtgtgagccgactcgatgaacctacttggcaacttctctgctacatactcttcctcctgcactggccccaccacctgggatgagctgctcttccccttatcttcttccccctctaaagaggccaggctggggcccttgctgttctccaattccaagacatgctcccgagacaacagagcttcttcaagcaccttttcccccaacacggcatcaccagtcccttcggccccacctgtctctcttgccctctccccagagctacgcttctctgcggggactacggggtagcctggctggaccttccttggcaccctgctgaagggggaatcttgcttacacacctcagctgatttgctggagaatagtacaccctttggggatgaaagggggcactctagaggaatcgatttggcttcaccacctgtcagggctagctccagctttgtactgtcatctctgcgtgttcctggtcgcaatctcatgtctgtggtgttaggaagaatgcccgaggactctgatcttcggcaaggtgggtgtgggtggagcaatgctgggggctctgcaggcagcttgctcacggtggacagttccttttctggaggctctgtgacactggggggtgtggacactactttgggacagacgtcttccacggggagaggttccttgatggcagggtcagccctcacctgcacagcaccagcctccacctgctgctcatcatggctgctgacatggccttttttacgagagaaaaaccaccaccagccgaggagcgccagcatcccaggcaatgccaaggggaagagcgaacggaactggattgccatcctggaggcttgaagtaattacaccttgctgggtagtgctcggttctgccaccaagggtgcg

SEQ ID NO: 53887 - DNA, 1353 bp, Homo sapiens
ttttttttgttttttagatatttaaaatctttattgtttcatcatcaaaagttttctttccatagaagaatggtaatgttgtatcagtgcatattctatggaaaattcatatctcaagtaactagcctagaaatcagagacagcactatgtcaagctagtatacaaggtcaaagacacaatgctgccaatgcaattagtatatagaaataatacgcagctgttagaaaaagtctgtggccaagtgggataaaacagtagcagtgcactgcactggacatccagaacagaaaatagggaaggaccagagaatgcacttcctgcaaaaaaaaagtccagtagatcacaagcacaaagagttcccaactgtctcaccagctctctaactcatgtgtacctgcaccttcctcttgaaatctggaacattataataccacaagccactttcagcctccagtgggaaggctccagccacacgccgatatttcggtcctgcttcccgtcatctcatatctaaaagtcatgggcttaagttaggcaataaaacctgtggctttaggcatctttagtaaaaaagctgaacaaatcccaaatttattcccattttcttgagaaataaacttcataaaacaacagacagctgtcatgattactgagttttggctgatggcgaaataatttttatgtaagtatactgaataaacatacaaacaaatatccttaacaaaatactgtcagaccaacttgaatgtttttataacccactcctgaaaaaagtcctgataattattagatgtaaacgaccactataaattgatcatgcctggttactgggaattttttggtcaggtatgtttctgaagctgctatatagctggacttggctactttgcattaactcacacaacaaatgccttttataaggaaacagcagatctatcatgatgaactcaaaatcaaaacagttcagaggtatacaggaaacttgtcttaaaaatacttttaaattacatatgatataaccttagagaataagaactactattaccatggtctaaatcttaaactgttaatgcatgaattatctgtaagactaacaagttacttgttaatcatggcaaggccttgcaggggagggggcactctgaatgtacggcatagcaattattttccaggtaagtaaacacttctaagtgttattaaactatatttgaaaagttattttatgtaatatatacaacataccaaataagtcaaaaggaggaagcagaggaaggttttctggcatatatgatgcaaacatacaactgtccctcatcagtagtggttccatgtatgtccattttaacagggta

SEQ ID NO: 53888 - DNA, 1095 bp, Homo sapiens
  misc_feature (1)...(1095): n = a,t,c or g
gcacactccagaaaaaaacttcccaaaccctgggcaactgaggttctgatgtggagctctggatggaaagcgtgctgaagtcttgttaaactagcaagcttttgtttggaggtccaccgccgaaggcgcacaggcctgtgggaacacgagcgttgagactgggggcgtctagatgatccaagggctcggacctcaggcacatgcgaatgacccggagtgtggacaacgtccagttcctgccctttctcaccacggaagtcaacaacctgggctggctgagttatggggctttgaagggagacgggatcctcatcgtcgtcaacacagtgggtgctgcgcttcagaccctgtatatcttggcatatctgcattactgccctcggaagcgtgttgtgctcctacagactgcaaccctgctaggggtccttctcctggggttatggctacttttggctcctgggtacccaaccctgagggcccggcttcagcagttgggcctcttctgcagtgtcttcaccatcagcatgtacctctcaccactggctgacttggctaaggtgattcaaactaaatcaacccaatgtctctcctacccactcaccattgctacccttctcacctctgcctcctggtgcctctatgggtttcgactcagagatccctatatcatggtgtccaactttccaggaatcgtcaccagctttatccgcttctggcttttctggaagtacccccaggagcaagacaggaactactggctcctgcaaacctgaggctgctcatctgaccactgggcaccttagtgccaacctgaaccaaagagacctccttgtttcagctgggcctgctgtccagcttcccaggtgcagtgggttgtgggaacaagagatgactttgaggataaaaggaccaaagaaaaagctttacttagatgattgattggggcctaggagatgaaatcactttttattttttagagatttttttttttaatttnnnnnnnnnnnnnnnnnnnnnnnnnnnnnnnnntgatatgaatatgccttatatgctgatatgaatatgccttaaaataaagtgttccccacccctgcc

SEQ ID NO: 53889 - DNA, 1541 bp, Homo sapiens
  misc_feature (1)...(1541): n = a,t,c or g
ggccccacaacagcagctcccccccctgtggcccatggcggggcaaccgggccttaaggaagcttgcctggncggccggctctgcatgttcttgttgcctgtcgtctgtaactcttagtgttcgacattcgccgtgatacagtggtgtcacgacgtgtgtaactgtggtcagcagaccttgttccgcgtggacgcctcaagtggattaatttctggaagcctcaatctgtatgtttgagtatttacatgagaatgttatttgaatggaattttcttaacccagaaggtagtatttataatcatttacttgtagcgaactgtttaaagttaacacttgtttaaatttttttacactatagcatttatgcaatggtttacagaattcatggagttatttttatcagtatgggaattaattaaaaccttgaatctttgttttgtctgcttctctgagcacaagcctggtcagctggtccctgcgggtcctaccagccagcttctctgtagggctctcggccgcgtccacctctgctctcccaccacaaggtcacaaactcccacgcagtcctgggtcaccccgcagctgctctggagacttggctctgggcgtctcgtggcccaagtgctccaagttggaagtttctgtgggcctcgtgtaggggatgccgtgctgggtgagcaaacctttcagccttttgatctcctttgagagttctttatgagccttcctgcagttttccagggtctcaaaccccaagctgtcaggacctccctccagctgggtgggttcattttcttctggggtctttaagtagccagcatcctcaaaaagtgttcctcagcaacttctcatggccctgggggggtgatcagctcatcggccaggtcctgctctacctggtcccactgccgctgcagggcctctggcagggttgggtacactagcaaggcgtgggggtggcagacgaggggggtctcgaacgtcagcgcgtagacgcaggtgctcggctcggacacatgggccagccggttgctttttccacacgccagctccaccttgctctgccggctccgggaacggcaggcgtcaccgtccctcatccacatgcccgtgaaggtgttgttggcgatctcccactcgtgccagatgccgaggatcccactgtaggcgttccagcggaaggtctgctcgtgctgggtcacgttgtggaacgggcagaactcatacttgtacgtggactccaccaggctgaagcacttgcccgagagtcggaagagatgcacgggtccagacacgggtgaaggatccctcttggcctggaggcgactggcctgaggcaagaacgggttgttcaccccaaacgcgttgggctcctccaccaccttcatcttcgctgcacctgccggcgcgggcccgccggccgagagcccgaggagcaacaggagccgcgccagccccgccctcgtgccgaattcttggcctcgagggccaaattccctatagtgagtcgtattaaattcgtaatcatgtcatagctgtt

SEQ ID NO: 53890 - DNA, 466 bp, Homo sapiens
  misc_feature (1)...(466): n = a,t,c or g
gttcatcatttattcaacttttcacactactgtagtagacaatttacatagataaactttttgccactatatgacaaggattccctttcttccattttccaataaaatcttcatttccttctaaaccatcactagaaatgcctttaacattcatactactaccatctggtaaaggcaatctagtttttttctatcacagccaccaaaattcttctagtctctacccattatccaattccaaagcctttttcacattttaagacatttgttacagaagtacccaatccgtcccagttccacaatctgcattagattcccatggctgctgtaacaaattaccctctagcccagnggcttaaaacaatagaaatttattatcttggtgntntggaggccaaaagncaaaattgaggggttggcagggctgaacgtttctnganactctaaggaaacactcttcccgggc

SEQ ID NO: 53891 - DNA, 1699 bp, Homo sapiens
  misc_feature (1)...(1699): n = a,t,c or g
ttttttttttttcaggaatgaatcatttattcaaacaaaacaaaaagctatataattttgagaatttcattttttgagagtaaaaactacaaaattgaacagcgaggaggaaaaaattctgacaatgtgattcaacattaatcctttaaaagtcactgtaacaaatttaaacataagtgctttatttttctattcacaaaactaattataatacaccacaatggaattttgttacgggttttatgtgtgtaatagagggtatacatctcccatactactagcctaatttgtcctgtttgttcaaaaggggttatttttcctcttttgttcttctttgaggcagggggcctcacggctcttggcccagggctatagcataaggggcaccatcacagctcactgcaggccacaacctccggggctcaaccgatcctcctgtctcagccttcaagtagcttggactacaggcacacatgcaccaccatacccggctaagtttttgatcttgtngagacaggaccttaccctgttgcccaggctggtctcaaaactccctagcttcaagcaatcctccctaccttggcctccccaaagtgcctaagattataggcatgagccactgcacccagcccaaaaaagttattttagatcaccattagattgtagtggtctttcccatcaaacataacaggcttgtatccctgtggtgaacatagaaggcattgatttcagggaaattagcatacaataatgtaattcataccctttggcagctaaaaaaattaaagtgcttgaaagatggactctacattgatgtccagagagaggatttataacccatgtaagtaccaacaaaaatacttaaaaattagagtaagacttgcattgttaaagtttgtagatttggattgttgaggcttaaatactgcatagttctatattcactatgtcataatttgcattgctgctgcatcagaggagcttaaaaatatttctaccttctatggcagaataaatttagagagcatgattctactaatttctacatttaacaagttttcttaacttgttaaaggaatgttagcaagtcaacattccttcccatctcatattaccaactcactcccagcactcagtttaatggatatgttttggtaagtgccttaaatagatgaattcatctcctcaaagatgagtaagagttcatccagctgtatccatatcatgaaaagcacaaaaagtcagctgaactagcttttcccgcatcaagtctcgggacaggatttcccaggctgaacaggcccacaacaaacctgtcatctctgatatggtagaaaaatccataaccattgtgtaccatgggaactaccactccctggactcgtaaatagccaaccagacttgttgagagaacaaaatttccacctcctccgcttttggaaaaaagtgggtccgtaaagagttctggaacaggaagaccttcctcttttgctatgagtaagagacctaaaaggtgacgatcaaatccttttccagctgaacaattctttcatcattttattatgctttgcaaaagcttgtaacatcttttctgcccgctcacgaagattgacagaaggatcctgcatggactggcaccacctcactgcttcaactgtgcatgatcgcatagtctctgtacggccatgataaaaatgtc

SEQ ID NO: 53892 - DNA, 831 bp, Homo sapiens
  misc_feature (1)...(831): n = a,t,c or g
gcagcccaagtcaaaccatgccttcctgtacctctcccagcagagccacaacccgatctccgtcctggacagcccctccagtgattgctttgcagaatggcctgagtgaggatgaagctctgcagcgggccctggaaatgtccctggcagaaaccaaaccccaggttccaaggtaccttaccctcttgtgaaagagagcgcaacgtgtgggcaagggcttggtctggaggcaggtaggtgggaccactctgacacaatgcaagataatcgctggcaacttggtctcaaaattaagatgaactatatgatctttgacaagttatttaacccatggagccttcatttcctctataaaacgggggacaatactaatacccaccttgtagtgtggctatgaagattgagataatcctcagcagtgctcagcaccatgaggcccaacacacacagatcagatgttcaaatttcagatcttacccatcatccaacttaaactgtttctccctcccagttgtcaggaggaagaagacctagctttagcacaagcactgtcagccagtgaggcagaataccagcggcanagggtatgagggctgggctgaagatatatgctgcagtgggaagggaggaaggaagtcagggatggggggttcttcctagtgggtgcagagttttgggaatgggtgggttatcgtctnggttttcagtatgacttccagccccatgctgagctctggaaatgaggggctgtncctcatttcccttgangtttgcactgtgtctttcccttccttncccttttttttgctttagggcccagagccgcagttt

SEQ ID NO: 53893 - DNA, 1546 bp, Homo sapiens
cggattttagaggaaggcgctcggttacattggagaactggagtggtctggagttccacggtgtagtggaccagaggccacctctcctgggcttctcagtgtctcgccggcggggttcggcctgagctggattgacatagcccttggcggatttaaacaacctaaacattaagcagtacagctgcctcaaacctttgggattttcagaatgactgacactgcccgaagctgttccaaagtttgaagagatgtttgctagtagattcacagaaaatgacaaggagtatcaggaatacctgaaacgccctcctgagtctcctccaattgttgaggaatggaatagcagagctggtgggaaccaaagaaacagaggcaatcggttgcaagacaacagacagttcagaggcagggacaacagatgggggtggccaagtgacaatcgatccaatcagtggcatggacgatcctggggtaacaactaccccgcaacacagacaagaaccttactatccccagcaatatggacattatggttacaaccagcggcctccttacggttactactgatagaaatgttggcagcttttagtaaaagcatttactctgttaccatgagaaaagtttgggtgtcttctgttggtcatagttttacatctgattttacagaatggattattgattttttggaagttgagactttaaaaaaaatagatcttacttgcgaaatgcgatggttgctgggaatacctgaaactgtggattatattgcttgacttctacctcagaatcttctttgtttcatgacttaatagtgctttaagtttggtatattatttgacctctaggaattctttgttttacacagaaataaaaattttaaaatagaaaatgcttttactttgtaaggtaagagagtatccatatgcttagatgtgctcgtttctaaaattctagaggttgatataatcagctcatgaatgcacagctatgctttttgtgatagattgtacataacatcagcagttgaaaggtaaaacaattgctttttttttttttttttgcatttgttaagtgactatggtactttgtgattccttaatctatagatgagtcagctccacacttgagtctctttttagagggaaatcagtaataaagctgtaaaataaggaaggaatcattgtcagtttgtgtcttgatctggtggtggttgggataagggtacacatcattttatacaaacactaaagctttttgctaacaacatagcaggtcaaaattcacacataagaaagtttaactctgtactgttcacactttttaatcctgtaaataatgctgcattttgatggttcttacttttttggtatttaatgtgggctgattttacaatgttatattcacttccagatgcatacctctgctgctttctctcctataaatagtgatgctataaacttcctttcacagagatcattctatttcaaatcactttaatgattattacaatgatttcattcaaataaaaattttaaaatatttaagc

SEQ ID NO: 53894 - DNA, 811 bp, Homo sapiens
  misc_feature (1)...(811): n = a,t,c or g
tgctgccagaacactgcactgaagataggaggagactgtaggaaatacaagataggaaaggtctccactgaaatgttaactctttctctctaaacggccatccaggcctcaatgtctgcagtttctgatctgtgattatgacttatccaaatcttacatttcttaaaaatagtcatagatgaagggaatcacagttgatagttatatggtgacattagtggcttaaattctaaataactggaaactgtataataggcaaaactgtgaggcaaataaaatgcttctcaaatctgtgtggctcttatggggttagtttgatttggacctgtattaatttcttatggctgctataacnnnnnnnnnnnnnnnnnnnnnnnnnnnnnnnnnnnnnnnnnnnnnnnnnnnnnnnnnnnnnnnnnnnnnnnatctctaaaatgagattcactgggctgcagttcactgggcaaggcccatgctcctctggaggcttccatgatgcatcccatattcagtgtttcccgagtaagccccacccatgcaggtctgcagttttacctcaacaggcttttgcactcagtggctctctcctgtggtttctatctgaaattctcttcattttttttttaataactgcnnnnnnnnnnnnnnnnnnnnnnnnnnnnnnnnnnnnntatacagtatacaattcagtagtgtttactatattcagagttgtgcaactatcatttttctcacccccaaaagaaaccctatgcccgttagtattcactctgttttctcacaactctaggtaccactatgctactctcca

SEQ ID NO: 53895 - DNA, 1675 bp, Homo sapiens
ccagccgtccattccggtggaggcagaggcagtcctggggctctggggctcgggctttgtcaccgggacccgcagagccagaaccactcggcgccgctggtgcatgggaggggagccgggccaggagtaagtaactcatacgggcgccggggacccgggtcgggctgggggcttccaactcagagggagtgtgatttgcctgatcctcttcggcgttgtcctgctctgccgcatccagccctgtaccgccatcccacttcccgccgttcccatctgtgttccgggtgggatcggtctggaggcggccgaggacttcccaggcaggagctcggggcggaggcgggtccgcggcagaccagggcagcgaggcgctggccggcagggggcgctgcggtgccagcctgaggctggctgctccgcgaggatacagcggcccctgccctgtcctgtcctgccctgccctgtcctgtcctgccctgccctgccctgtcctgtcctgccctgccctgccctgtgtcctcagacaatatgttagcccgtgcactttgacaagccgggaggaccggaaaacctctacgtgaaggaggtggccaagccgagcccgggggagggtgaagtcctcctgaaggtggcggccagcgccctgaaccgggcggacttaatgcagagacaaggccagtatgacccacctccaggagccagcaacattttgggacttgaggcatctggacatgtggcagagctggggcctggctgccagggacactggaagatcggggacacagccatggctctgctccccggtgggggccaggctcagtacgtcactgtccccgaagggctcctcatgcctatcccagagggattgaccctgacccaggctgcagccatcccagaggcctggctcaccgccttccagctgttacatcttgtgggaaatgttcaggctggagactatgtgctaatccatgcaggactgagtggtgtgggcacagctgctatccaactcacccggatggctggagctattcctctggtcacagctggctcccagaagaagcttcaaatggcagaaaagcttggagcagctgctggattcaattacaaaaaagaggatttctctgaagcaacgctgaaattcaccaaaggtgctggagttaatcttattctagactgcataggcggatcctactgggagaagaacgtcaactgcctggctcttgatggtcgatgggttctctatggtctgatgggaggaggtgacatcaatgggcccctgttttcaaagctactttttaagcgaggaagtctgatcaccagtttgctgaggtctagggacaataagtacaagcaaatgctggtgaatgctttcacggagcaaattctgcctcacttctccacggagggcccccaacgtctgctgccggttctggacagaatctacccagtgaccgaaatccaggaggcccataagtacatggaggccaacaagaacataggcaagatcgtcctggaactgccccagtgaaggaggatggggcaggacaggacgcggccaccccaggcctttccagagcaaacctggagaagattcacaatagacaggccaagaaacccggtgcttcctccagagccgtttaaagctgatatgaggaaataaagagtgaactggaaa

SEQ ID NO: 53896 - DNA, 383 bp, Homo sapiens
gaatgtattatccagctgttatattcagtgaaacattctagagagcctatctttatttctaattgactgtaatttttgaagtttcttttttttgtagtttttaattccttgattctaccctatgaagcagtttggtgtcctgttcatttttttttcatttttttgtttttaatttctgttaagacaatgttgctttatatatacattttgtaatttataaagaaaaggggccgggcacgggggctcacgcgtgtaatcctagcactttgggaggccgaggcgggcgaatcatctgaggtcaggagttcaagaccagcctggccaacctgacgaaacctcgtctctactaaaaatacaacaacaacaaaaagttagctgggcgg

SEQ ID NO: 53897 - DNA, 1483 bp, Homo sapiens
tttttttttctttcaacattttattttttagtttctgaaatacaaatcaaaatacatttttgttacatgtcattttaacaagcttgacattcttttcaatacaggatgacacaaaataggtactttaaaacttccttttaagaaaaccatacattttatttcagagtaaacaacccatcaaaaacaaatacatagggtatatgggctattgtttttccagtattttagagcacaccatccaacttaaaatgtggtccactaaaatatgtaaatatccctcctatcacaaaaataaattaaacctcatggttaaaaaaaacagaaacgtttggcgtaggcctgagtgagcttgaaaaacaagttaggatgttttaactgtatggaggaacattacagaatccacatagaaacatctggcagaacaactagcttgttgctattggagctgttctgtttcagagagggatataaggtacatggggagggtgctgaagactcacaacagccacagaattagttactccaaattaaccagaattcaatatagaagaatatacgacaacagtagaacaatctcaacagttattcgatgcctggaaaacaagctgtaagcttcgaacaagtaactcagcaggaacaagagtcaacatgtttataagactttgaaggtgagaaaacttcatcattcatagatgatgtcttgtgcacaaatacattagtttgtaggacactggggacaacaacacaacatacaaagtaagaataaatccaagctgtttaaccttccaccattctcttgagtattaaacccaggccacctttggcccacttgcaggggtgtcttttcttctttattctcaatgtaaatacttgctccttgggacaccaagcagttttgcttcttccactctctcctcatcacaggctaagtgtagaggagtgttaccctcagtgtcttggatgtttgtggatgctttgtagtacagaaggatatgaatcatcttcaagttacccttggctgctgccccggtgcattgctgtagcctcaaaaagggtccttagcatctggattagccccggcccttcccagtaacatgaacagcgaacctcatgccctgtttttcgaaagctgccataatgtaagggagtacagccattttgattgaacagcattcacttgagcaccttttcccagaagggcttttacaatctcatcccggccagcagaagccgcaatatgaagaggagaccaacctgcatcgtctttatcattcactggcactccaagttgcaacaaaaattcaacaatttctgtatgtccaggctgagcatgcccagtgcaatgcagttctgctgtcctggtcagttctagtagccagggatttatcggccagaatactctccttcaactcttccagcttcccgctgtaggccaggttgcagaccattaggttagacacacacccctccatttcgctgtccc

SEQ ID NO: 53898 - DNA, 586 bp, Homo sapiens
gttgagacttattttttcttctgtcactcagtaaccatgatccttcctcatttaataaacatttggtgactgaatgagtaattaaatgctggttacccacttaatgtgccaggtagtatgatactttctggggactaagccatgaacaaaacagtctagatccctgccctcagaagggttacagtttatgtgattactattttcatgagtaaaagtgaagaaagccatatggaaagatttttatcttgcaagaaaaaacaattatgaaactcttttaacataaacacactgaaactgtatcaaagcaattgtccaaattgtatttatacccaagaatttctttaactaagagagcataaggcatatgtttggaaaaccaccctctttatctttgaccggcttgcagataaatatatctctccattttaaaccaagaagggcaatcatgttggtgatccagatcactgagaaagcccagtgtatcccatgggttatctttgttggcaatggaacttttctatggcccacactttacaattctttgtcattctaacccatccttcccatccttatttttttttttttt

SEQ ID NO: 53899 - DNA, 5720 bp, Homo sapiens
gagtcctgggaaaggcgcatgcgctctcattgcagcctcggcgtttgtagaagaggagcatctgctccagatggaaaatgggtaaggaacaatcaaattcaattcgggaagaatatagaggtggtaataattggtaaaagtctgcagggttttttttaaccaaaggaaactggtttgagaaaattgtgaaatcagcattgaaatttgttacctactccaatcaagatttgcaaactacaaaaaaatcattctgaagctttcacctataaatatataccaagataatttcagataagaatgtccagcaaggaagtgaagactgctctaaaaagtgctagagatgcaatcagaaacaaagaatacaaagaagctttgaaacactgtaagacagtgttaaagcaagagaaaaataactataatgcctgggtttttattggcgttgctgcagctgaactagaacaacctgatcaggcccagagtgcctataaaaaagctgctgaattagagccagaccaattactagcttggcaggggttagcaaacttgtatgagaaatataatcacataaatgctaaggatgacttgcctggtgtttaccaaaagctcctggatctttatgagagtgttgacaagcagaagtggtgtgatgtctgcaagaaacttgtggatctatattaccaagaaaagaaacacctagaggtggctcgaacatggcacaagttgataaaaacacggcaggaacaaggtgcagaaaatgaagagcttcatcaactatggagaaaattgactcagttcctggctgaaagtacagaggaccagaataatgaaactcagcaattgctttttactgcttttgagaatgcactgggattatcagataagattcctagtgaagatcaccaagtactttataggcatttcattcagagtttatccaaatttcctcatgagtctgctagattgaagaaggcctgtgaaggaatgataaacatctatcctactgtacagtatccattagaagtgctttgtttgcatttaattgaatcaggaaatcttactgatgaggggcagcagtattgttgtagattagtggaaatggattcaaaaagtggtccaggcctcattggcttaggcattaaagcattacaagacaaaaagtatgaagatgctgttaggaacctaacagaagggttaaaggaaagccctgtctgcacaagtggatggtatcatctggcagaagcccaagtcaaaatgcatagacctaaagaagctgttctttcatgcagtcaagctctgaagatcgtagataatcttggtgcgtctggtaacagtctttatcagaggaatctttgtcttcatttgaaagcagaggctttgattaaactctcagattatgactcttcagaggaagcaattcgtacgcttgatcagatttctgatgcagataatatcccaggacttttggttctcaaaagcttggcctatcggaacaaaggttcatttgatgaagctgcaaagattatggaagaccttctctcttcttaccctgacctagctgaagttcatgcccttgaggctttgattcatttcaccaaaaaggactatctacaagcagaaaaatgttttcagagagctcttgagaaagataccgaagttgcagaatatcattaccaacttggattaacatactggttcatgggtgaagagacaagaaaagataaaacaaaggctcttacccactttctgaaggctgcaagactggatacatatatgggcaaagttttctgctatttaggtcattattatagagacgtagtgggagataaaaacagagctcgtggatgttataggaaagcctttgaattagatgacactgatgctgaatctggagctgcagcagttgacctaagtgtggagcttgaagatatggaaatggctttagctatcctaacaacagtaactcaaaaggcaagtgctggaacggcaaaatgggcctggcttaggcgaggactatactatttgaaagctggtcagcattctcaagcagtggctgatttacaggcagcattaagagcagacccaaaggacttcaattgttgggaatcgttaggagaagcatacttaagcagaggaggctacacaacagccttgaagtccttcacaaaagccagtgagctgaacccagaatccatatacagtgtgtttaaggttgcagcaatacagcaaatcctaggcaaatataaggaggctgtagctcaataccagatgatcattaaaaagaaagaagattatgtgcctgctttaaaaggtttgggtgaatgccatcttatgatggcaaaagcagctctagttgattatcttgatggaaaagccgtagactacatagaaaaagcactggaatattttacttgtgctctacagcatcgagctgatgtgtcctgcctctggaagctagctggggatgcttgtacctgtctgtatgctgtcgcaccatctaaagtgaatgttcatgttttaggagtccttctaggtcagaaagaaggaaaacaagtattaaagaaaaatgagctcctccaccttggaggaaggtgttatggtcgtgcattaaaactgatgtctacatctaatacatggtgtgaccttggaattaattattatcgccaagcacaacatctagcagaaacaggcagcaacatgaatgatcttaaggagttgctggagaaatctttacattgtctgaaaaaagcagtgagactcgacagtaataatcacttatactggaatgctcttggtgtggttgcatgttacagtggtattggaaattatgcccttgctcagcactgtttcatcaaatcaatccagtcagaacaaattaatgctgttgcatggaccaacttgggagtgttatacctcacaaatgaaaacattgagcaagctcatgaggctttcaaaatggctcaatcccttgatccatcttatttaatgtgctggattggacaagctcttattgctgaggcagttggaagttatgacaccatggatctcttcaggcacactacagaactaaatatgcatactgaaggagcattaggttatgcgtattgggtctgcacaacattgcaagataaaagcaacagagaaacagagctgtaccagtacaacatcctccagatgaatgctattccagcagcacaagttattttgaataaatatgtagaaagaattcagaattatgccccagctttcacaatgttgggttacttaaacgaacatctacaactgaaaaaggaagcagcaaatgcataccaaagggcaattttgttgttacagactgcagaagaccaagatacttacaatgttgcaataagaaattacggcagattgttatgttccactggtgaatatgataaagctatccagggcttttaagtcaacaccccttgaagtgttagaagacatcataggttttgcattggctttattcatggaaggggctttataaagagagcagcaaagcctatgagagagccttgtctattgttgaatcggagcaagacaaagcccatatcttgacagctctggcaataactgaatataaacaaggaaaaacggatgtagccaagacattgctatttaaatgctctatcttaaaggaaccaaccacagaaagccttcaagccctgtgtgctctagggttgggcaatgcaggatgctacactgtcaaaagcagcacttaatgagttactgaagcacatcaaacacaaagacagtaattatcagaggtgccttcttacatcagcgatttatgcactccaaggccgcagtgtggctgtgcaaaaacaaatatctaaagctgttcacagcaaccctggtgaccctgctctttggtctctgttgtctcgagttgttgcacagtatgctcaacgaaatgcaaagggaggtgttgtagcaggaaatgtggctcatattctggactcaaatcatggaaagaaggcattactgtacactgcggtaaatcagttggctatgggaagcagttcagcagaagatgaaaaaaatactgcactaaagaccattcagaaggcagctctcctttctccaggtgatcctgctatctgggctgggctaatggcagcctgtcacgctgatgataaactggccttagtgaacaacactcagccaaagaggatagatttatacttggcactgttatctgctgtttctgcttcaattaaagacgaaaaattctttgaaaattacaaccagtcccttgaaaagtggtctctctcacaagctgtcactggtctaatagacacaggaagaatatctgaagctgaaactctctgcacaaagaatttaaaaagtaaccctgatcagccagccgttatcttacttttgagacaagttcagtgtaaaccactcctggagtcacaaaagccactcccagatgctgtacttgaagaactacaaaaaacagtcatgtccaactcaacctctgttccagcttggcagtggctggcacatgtgtatcaatcccaaggaatgatgagagctgcagagatgtgttacagaaagagtctacaattgggcatcccaacggggccagttgggagtggggaagctcttcaagtctgttgagactagcactacttgcattaaaagtctgtatggctaacatttccaatgatcactggccatctttggttcaagaggctacaactgaggccttgaagctttgcttttgtccactggctgttcttttacaagctttgttacaattcaaacgcaaaatgggggcaagagagacacggcgtcttttggaaagagtggtatatcagcctgggtatcccaaatctattgcatcaactgcacgttggtacctactgagacacttatatgccaaagatgactatgagcttattgacgtgctggtaaacaatgcccaaaactcatggagatacaagagcattggaactgaatcagagattgtcctcacaataacattggattattttatagtaaggaagcaaagaaaaagctgtaagaatgaagcaatgaatcaagacttctacccaaagcaacatttttttaaactatatttattccttttctaaaggaatctagagaagttgaagtttttaagttaggaatgcaattttctgttaactccaaacctgattttaatctgaaaaaaaaaaaatttaatttgggaaaaccagaatgaaaggaaaaccattattgccttggttgcttaacattatttgtaaaccattattttctgcatcttgcatggtgcacaatagaatatcttttactgtaatcccttacaataaagccttaatagccattttctatgtaatatgcaaaagtagattagcacaatgcacaattttcttttgttaaaaatcaaattcaaagatttaattcttgctatgaattctaaagttcggcaaaccaattcatcataaaatccaaataatcttgtaacctatttatctagtgattcatctccaattctgttgaaaaagcataatataaatgttgatgagactagactctaatggatatgtttatataattccaaacactcaggtgtgtgaatgcatttaaaaacattaatggaaaataatgctgataatatttaattgatcatgcaattccttcaattatgatggaaagacttgaactttctgaaataaaacaaaaatacagcaaaaaaa

SEQ ID NO: 53900 - DNA, 1050 bp, Homo sapiens
gtagccatggcggccatgagtttgttgcggcgggtttcggttactgcggtggcagctctgtctggccggccccttggcactcgcctcggatttgggggcttcctcactcgtggctttccgaaggctgctgctcctgttcgacacagtggagaccatgggaaaagactatttgtcatcagaccttctagattctatgacaggcgttttttgaagttattgagattctacattgcattgactgggattccagtagcaattttcataactctggtgaatgtattcattggtcaagctgaactagcagaaattccagaaggctatgtccccagaacactggggaatattataagcatcccatattcaagatgggattgcccgtaatttctatgatagtcctgaaaaggatatatggaaagaacaatggccgtccttcagattgaagctgaaaaggctgaattacgggtaaaggagctggaagtgcgaaaattgatgcatgtgagaggagatggaccctggtattactatgagacaattgacaaggaacttattgatcattctccgaaagcaactcctgacaattaagcatttttttctccaaatacaaagtatattctctttattggaaaataaattaataaatatattctgtatttttgctctccgtgaaaaacaaaagagcctctgacattactgtctctcagtgttggttcagattgaggcttttgtttgaggagtttggcttccagtccccaaagaaggtttaaaatgtactaataaaaacctggagaaataggaatttgtgaactcctaaaattgtagcaactttgaaaggttagtgttttatttacctgacaaatggaagttatagaagtctaataatgttaagcaccagtaattatagtattttgtacaaatgcctgtactgtagatgtctgtattattgaggggcaactcaggattttaagttccataaagtattgaaccaactctaaaatgttaactccttaataaacagattctcagtaaacaaattttaaagtttaaaaaaaa

SEQ ID NO: 53901 - DNA, 3137 bp, Homo sapiens
tttttttcaaatgatggttatacaatttaatgacctgaaattcaaacaaggagataacaggagtttttaatagctgaaatggtggttgacacatatatttatcatgtcaccagagcactgtttctcacttcccttgtgtctatgggctcacaattattaattcaatcaagctacgaacctactcattagaaaactggacacagaagcacaagtttacaatttcaggagagtcacaaataataccccaaaatcttaaggatcctaaattaaagcctgttactgtagtatcttgtatcatgaggaaatctaatattcttgggctctctttctatgtaagcatgagtgtggcaactaagtactagttttttctcttcatcaatacattgatgtcctcctatttagaaatgcattttttgagagcttgtcacaaagcctttattaacaggctgttaaggaaagttgcagtgtttcctttaaaaaggtgctttattgactttaaatttataaaaggttaacatgtcttgatctagttgaaattatgatttatatcaacatgataattatgtgtacagtttatattccactcatactgtacaccagtaaaagcaaatattcaaagggttctctaagtttcaagattaaaaaccataatgccttgactgaatatcatgattacaaaacaggtattaagaactgtgaaggtatatgctcacaacatatcccttctcccattctcactttattccaaaatctcatttatttcactgacaatttgtttatactttcaaaaatccttttataatttttatagatataactcaaaatgactgcttgggtctttaaaaaattaacagattaaaaagcaatacaagtgcacttaacactgatcaaagtctgaaatgccaaaaagcaaaataaaaatcctctgaaatatatatgtatttttaaatatagaaaaactccaccaatagtagaaacaaagtatgtttaatggttgctttggaaaggggaagtgggcacctcatgccagggagatttaaaaatgagacttttcaagcaagcactgcctatagcatagtctcatattttgaaaatttaaacctaattttaattatatataaagaactattttaaaaaatcacacccacaagtaaaaaactggtaatctgtttacaaagtgcagcgtcagtacagcaaactcatctcaacaaaagattatgtgtggtttctcgggctttaaaactcccctggtttccatttaaatgctttaacattgagtcatcctgcatacatgaaaagcctgtgtaatgaagcctgggtcctttaacacctgctattaattaattccaacataagtgagtatgagacctgggaagtaaattgtcatcatctgattgatgaggtacagattatctgaataaaatttctgacctggttatgagtcagtaatcccaacacaaactactgctttgtaatgaattctgtatgctttgcatgtccttcaataactgaagattttttctccttttttctccaggtctcagtttcataaaatctttcttatttgtggtccctgtgattccagaacggctgctgctgtttctttcttcatcaagagtctttttggtagcttttaattccttcttctgcttctctaacttctgtttctccagctgggcttggtattttcgaactttagttatttggttggcttttgcttccatccttcccactaatgcctccaattcacactccaacttgtctttcagttcaacggttggcgactcctggataagttttgcaagctgctggtgatcaaagctcatttgcccaaattcatcctgtaaagtctgtaagacttctgacaactcctcattaataccgttggaggagggaggtgttactgacaacttcttacttttaccacctcgtgaagatacttgctttgccaaaggaatactgttgatgactcgatcattgcacaaagctttactgtgttgcttcattagatgcaagacaagctgaacattggctaccacggcatggctagggcttgtggacttttctggtggttttgacttcttttttttaattcttcttgcattgggaacacacggagttgccttatcttcaaagataagtctatttgtttctagaccagtctgcaactcagctgccttagcttgcatgcgtttcctttcctgttcttcttcatggagttttgcttccaactcttgcatttttttttctgcaagggcctgcattgtggtaagtttgttatactcctgttcaagaagatccaatttttcaagttggctctgaacatgtgtttgatcatgttgtcgttctctttctagggaaacttgtttctctaagacagatgtcctctccatttcggcatgctttatcatatttcgcatgtattccaattgtttttctaatagattgcatttattttctgcagctaacaactgagatgtcagttcttgattgtgctttgattcctcattctttgaattctccctttcttgtatctgttcatccagtactttcttatattcaattgtttctctagacaaggttttcacactttcttctgcctgaatcctctcaagttccaagcgtcgaatcttatcttgaagattcttaagagcagaaaatatggctctgctgttgccttctggataggcaagtgtaggcttacttggggagcgtcgtagatcactattaaggaaaggcttatccgaaggatatactacatatggagatgaagaatgccgaaccatgcttccattagaccttgatggctcagcaaagctgttcgacaagtgagaaccagaagccgcagagacagacgccgccgccatctttcagcctgcccagggggtctccgcacttcgggggcggtctaggttctcgtgctcttctccaagactcgggagccgcccaccagcggggaccctaggctgaacccacagaaagggcaacacgtcctaacggacgtctttcctagccaatcaaaacagcagacgtctttctgtagtaggagagaatccgcctcttccctggtgacgtcacaaggtagcgcgtaacggggcccgctggggcagacaacgccggggttacaggccggctct

SEQ ID NO: 53902 - DNA, 371 bp, Homo sapiens
gtgaatactcccttgggaagcaattcaaggaaaatggtctatcaggagagcccgcagaatccttccagctcgccactggcggagatggcctcactccctgaagcaagtggcagtgaagcaccatctgtcccaggaggcccaaacaacatgccttcacatgtagtacttccccagaatcagttaatgatgacagggccaaaacctggaccatcgcccctttcagcaactcaagtgtacgctcgatagtaaccactctggtaccctccgagctcatctccgccgtaccgaccacaaaaagcaatcatggtggcatagcatctgagtcacttgcgggtggcctagtggaggagaaggtgggatcccatccagaa

SEQ ID NO: 53903 - DNA, 926 bp, Homo sapiens
tttttttttttgttttcaatttaatttattctatgcagtttaaagtgaaagttaaaacatcatacaaaccacagaagcttcatagtactgaccagttttaaaacaaaaacagtgaatgatcatttacacacattcctcatctttaattttacatcttgttatatatacaaaggtactattaaaacacgtaattctaattatttataaacctattgtcaaggcaggcaaggatgggcaatgcatcatagcagaccacagaatatttccttcaaggattcacaggcaggcaggtatttgggtgaatgggttatggcataggaaccaacttgggagggatcgtgtttaaacattccccataaaacaggtagcacatgtacaccaacaaatgaaaaatgtaactttaattgacataagataaaatgttactctttacactttaagttaaaaactataggacactttagaagcagacaatacaaggtgctttagttctagacttcacaacagaacactattccattagtcgcttgagagtccataacctctgaggactgctcaatggctttttaaagtcaacctcaaatataaaaagcactttaagtttaccagtcaaaatctagttatatcagttacatcttacgttacaacatactacttgagaaaactgacttttaaaaaagactgcattgttgactaatttcaaagattgctgctcttaaaagtaaaaatgcaccactttcaaatctttcaacatgttttaagatatcatattttgtgaatccattactttatatattccaaaccttcagcaaaataaaattaaaatgggttttaaacctaatatctctaaagaaatgggtctgcatgtctgtgaagtggctgtccaccgcacagcaatatgtttgtttcaactgtgaaaacatcac

SEQ ID NO: 53904 - DNA, 911 bp, Homo sapiens
cgctttaagaaaactcagctgtatttataaaaatatacaagtaaaaaattcaaatattcatatacatagttaagcagtttaaattttattgacctcccagtttttaaaaaaagttaaatttaaggtcacacctctaagtttgatgtactatatacagatcgtgcagaatatgagttaaacagatacaaattagtccatgcccaaaaagatatactagggtacagaatcatcttcataaatacatataaaattcttgtgtagaagcgaactgtccaggttttctgagacacttctaagtgaatcaaggcacaaaatgtacatacaccattgtgaatacacacattctagactttgtgcctctgacatagcccaaggatttagcttcatgactcttataaaactaaatgtactgaatgagattctgcttcttgggtgaaaaaccacaggaactataaacatcatgtagataattactccaaaatatggagaatacaaatacgagcactttattttaaaaagcaaacacaaaagactggtgtaaatccaagtgtttaaatgcctccgttttggataatttaattaagaaccgatacaagtttgttcccagaagctaatgcatcactagtctctactgaggaaaatgagttctaaaaattaacatggttttcagtaattcaaatttcactatttatataaaaacctagagagaccaataatatccagtagcttcaaaagataagctaaagattctttgatgtaatcaactttaccaatgtttgtatgggtgtgtttaatatatacacaaggaaaatacactcactctataatttcttataaaatagcaagtaaggagtagaagtaggagatgtagaaggggaaagagaattcagaaagtccttctcttcagtaac

SEQ ID NO: 53905 - DNA, 438 bp, Homo sapiens
  misc_feature (1)...(438): n = a,t,c or g
ggctcgaactaccaactgataatgtctcaagcagacaacaggtgaccaaattaaggaaagaaaccaggatcctggcagcccaggaagcagagccggtcatgacaacatgcagttgatgatgtgggggtgaaaggctgagtaagcggttgcaatctgcagtgagccaagctgaaaggcccgggcggatgtgaaggctggtggtaaggaaatgggaagcaggcagccaagctaaccctgtgtccactgaaggagtgaggtggccttgagcacagcagcatccctgggtcttacgtcggccagaagtagaaagggaagaagcctaaaggaagtgaaagtgttgctggatctcctgctggcattgcctcctccttcacacagcatcccggttctccctgcagccacctgatcttcctttgtcccttcctnacacagcccacc

SEQ ID NO: 53906 - DNA, 1487 bp, Homo sapiens
ggttatttttgatagtttaagagaattataaatcaagttgttctgtctactagagtcagaaattctgtgctagaatgggacttctaaaattaggtggtcctgtcactttctagagaaagacccaaattcataggtttaagtggcttgtctgacatacacatacagccagttagtaacagaattcagaatagaatagagttcttttttttctgtcagtccgttgttctacttctctttccttttcttcatggttgagcagcttttggcaaaatgtgttccatatagcagtagttccaagagatgttaatagatgtaagaaaaaaagtgtgtgtgtgttgggggtgggggattgcatggtcaattaaaatgaaggaatgctgagtttgtttccttactgtaggacttctaagagttttgaacatgctattacacattgtgaatttataaaaggggacaaacactgtttgaccttagactgcactccccttctttattcctcagagcatctcaaaggactacagggtcctttgagaaacatggcccttgatcaagtttacaactctttgagaagacatccctaatggaaatactgaatggcagatctattactgtggtaccatgtagtgtgtaataaatcttgaagtccagaaagcaagtatatttgctgtttagagctatacttaaggtatagagattcttttccacctgtggtgtgtaaaatcagtattgtgtttaattttgcaggtttttcaaggatcaactaatgtgcaaatacagtggtgatatattgatattacattttaataatgcttttgtatggcactttatagttttcagacaccttttgtaacagccctgtgagacagacaatattatccttattgtacagatgggggggctctggaggctctgaaaagtttttggtgatattcccctaagtttataccacaaaatgatggagccagaatttagttgcagaacttctgactccaagtccagagttctttactagacatctggtttcttactagctttttgctagctttttattttacagtgaaaagtatggaagcaaatcctgataattttggcttattatcaaatatcatttattttttattgcagagacccagcagatgtaactctcattgtagccatcccaaagaaaacccttctttgccctttgcagtgcccacttatttaggtaactgaagtgtatttccagtacaatttgattttgaactaagatttgatatagagttgtaattgcttacataactctttgaaaatgtatcatccctgggttctcaggtgaaggaggcaattcaaaagtaaaaaagaatattcgaatacaataaataccctctgttctcacacaaatgctgtttcttagctaacttgctttgacaacctactgatgtaacttctttattaatgtgaaatatttatattttgaaataaaattactagtgttgaatgaaaaaaaa

SEQ ID NO: 53907 - DNA, 751 bp, Homo sapiens
  misc_feature (1)...(751): n = a,t,c or g
ctgccagggggagggccccagagaaaaccagaaagagggtgaganactgaggaagataaagcgtcccagggcctcctacaccagcgcctgagcaggaagcgggaggggccatgactacgaggccctgggaggtcactttagggagggctgtcctaaaaccagaagcttggagcagaaagtgaaaccctggtgctccagacaaagatcttagtcgggactagccggccaaggatgaagcctcacttcagaaacacagtggagcgaatgtatcgagacacattctcctacaacttttataatagacccatcctttctcgtcggaataccgtctggctgtgctacgaagtgaaaacaaagggtccctcaaggccccctttggacgcaaagatctttcgaggccaggtgtattccgaacttaagtaccacccagagatgagattcttccactggttcagcaagtggaggaagctgcatcgtgaccaggagtatgaggtcacctggtacatatcctggagcccctgcacaaagtgtacaagggatatggccacgttcctggccgaggacccgaaggttaccctgaccatcttcgttgcccgcctctactacttctgggacccagattaccaggaggcgcttcgcagcctgtgtcagaaaagagacggtccgcgtgccaccatgaagatcatgaattatgacgaatttcagcactgttggagcaagttcgtgtacagccaaagagagctatttgagc

SEQ ID NO: 53908 - DNA, 1955 bp, Homo sapiens
tggcggcgcacaagtcaggtccggcacatgtttccgcggagccacagcaatgacggatgatatcacctcttcttctctggtgagagtctgaggatagagacttttttctcaccatgaatgtcaccccagaggtcaagagtcgtgggatgaagtttgctgaggagcagctgcctaaagcatggatggactcaaggcaaaggcctcggccggaaggagaatggtatcactcaggctctcagggtgacactgaagcaagacactcatggggtaggacatgaccctgccaaggagttcacaaaccactggtggaatgagctcttcaacaagactgcggccaacttggtagtggaaactgggcaggatggagtacagataaggagcctttctaaggagaccacccgttataatcatcccaagcccaacttgctgtatcagaagtttgtgaagatggctacattgacttcaggtggagagaagccaaacaaagacttggagagctgcagtgatgacgacaaccaggggtccaagtccccaaagattctgactgatgagatgctgctccaagcctgtgaggggcgaacagcacacaaggctgcccgtcttgggatcacaatgaaggccaagcttgctcgcctagaggcccaggagcaggccttcctggctcgtctcaaaggccaggaccctggggcccctcaactgcagtcagagagcaagccccccaaaaaaaagaaaaagaaaaggaggcagaaagaggaggaagaagctacagcatctgaaaggaatgatgcagatgagaagcacccagaacatgctgagcagaacatcagaaaaagcaagaagaagaaaaggcgacatcaagaaggaaaggtctcagatgaaagagagggtacaactaaagggaatgagaaggaggacgctgcaggaacaagtgggcttggggaattgaatagcagagagcaaaccaatcagtccctcaggaaagggaagaaaaagaagaggtggcaccatgaagaggagaagatgggggtcttggaggaaggaggaaaaggcaaggaggctgcaggcagtgtcaggacagaggaggtagagagcagggcatatgctgacccatgcagccgaagaaagaagaggcagcaacaggaggaggaggacttgaacctagaagatagaggtgaggaaactgttttaggtggtggaaccagggaagcagagagcagagcatgcagtgatggaagaagcaggaaaagcaagaagaaaagacagcagcatcaagaggaggaggacatcttggatgtaagggatgagaaggatggcggggctagggaagcagagagcagagcacacactggctcaagcagcagaggtaagaggaagaggcagcagcatcccaagaaggaaagagctggagtcagcactgtccagaaagccaaaaagaaacagaagaagagagactaaaggtctggtaaaggtagggctcaattgattgattttcaggagttgaagcctcaaagaccagggttgatgcaggtctgcaggtcttctgcacccccctcaatgaggagtccctcccagaaaggaaactgatctctgggatgtcagctgctgagaggagcaagcggtagtaccaccccttagttgagggagtcagcacagtcctttctgcagcttctaacccaggaccatgaactcaggtgcctagagaagccaggcagctaaaggacaaggaatgctgggggctgtgggaacaggaatgcagataccctttgaaggagcattcctgctaaaagaagctgaaaatgtagacctatgtgaagtgctctgatttctaaatattgtgaaggttaagaaaaacataaatttaggtctatgggctagatttagcccacagttgccagtttctagcgctaccaaatgaatgaataaacatgagcttgcgctcctagcctagagataaa

SEQ ID NO: 53909 - DNA, 1434 bp, Homo sapiens
  misc_feature (1)...(1434): n = a,t,c or g
tttttttttttttttttttccatcattgaaaatgtttattaatttttatgtaattcttctaatcctaaaagactgaaaacattgctctttatagtttgcgggaatttttaatgccctaaacagaaactccaacagcctcatggcttgctttaaagcagagcctgaatacagggggaacacaggtttgcctgagggttaagaagcatccaagagtaagggaagactgggtaagcaaagcaaaataaaggggcaaacaaaacaaaccacacagcacaagacaccctagcaaaggcttcccacagtgcccccacacgggtaggcacccaggccttttgttcttataaaatatgtttttattggtctttgcagtctcacgtcacaaaataacaaaatgaacacaaggcagatagagctggttggggagcacagacatgtggtggccttgaaagcagcttttccccttaagtctctagaacctgccatgagtaattaagacagtctttgaggatggggctgtcaggtgggggcgtttcagcaggtgccgacgagcgccttacaaacgactggctgaacacctttcctcccaggcctctctgccccagcatcactcaatctgctcagtcctcgactgctgcaggggaatgcgtgctcagagagagatgacacttctgaggtggcccccagctctgggtgcagaggagccggggtggggtattcaggccacacttccctgtggccacagggggaaaggaccaggggaaaaaatggggcagggatggccagctaacaaggggcctttggctttgtcctggaaaaaaacaacagagaaggaccaagtgagggcccccaactcccccatccccaccgcaatacacatgcatattcagagtacagagaaaggcacccagtacattctgtccttaaagacaatgtttcaacagtcccaaaagaacctaagttgttctagagtcctttatgtaaccaggtaatgcacatttaaaattaatttctttaatggattcttacttgatttacaaaagactcccccactccccaacaaagaccccaccatgctggtggctgctgatgtcccctaattacccgggcttctggtttcctggaggacaaaaagcaggcggcaagtattctcgggtaaaatcctcccaaagtcttcccccaccgtccccccagtgcgactnatcgggttactgtgatcaagagacacctttgtactggggagtgaatttgcgcatctcagcagggagggtctcgtagaactgatgttcccttgggaccaggggcttgcacagggttgtctcatttgaagcggacaccgcatgagtgccccccgacctggtggacaaagggctccagaaggacgcctttggcngggggctccacatccatgggccctgaaggctgggctcatcctcc

SEQ ID NO: 53910 - DNA, 572 bp, Homo sapiens
ttttttttttttttttacagcttacaaaacataattttatttaaatttgtatagataaaaatctaccaaaatttaaacaaaaattttatccaaatcctttcccacaacaaaattggacatcatggaaaaaaaaaacacattcaaataaggttcccatctttctaccataaactggtagattctgggaggatgaggagtaagagagaaacgaggagagaagatagtgatactaaacacaatttgatcttcagtgttgtctcatcttgaaatatcttaataacagagatttccataagaatcaggattcatttttgacacaaaaatggaagcttccactcccaaaatcacaaataaggcttctggttttctttttagtgtgaggtaaacagtatattcaatattaaggcaaatggtaaaaacacatggatggtatattaatgcagatattccattattaaatatattttggaatactcacggatttttcaaacatatgttagaattagaaacctgtaaaatctgcagtagtgtgtaatagctatttgcttgaatgtcttagcagtgccttttta

SEQ ID NO: 53911 - DNA, 1714 bp, Homo sapiens
  misc_feature (1)...(1714): n = a,t,c or g
ttttttttggaaaacaaaaggaaaacttatttattcttagaggtgggaatgtggggagtggggcagaacaggtggtggccctgggagagggtcccaaggggcagaggttggggatgtctcagtaaagaggggcaggtcatgaatagagcctccacccccagcagggggttccttgggcccgcccaagcactgggctaaaacgtggaaactgggcattgacaaagtacagcgggatgtgggcaattcggcctgtggaccagcccacactgagcagggcccctttgttgaaggaaggatggaaagtgatgagctggggctgggctcctggctccccctggataatgccacagggaaggagctcaaacacagggctgtttcgagtgcgaaaaaggaggatgactggtttaccatcctgtacccttggctttcctttcataagcacagccagacgttccccactggggtcccagaccatggagtgagcctctcccccaagcctctcctcaccatctggtgtctgtattgttgtctcagacagatctgccacaatcgttgctgactttgcacctccaacgcacccctttccctcaccacaacgttctggaaaagacagggagtaaatcagtggctctcccaatacagtgaacagcagtcggctgccatctgggctccagcagccagtctgacagcgccctgatagagtaggccacctctcacaagtccacatctgggcctcccagactcgaaagacagctgaaggagtggtagccaggattttgctgccgtctggggaccagagcaggttggtcaccccacctcctcgaaaccagggaagggggaaacaggtctctgttgagacatcccatacccggatagcagcatccacgggtgaagctgagagcagccgccccccactgggggcccaggccaagctggttaacanttgtatgcccagggtgaaaacagcacttgggcacagcccagaagagggtcgggtagacaaggaggtagggtcccagggtccagataagaatgccagctctggcaagcccacagcccaagacagaggcactaaggggcttcccaggcccagagacgcccacatttcgctgcagccggtgcttcagggaggggactatggtgctgctggcattatacacacggactgagtcatctagcagggccactgcaaacttgttggtgtgggggtgccatgcaaagacacgcaagcagcagctggaccaatttgtgacttgggcaaattcagcgatcagatcttcgctcctgagagacagatgggggaacagggacccatggagggaagaggcccatcgacagagtgccagggccccagccggatgccgtcttcacccactcaaacacctcttcttctgagtttgcaatttcatttagcaccccaaaaaggcccacatcacgccaaatgttgatgcatctcttccacacttgctcccggtgatggatgaaggcagttcttgtgccatggtccagccttccaggggtctttaggggatcctttgtcagttgtaggacaggaagattgatccactatagcacaaaagtgaggggtgtgacggtgagtcagtctcttcccaaatctttaattccgtgccatctccaacccaccgctgggctaagtataagagattccagaggtctgtttcccatttccacaaagctaacacttgtgagaatc

SEQ ID NO: 53912 - DNA, 1773 bp, Homo sapiens
tttttttttttttttccagcttacactcagattgtttatttaaaaatgcccaaaacacaaaaatagacttttaaggtaataatatatattactaaatatattatagtctacttataataattatatcgtcgttttcaatattacaaaaaaaggaagaaaaatacaagggaagcagacgacccaatatatataaatactataaaatcatattagaataaataaagtcgtcataaataaagggcccattgatttatgggtggggtttggcaacggctttggcctacttgcttttggagggtaatttgagcaccaggattccccctcaggagaggttccagttaccaggagacactggaacctcaggtctataaaaactggaggggcagtgaaggcctattattcacagcacataagattctaggagacagatttgggcagggaagaggtgggggagagggttcattgcctcccttaaatatgctacaattttttttcccccaagaacctcggaagacactccatcccccaccatcatgaatactgagcttgcacacttggggacctgccccagcgtgaggtcaggggagtgggttaatgcattctggaaaaggggattacttgattactgtcccccaagtccccacagccctggggtccatgcagagaccacagtgcaagagacgtggctccccgctgagatccagctgatctgaccgggcagtcactttgtcactcagaaacagagatgcgattgaagatggggagtcgccggggggctgccacgggctggggtggtgcaaaaactcccgcctcgaagacgggagagtcagagccccccaggctgctgccgctgctggcatattcatcagggtcggatcccagggactgtacagagggggtccgaaccaggccacccaagggcccccagacgctgataggagtggcccttcggcaggaggggcaacagactggggtggggtctcttcgagccaggggggtgccaggggcagcagagaaggcagagggtgacagtggaaggtccccaggtggtggtggggagctggagggcgagaaggagctggaggacagggaagggccggccaggcctggtggtggtggtgaggtccggcggccagagggcaggccggagaagctgatgctctggcgaagcacaggagggtggcccggggccgccaggtcttcgctagggttgtggatgaagtggcagcgagagccgtaggggcagcggccctggaggtagaacttgtgacagagttccgtcttgtatttggggtggcgattggcctggcgcagctcgcccaggccatgggcaaactggcacttggccccgtagcggcagcgccccactctctgagaaggtccgacatagctcagtcttgtagcgcgagggggtggtggaggttgcagtgggcgaagtgggtgagggtgacagctcagggccccaggcggggagccagcggtgcgaagcccagggggtgggggcaccccagccacagctgcggccctccactaggctggtggagcggccaggcaggcgggaggtgaccccagacgggctggagtcggaggggctcaggctccagggtcccgaggagccccagcctgggctggactcagtccctccatggtcggatggcacgggcacgtcagggctcagcgacaggaggctctcgtagatggcagtcagatccatggtgtaacggttggccatgaggggtgtcggccgagagtgggagcgctgaagtcaggctc

SEQ ID NO: 53913 - DNA, 641 bp, Homo sapiens
agaggatgagaggctcacccctctctgaagggctgttgttctgcttcctcaagaaattaaacatttgtttctgtgtgactgctgagcatcctgaaataccaagagcagatcatatattttgtttcaccattcttcttttgtaataaattttgaatgtgcttgaaagtgaaaagcaatcaattatacccaccaaccaccactgaaatcataagctattcacgactcaaaatattctaaaatatttttctgacagtatagtgtataaatgtggtcatgtggtatttgtaagttattgatttaagcatttttagaaataagatcaggcatatgtatatattttcacacttcaaagacctaaggaaaaataaattttccagtggagaatacatataatatggtgtagaaatcattgaaaatggatcctttttgacgatcacttatatcactctgtatatgactaagtaaacaaaagtgagaagtaattattgtaaatggatggataaaaatggaattactcatatacagggtggaattttatcctgttatcacaccaacagttgcttgtatagtttctgcatattagtctttagtagggcaagcagatctatttgttgttgcctgcaatttgtacacatcctacc

SEQ ID NO: 53914 - DNA, 454 bp, Homo sapiens
caaagctcagctttctgtttagttgtgtcaatcgcaggccactctgctgagcatcttctcccaggagtaccagaaacacattaaaagaacacatgccaaacatcatacttcggaagcaattgaaagttattaccagaggtacctgaatggagtggtgaaaaatggagctgccccagtgctcctggacctggccaatgaggtggactatgcgccctcattaatggctcggcttatactggagaggtttctacaggaacacgaggaaactccaccctccaagtctattataaatagtatgctacgggacccttctcagattccagatggagttctagcaaatcaggtctatcagtgcattgtgaacgactgctgttacggaccactagtggactgcatcaagcatgccattggtcatgagcatgaggtcctgctgagagacttgcttctagagaaa

SEQ ID NO: 53915 - DNA, 1614 bp, Homo sapiens
ttttttttttttttttttgagagaaataaaacaatttaatgatggcttccttgatttacacacaactctaagacaagaggacaaaattttctctccatgcactggtacaacgaagttcagggacaagaggcaacccaagtacaggggctgtggtgttcagatccacgctcagcctcgagtctcatgttccaaccgaccgtctggctcagtgactgtggacactggggagaggagggactgcccagacccctcaagtgcaggtgaggggaccggcagcagagtatgcatgggcactccatgccccagtgcgagaagtgcacaggggacagcgaacaccagcttccagtgcaccctgaagacccagtgggctcagggggcccagctctcccatcagagctgtcctcagggctggagctggggctggggctgaggcgctggggctgggagggaggtggtgataaagaaccactgcagaaaggaacacatgctgaatgctgggccatgctttcctcccagacactgagttcctgaagacccagctttatcttccaagggtaacaacattcccaagactcagagctggaaggcggcaagagtggagccaggagagacagatcgcatccactcctgaggccgcctcgaatgtctccattcccttctggcctgccttccccctcccttcaaccccaaagacccaagaagacaacggagatcagagaccacatccctcttccctaatcaaaatagccaagtacaacatttctaaagttagggagaaggaggaaaaatgccacaggcttttaaagggaagactggaaccgagggaagggagaagtagccccctgctttgtccagcctggaagctggcagccatggtgttggggccttgacccaaccacaccagcccatctagctgagcatcttgtgccgatcgaagactgtcttccgctgctcctgcacctgcagcttccaccgctgctgggcaccttccacacgctccaggactgtgtttgctcggggtcccccgagggatgcagcagctgctgccatagagcgagcatcctcattctcctcctcattgtgcagttgctcagtgtatgcatccggctttcggatcagagggtccaccagcatcaggaaggccatgtagagcaacagggcacccaccacggacaggtagatgacaatgatgaccttgatggtggtggtgctgcgctcctcgtacctgcactcgcacagcaggcagtaggcctccacgtcatggccaggcactggcatgggctccaccacgtgcaggcagttgcagtccttctgggatacattctggttgtaaatgtgcccactgatgtttctataaggtggacagatgcatttgcaccggatatcttcagaactctccctcaccttgttggcttcagctggggggcaccagcaaacacccgaccacagccaccaaagataagagcttcatgcttatcaggcttgctgggccagcaaagccggacacctacaagcccgctgcagccgcaaaagacccagctcgtgccgaattcttggcctcgagggccaaattccctatagtgagtcgtattaaattcgtaatcatgtcatagc

SEQ ID NO: 53916 - DNA, 387 bp, Homo sapiens
  misc_feature (1)...(387): n = a,t,c or g
gtttttttgtagagacagggttttgccatgttactcaggctggtcttgaactcctgggctcaagtgatctgccctcctcgacctcccaaaatgctgcgattacaggcatgggccaccatcctcagcctgaactgttgtataattaagaatctggttggtctttgtccctggttcagggagggagcctctaaacccttgacacttcctgacaggagcatctttattattcatgatgaaccccttggacagtttcaggatagggattagtgaaagaccaactatgtgagtaaagtttgggctttgaaccacatgatctcagccccacctccaaggaggggagggggctgcaattcaaattcaatcatgtgccnatggcttacttcatta

SEQ ID NO: 53917 - DNA, 619 bp, Homo sapiens
cccacgcgtccgcggccatcatgctggccccggaggccgttatcttagtcatggctctaaatatgtacctgcaatcggatgttgaggatcaccgagcccgcgacgtagaagtacgggaagttcatgcgcagctgccaggccagctcgaagaaggcgagcagggtgcgggagagccccttgcagaagacgccgtacgaggatttgcagatttacagaatggctgcacattaatggaaagagaagcataaacctatcttctttcattatggagggaggtttggcagatggagaacctgatcgaacttcgcttcttggtgatagcaaagatgtccttgggccatcaactgttgtagcaaacagtgacgaatctcagcttctgacaccaggaaagatgagtcagcgccaaggaaaagaagcttatccaacgccaaccaaagatttgcatcagccatctcttagtccagcaagtcctcatagccagggttttgaaagagggaaggaagatatttctcaaaataaagatgaatcttcactttctatgtcaaagagcaagtctgaatctaaactttataatgggctcagagaaggacagttcactttcaagccaactcacaaaaaa

SEQ ID NO: 53918 - DNA, 1746 bp, Homo sapiens
ttttttttttttcaagtttccactttataaggacataacccccattccatttacttcccccgccctccttcaacattcccacttgtattttccggctgtatttttaaaacatggtaaataacatttgcactccactttgtaaccataattaagtatgcccttaaacaataaaaaccataaacaacatttgtattttacgattatttaaatgttattcactgaacagccaagctttgtgctactatgggatttcgttttctgcggttccaagtcttgatccacgtcctgccacaggatcactgaagtagagcccattttcttacactctcgccattagttcaaaagcttgcagcattttatgtctggtacttggaggatgattttcctgtacagttttgcgtttttttcaccgaaaatttctgattattattgttttctcttgtgggatgaaatatgtaccttctatatcacagccttaataccttcagcttcttattcattgaaatcttgcttacaatccagtccgaggattcccggtttactgattttctttttcctgcaaattttagccttctgttttgttttgaaataatgcatcctctgcgctttgtcacattctgaaattcgtcaggtgttttaggatgcacactttcttagatgttttcgagggtcttaactgcagttctgtttccggaacagcgtattctctttctagggattgtaggctcccggccgccccctgaggagctccgctagcagctaagagggcagccacgaagagcgcctgagcactctcgcgagactgtggggctcgccattggctgctccgccgcgccgcaacggaccctgggagtcggccatcatgctggccccggaggccgttagcttagtcatggctctaaatatgtacctgcaatcggatgttgaggatcaccgagcccgcgacgtagaagtacgggaagttcatgcgcagtgccaggccagctcgaagaaggcgagcagggtgcgggagagccccttgcagaagacgccgtacgaggttctccagcatttggctcaaggccccaagggcacatgtgacaagaaggcgccatttttttaaacattggaagttcttctgtgttcagttctgttgacagaacattttactttaacacattcatggaaggctagtttggatgtggaggggaatagactccatctatccatatgagctgctgcagaagaatattttgcctgctggaacctgctgtatctactcaagagtggaagttttcacagatgtgaactatgaagactttactttcaccataccagatgtagaggactcaagtcagagaccagatcagggaccccagagacctcctcctgaaggactcctacctagaccccctggtgatagtggtaaccaagatgatggtcctcagcagagaccaccaaaaccaggaggccatcaccgccatcctcccccacctccttttcaaaatcagcaacgaccaccccgacgaggacaccgtcaactctctctaccccgatttccttctgtcagcctgcaggaagcatcatcattcttccggagggacagaccagcaagacatccccaggagcaaccactctggtaatctagaattcagtggcagaaaataaataagaagataacttccttcagaaagccatgacattgaaataatgtggtcataactctttcttcagtataccaataaaatattaatagcatgcaaaaaa

SEQ ID NO: 53919 - DNA, 895 bp, Homo sapiens
ttttttttttttagtcagaatcagactttatttaacaatctgaaaatgtgttcttccggctttaagtcttgcaaaatgggtcgtaagtcaaagacagatttgttcactatcctctgagtgtgtgtggttatgtctctgtataggcaagtgtctgtgtctatagatacttttgctttttatagtgattaaagctccactttagttaatgtataaagtcttattctaataatgctaaaaccagaattaaatattccctgagtctaatgttctcttctccccagcctgcctccctccatccctcccgtaaggctgctcctccgcctccattaatgccaggtctttagacagcaccagcattcctactgagaacccagggatggatgctggctcttatatccctctgacctataccctctggttgaagagcttctctggcgaggtttggggcaggaggagtcttggtagtttctcttcagagttgtggattttcacttgtggatacctcttcttgaggttcaggtgctgtgaggttgttgttttctggtaccatggagacttgaagctggtcttggccctccgaggagtcagctgagataagcttattatccttttccttgtcttccatcttctttgcctctccaggctctgaagcaacctgagatgtcattaaggtgggggaagtacaaagttcttcagggttctgattgtggatgttttcattttctttggcctcaggagttcttactggcttctctggtggttctggattaggagagacctctagggaggtcctaggacttgcagtcccagtccccaaggaggccctagggctggtgggtgaaccccctccagaggctgtagggctggaaggtatgttccctgaggagggcctggg

SEQ ID NO: 53920 - DNA, 1570 bp, Homo sapiens
aggagctggagacagattgtaggaccgagcgcgggcaggcgggaggcaacggagctaccagccgctcctctctgctatatgaaatatgggagacgacagaccgtttgtgtgcaatgccccgggctgtggacagagatttacaaacgaggaccacctggcagttcataaacacaagcatgagatgacattgaaatttggcccagcccgaactgactcagtcatcattgcagatcaaacgcctactccaactagattcctgaagaactgtgaggaggtgggactcttcaatgaactagctagctcctttgaacatgaattcaagaaagctgcagatgaggatgagaaaaaggcaagaagcaggactgttgccaaaaaactggtggctgctgctgggccccttgacatgtctctgccttccacaccagacatcaaaatcaaagaagaagagccagtggaggtagactcatccccacctgatagccctgcctctagtccctgttccccaccactgaaggagaaggaggttaccccaaagcctgttctgatctctacccccacacccaccattgtacgtcctggctccctgcctctccacttgggctatgatccacttcatccaacccttccctccccaacctctgtcatcacacaggctccaccatccaacaggcaaatggggtctcccactggctccctccctcttgtcatgcatcttgctaatggacagaccatgcctgtgttgccagggcctccagtacagatgccgtctgttatatcgctggccagacctgtgtccatggtgcccaacattcctggtatccctggcccaccagttaacagtagtggctccatttctccctctggccaccctataccatcagaagccaagatgagactgaaagccaccctaactcaccaagtctcctcaatcaatggtggttgtggaatggtggtgggtactgccagcaccatggtgacagcccgcccagagcagagccagattctcatccagcaccctgatgccccatcccctgcccagccacaggtctcaccagctcagcccacccctagtactggggggcgacggcggcgcacagtagatgaagatccagatgagcgacggcagcgctttctggagcgcaaccgggctgcagcctcccgctgccgccaaaagcgaaagctgtgggtgtcctccctagagaagaaggccgaagaactcacttctcagaacattcagctgagtaatgaagtcacattactacgcaatgaggtggcccagttgaaacagctactgttagctcataaagactgcccagtcactgcactacagaaaaagactcaaggctatttagaaagccccaaggaaagctcagagccaacgggttctccagcccctgtgattcagcacagctcagcaacagcccctagcaatggcctcagtgttcgctctgcagctgaagctgtggccacctcggtcctcactcagatggccagccaaaggacagaactgagcatgccgatacaatcgcatgtaatcatgaccccacagtcccagtctgcgggcagatga

SEQ ID NO: 53921 - DNA, 799 bp, Homo sapiens
aatgccttccaagcctaaaagtgcatcttcgattacaagcatctgtaaacaaaatcgtcccccaaacgtgtacttacaaggttaacaatgaatgcctttgcttaactccaattacactctttgaagccacttagccgagcagatgcttaagccccacctattaatttgggtaactggttttcaatttctttttttttattctgcagattaaagacactcaatctttaaccttgaagggcaggcaaaaggtcggctatgctgtcaacatagaagtcagggaccattttcttcttagacacgcagtcactttcctgattattcttcacatcccctagagtggagactccggtgagggtcaggatggtcttcaggccacaggtggcgcctaggaggatgtctgtgtccaggcggtctcccaccatgacggtgcgctcggggttgatgccgtattcctgggacacgcagtcgaaaatgaagcggctgggcttcccgatgatgtcggcctggcgctgggcggccatctccacggctcggaccagacacccggtacccgcgatgaagcggccgttctcaagcggaagccggttgtccatgttggtgcccacgagcaggcagccgggctgctgcaggtagcgcagggccttggtgagcttcatgtagctgaagtgcgggtcaaagcccaccaccaccgcgcgcactgtcgtggctccatgcggcgctgtgcatgccatgtcgccgggacgcctcgccctgcacgtggctcgggccccactgcccactgctggcgacgcctcacggc

SEQ ID NO: 53922 - DNA, 664 bp, Homo sapiens
ggaggtatctctgcattagccagattggacatatgtaaagggacatcagtatatctggatcatcagattgtgcttcaagaagaccatagggaagaacgcattttcatcttgctgcaaaagttgcaatagaagatctgaaggtttgaatgggccaatgagtatcctcatcattgaagcattctatggaggctcccataaacagctggtggatcttcttcaagaagagttaggagactgtgtcgtttatacccttcctgcaaagaaatggcattggagagcccggacatctgctttatatttctctcagaccattcccatcagtgagcattacaggcaatcagaaattacaaattaggaaacaggagagatgagaatggaatgttaaccttttggtatgaagcaggtcaacattgaaaatgcaagaagcctggatccagcttcctgaaaagaagctccttggtgactctttttcttccggcatcagttgattatttctagtatccaaccctttttactttctctaaatctctctgaggaacatcctggagtttcttttctggctttcgttgtaactagttcctggcctacctgaggggatgaatagcattatggtatagggtaggtgctgcagaccatatggagaccagcaggatacaagagtgtg

SEQ ID NO: 53923 - DNA, 1297 bp, Homo sapiens
taagcagtgctattttttgtaaacacagataaatggaaaccattcttttcaatgcagaagaaatctagatatcccctactgtgaccaaatttctgtattacgattttatgttaaattaaactaatatggcaggttataatgatccttaagtgtaaagaaatcagtcaattacaagagtaattgtatagttattgagacctatagtgtgtggcttagatgaaagggagagtaaattttcataccatgctctctcctactcagtttgatctctctaaaattgtagtttggtttgatttaatataattcttagtagaaattttgaaagtatgctttgggattaataattatttttaatttttctggctgaatatcaaattgatagtaacaacagaagcataattttaggaaggctttcgcaaacctagccttttaagagaggtttttaacctgaagcatgagaatatatcacctgtggtttttcctttgagatgaaacgtagtttctagttatatcattacttaaagggcttaaaaagaaaaaacttagcaaacttttgaatctttcttttattgctatttacacatacatacacacatacaaaacctttaaattttgggatctgaatataattctggtaaacagctgtcttcatttttctcctctaaaggaacttaattcatttgttacataaaatataaggaaatctttgtactattttacagtaaccacaatctaaatatttacatatacccaaaattaacttatgctcatatattaggatgtgagaatatcatctgtttatggacacatgaaacctcctaatgacctggaattgttagaatatttgactttttatatgcaaagtttttcaaccaagtggtttgtctaatatttaaacatgtactggcacaatttgtgatgaaaatattagcacatttgcaataatgtttctccataacagagaatgttaatggataccagaattttatttttgtatttatgttcatagtacttttcctcttgtctactccagacagttattccataaagcatttgtataattaaaaggaaaacagaaaaaggaaaagtaggcaaatgtgaaaatagtttcaatatatcttatgatttcttaatgtaaaatgttttgttgaagtatatggctatcatgactaagtgctagaatttatagttacaggcggtgtccttttaaatgtggaaaggcttttaaaatattttaaaactggacctgtattatcctgaatacactattttgaaaatttttaaaaaaaaaaaaaaa

SEQ ID NO: 53924 - DNA, 389 bp, Homo sapiens
  misc_feature (1)...(389): n = a,t,c or g
cactctctgcactggtgccttgttcctgttcatcttctgagggttcctgtttccatttttctctcttccttaatattaaatcgcgatggttcttgtctgcttcggtttgaccgcctgaccccataaacatcaggatattcttcccacatcttcttcacatcaggtcgacgcggccgcgaattccnnnnnnnnnnnnnnnnnnnnnnnnnnnnnnnnnnnnnnnnnnnnnnnnnnnnnnnnnnnnnnnnnnnnnnnnnnnnnnnnnnnnnnnnnnnnnnnnnnnnnnnnnnnnnnnnnnnnnnnnnnnnnnnnnnnnnnnnnnnnnnnnnnnnnnnnnnnnnnnnnnnnnnnnnnnnnnnnnnnnnnnnnnnnnnnnnnnnnnnnnnnnn

SEQ ID NO: 53925 - DNA, 483 bp, Homo sapiens
tttttttgccacgcaattctgaataaagtttattaaataatatgtacagcaaatgtagtaattcaacacatctatttatcaaatcaatccactgcaatgaagaaaaataaatgaacagaaaaatctatgtctgcataggacatgctctcagtgtgtaatttaaatggcaatactttaaattaattggttatatataatgtcagttatttttctttcagaatataaccttttttgtagtaacctattctagcaataggacttaatacgactgcagataaataggactgcaaaaaccaaaaacccaaaataatgaaattaaaaaggaaaaaaaaactgtaactgagatcagagttacctttcctccccaatagaatacttatcgtaaattttaacactttacaatggctatttttgtgctaaaaatctgtaggtgagttatttggaattccttcatttaaataaaaatgccaaaaaacttcatga

SEQ ID NO: 53926 - DNA, 1143 bp, Homo sapiens
ttttaacaaaaaataaagaatttaatgtacagtaaattctctcccatacaaaggtctagtctgatgttttgtgtacaaactcacatctcatctccaattaacagtatttattgagggtgactttgtattgcactaacatctattgctattacctgttgtgattgataagtaaagccactcattgaaaaacccaattccaaacaccacagtttgtgacacatgaagtaatgaatgactcttggtatgaaaacgtggcatttaagcgtctactgtgacagtatttcatttgtggacaaaagtagctttaaagcaagtatctggaaaatttttagcacacaggtttaaaatggtcctgcacgttgcaatacagcagcacgtgactcagagtcatgacaagggggtgtgatataacgaatgaaataaaatttccaaactgtttttagttaacaatttaacttgttccaattgctaaaggggcaattttaaaaggtaaataagtaaaaagccgtgtactttttaagattaaagaaagtacaaaggatgtcaattttttaagttatcatgttaagaaaacatgatggaatcagagcattgagaaaatgcttactaattattactaattaattattactaattattaagatggcttcatccccaaatggtctaagaggacattcatggataagcatttgcgtctagataaatatttttacaaaatgtgctctcaaagtccctactggagtcccgtcagcttgagtcacgcccttttcgagtcagactagccgagcagagctcccagggttgcagaaggcgttgcacaggtcacgaaggaatggctgttcaccccccgaggattcctgttcagtccgatcacttgatctccatcgaggggctgctctgtaaactcccctgtgcaggacaggtcaccaaggagtccggtctggtcagctttagccttcggccagttttaccgcaaaatacgctctcaaattcctttttaagagaatctccatgtctttcctggatgtatttcaggaatgctgtggtccactgcagagttgtggccttgtcagtctcggcattgcagaacggcactaagagattcaactcatcacagcaaatgcggattctgcgccttctgcc

SEQ ID NO: 53927 - DNA, 813 bp, Homo sapiens
ctgagaggaactcctcactcagctagcttcaggagccatgacatcatctctaccatggaaattccactcactctcctgtgcccccacatttgtcctaggcctcagagtccctataaagagagattcccaactcagtatcagcacaggacacagctgggttctgaagcttctgagttctgcagcctcacctctgagaaaacctcttttccaccaataccatgaagctctgcgtgactgtcctgtctctcctcatgctagtagctgccttctgctctccagcgctctcagcaccaatgggctcagaccctcccaccgcctgctgcttttcttacaccgcgaggaagcttcctcgcaactttgtggtagattactatgagaccagcagcctctgctcccagccagctgtggtattccaaaccaaaagaagcaagcaaagtctgtgctgatcccagtgaatcctgggtccaggagtacgtgtatgacctggaactgaactgagctgctcagagacaggaagtcttcagggaaggtcacctgagcccggatgcttctccatgagacacatctcctccatactcaggactcctctccgcagttcctgtcccttctcttaatttaatcttttttatgtgccgtgttattgtattaggtgtcatttccattatttatattagtttagccaaaggataagtgtcccctatggggatggtccactgtcactgtttctctgctgttgcaaatacatggataacacatttgattctgtgtgttttcataataaaactttaaaataaaatgcaaaaaaaaaaaaaa

SEQ ID NO: 53928 - DNA, 572 bp, Homo sapiens
cataaattgtgtaatttttgcctgacaatgctggccacattctgatctgtttcattaaatttgtggtgatgttactctaaacattttgactatttgaatgtactgagatgtcagaaaacaaaacaaggaaggaaaatattgttaattaaaatgtgctgctgccaaggaaactgcaacttgaagcaaggattttgtaaaatgcaaaatccagctactgtttccatttcacagtagttaactatattaaagagagaatgctttaaaattgatcttgttttgaaacccacttttatgtagctcatcatggtttatcttactaaggaatatgtttgttcattcagttctcaacttttgtatgtgctaaccttaaagtgaagttctgagcccgtgtgccattacagtgcttttaataaaatttatttgggattattgtttccttaacattaaaataatagcgacatttagactatgcaattttagcatagaaaggagtctttgagtatgtacagttttgaaaattctctttgagataattgatttcatattctgtggctttcaacctccatttacct

SEQ ID NO: 53929 - DNA, 706 bp, Homo sapiens
gagcaaacagctgacccggcgagaaatggaaatagaaaagtctttatttcagggagctgatcgtcactccttccttaaggctctttattaccaagatgaaccccaaaagaagaacaaaggtgatcccatgaacaacctggaaagtttttaccaagagatgataatgaaaaaacgtcttgaagagtttcaacttatgagaggtattatacctgaagaaccttagccctcgggtgactgaaagagatcttgtgtcattgttcgctcggttccaggagaaaaaaggacctccaattcaattccgaatgatgactggacgaatgaggggccaggcttttatcacctttcccaataaggagatagcatggcaagcattgcatctagtaaatggatacaaactacatgggaaaatattggtgatagagtttggaaagaacaaaaagcaacggtcaaatctccaagcgacttctctcatatcatgtgctacaggtagcactacagaaattagtggtagctagaatatatataaattgtgggtcctggatggtctttcttgaattggaatcttggatctaggatttatgtatagacaccagtttgtttggagttgaagaggaaaaactaactgagggaggggaaaaaagtaatttcagcttttggagagaactggtagaaaacattttctattatataattgaagactatatag

SEQ ID NO: 53930 - DNA, 716 bp, Homo sapiens
ggaagatcacgagtctggttcttgacatgagatgcccttcagacatctcttcactcaggtccaactagggatacagaaacactgaatatttcaacagcagaaattgaatggggggattgatagcgctggcgagggaagcagctggaaagagacagatggcaccctgagacagcccagaggtgaataggacccccaggctgcagggataaagctcagtggtggtgttacctcaccggggaccagggtcacacagcaaagctggaacaacagaggcgtgttgtgggggagcctcagaggggacaaaacctctgcctgagatcccaccccaggtgggcatgggggccactgaggttggggatgaaaatgccggtaccgtcagtgcacagccctgttccagacagtgctgcctggaagatttctgggctctcctgaggcgccaccccgcacctgagccacctccttggactcctgtcctctaccccttgaggacctccctcccttctaccctagctgtcttcttgaacttgggactctcctttcccaagacttccatcactagctcctggagggactggactttgcatcttcccttcgcgtggagcctcagtgtgagaggccctagccaatgcgtgcatgtcagaggtggtggggaccacatcagaagaagaggggggtgatgaaattaacaaataaaaagtatggggaaaaaaaaaaaa

SEQ ID NO: 53931 - DNA, 600 bp, Homo sapiens
gggcggggccggtgaaggaccgcgaggccttccagaggctcaacttcctgtaccaggtgagtctgcgacaagggccccacggggacggtgctcggcgtcccagagtgactgctcccctcccgcaggccgcccattgtgtccttgcccaggaccccgagaaccaggcgctggcgaggttttactgctacactgagaggaccattgcgaagcggctcgtcttgcggcgggatccctcggtgaagaggactctctgtcgaggctgctcttccctcctcgtcccgggcctcacctgcacccagcgccagagacgctgcaggggacagcgctggaccgtacagacctgcctaacatgccagcgcagccaacgcttcctcaatgatcccgggcatttactctggggagacaggcctgaggcccagctcgggagccaagcaggtgagagattccaaaccactacaacccttgccaaacacagcccactccatttcagaccgccttcctgaggagaaaatgcagactcagggttccagtaaccagtgatggattcaccccatctcccaaataaagtttacttgttttacattccaaaaaaaaaaaaaa

SEQ ID NO: 53932 - DNA, 764 bp, Homo sapiens
gggacgctccgaccgcggccgggaggctcctgggggccggggctccgagaagaagaagaaaacatgtcaggacacaaatgttatccctgggacttacaggatcgatatgctcaagataagtcagttgtaaataagatgcaacagaaatattgggagacgaagcaggcctttattaaagccacagggaagaaggaagatgaacatgttgttgcctctgacgcggacctggatgccaagctagagctgtttcattcaattcagagaacctgtctggacttatcgaaagcaattgtactctatcaaaagaggatatgtttcttgtctcaagaagaaaacgaactgggaaaatttcttcgatcccaaggtttccaagataaaaccagagcaggaaagatgatgcaagcgacaggaaaggccctctgcttttcttcccagcaaaggttggccttacgaaatcctttgtgtcgatttcaccaagaagtggagacttttcggcatcgggccatctcagatacttggctgacggtgaaccgcatggaacagtgcaggacggaatatagaggagcactattatggatgaaggacgtgtctcaggagcttgatccagacctctacaagcaaatggagaagttcaggaaggtacaaacacaagtgcgccttgcaaaaaaaaactttgacaaattgaagatggatgtgtgtcaaaaagtggatcttcttggagcgagcagatgcaatctcttgtctcacatgctacaacataccag

SEQ ID NO: 53933 - DNA, 3644 bp, Homo sapiens
  misc_feature (1)...(3644): n = a,t,c or g
agagttagactgggcttctcggtggggagaggctctgggataactactgttacagctttgaagggtcaagggtgtgcgctttttgtttcatccttccctttcctgctgcagggcgaggccggtctgtagcggatcacttcctttcgcccacacattggcggaggagaaaccggaaagttaatcactgccctgctctgagaactcgggcctttaggggcacgttcgcctgctgaccggtcttctgatctccccattcttttccatgcaggaggattggccaccaaagcctgtttattagcagctgccatttgttgaaagaaatttggattattttagaaacaatttggaaagaaaaagaatggcgtccgtttcagctctaactgaggaactggattctataaccagtgagctacatgcagtagaaattcaaattcaagaacttacggaaaggcaacaagagcttattcagaaaaaaaaagtcctgacaaagaaaataaagcagtgtttagaggattctgatgccggggcaagcaatgaatatgattcttcacctgccgcttggaataaagaagattttccatggtctggtaaagttaaagatattctgcaaaatgtctttaaactggaaaagttcagaccacttcagcttgaaactattaacgtaacaatggctggaaaggaggtatttcttgttatgcctacaggaggtggaaagagcttatgttaccagttaccagcattatgttcagatggttttacactcgtcatttgcccattgatctctcttatggaagaccaattaatggttttaaaacaattaggaatttcagcaaccatgttaaatgcttctagttctaaggagcatgttaaatgggttcatgctgaaatggtaaataaaaactccgagttaaagctgatttatgtgactccagagaaaattgcaaaaagcaaaatgtttatgtcaagactagagaaagcctatgaagcaaggagatttactcgaattgctgtggatgaagttcactgctgtagtcagtggggacatgatttcagacctgattataaggcacttggtatcttaaagcggcagttccctaacgcatcactaattgggctgactgcaactgcaacaaatcacgttttgacggatgctcagaaaattttgtgcattgaaaagtgttttacttttacagcttcttttaataggccaaatctatattatgaggttcggcagaagccctcaaacactgaagattttattgaggatattgtaaagctcattaatgggagatacaaagggcaatcaggaatcatatattgtttttctcagaaagactctgaacaagttacggttagtttgcagaatctgggaattcatgcaggtgcttaccatgccaatttggagccagaagataagaccacagttcatagaaaatggtcagccaatgaaattcaggtagtagtggcaactgttgcatttggtatgggaattgataagccagatgtgaggtttgttatccatcattcaatgagtaaatccatggaaaattattaccaagagagtggacgtgcaggtcgagatgacatgaaagcagactgtattttgtactacggctttggagatatattcagaataagttcaatggtggtgatggaaaatgtgggacagcagaagctttatgagatggtatcatactgtcaaaacataagcaaatgtcgtcgtgtgttgatggctcaacattttgatgaagtatggaactcagaagcatgtaacaaaatgtgcgataactgctgtaaagacagtgcatttgaaagaaagaacataacagagtactgcagagatctaatcaagatcctgaagcaggcagaggaactgaatgaaaaactcactccattgaaactgattgattcttggatgggaaagggtgcagcaaaactgagagtagcaggtgttgtggctcccacacttcctcgtgaagatctggagaagattattgcacactttctaatacagcagtatcttaaagaagactacagttttacagcttatgctaccatttcgtatttgaaaataggacctaaagctaatcttctgaacaatgaggcacatgctattactatgcaagtgacaaagtccacgcagaactctttcagggctgaatcgtctcaaacttgtcattctgaacaaggtgataaaaagatggaggaaaaaaattcaggcaacttccagaagaaggctgcaaacatgcttcagcaatctggttctaagaatacaggagctaagaaaagaaaaatcgatgatgcctgatatgaatgttactaaattttctaattaaagatggtttatgcatgtatatgccattatttttgtagttagacaatagtttttaaaagaatttcatagatattttatatgtatggatctatattttcagagcttatctctgaagatctaaacttttgagaatgtttgaaaattagagatcatgaattatataattttccagtataaaacaagggaaaaatttttatgtaaaaccctttaaatgtaaaatatttgagaataagttcatacaatcgtcttaagttttttatgcctttatatacttagctatattttttcttttgacataactatctttttgaaagcaatattatactgacagaggctcactgagtgatactttaagttaaatatgtagatcaaggatgtccaatcttttggcttcccctgagccacattgnnnnnnnnnnnnnnnnnnnnnnnnnnnnnnnnnnnnnnnnnnnnnnnnnnnnnnnnnnnnnnnnnnnnnnnnttgcaagaaaaatctcatgttttaagaaagtttacaaaaaatgtaaaatatttgagaataagttcatgtaattgtcttaagttttttatgcctttatatacttagctatattttttcttttgacataaccatctttttgaaagcaatattatactgacagaggttcactgagtgatactttaagttaaatatgtagatcagggatgtnnnnnnnnnnnnnnnnnnnnnnnnnnnnnnnnnnnnnnnnnnnnnnnnnnnnnnnnnnnnnnnnnnnnnnnnnnnnnnnnnnnnnnnnnnnnnnnnnnnnnnnattgcaagaaaaatctcatgttttaagaaagtttacgatttgtgttgggctgcattcaaagctgttctgggctgcattagacccgtgggctagagttggacaagcttgtagatgatttcaggttataaaaccagaagtacaattcaacaaaaaaggagtaagtcatcaatataaatattagcaaacgagatattgctacatctctatttaaagtaaaatacaaccgattttaaagttcctgaaaccatagccatattttgacatttcacaaagaatggttctagtctactagagtacatttggctaagtagataacttacctaaatttgctccaaagctaaatcacaagtaaacatatttatgtttaaaacacagaaataaataacttaagatttttatctaagcggtcagtgttgtattggaaagatatatctataaataaactttgaactgatttcaaacttagaatttatgtttttatatttttccactaatatcattatcacttctgtaatttt

SEQ ID NO: 53934 - DNA, 417 bp, Homo sapiens
agaacacggtagacaccaacagttaaaaaaacaggacccagtttactactgaagctgcagcgaggttacagaggcgtcttggggctcagtccctgagctccgggacgcccaactgggagtggggcctccactctcctacgtacagacacccccatagggaaacgctcacatgctgtcctgctgggacgctgcaggcctggccgttctgtggccgcatccgcgtccgggtccctgtgtcctggctgggcgagccggggagggggctgattcctgggagcggttcagcagcgagttctgaatgtcttccaggacttcacggaagagctcctctcgggacttcatgccgtccaggtagaccacttccacaccgttggcctccatctcctgcctatacttctggtacatgggccacacgtg

SEQ ID NO: 53935 - DNA, 733 bp, Homo sapiens
agagaaacacggcaagaagccagtcaaagagaaccagagtgagggcaagggcagtgacagtgacagtgaaggggataatccggagaaaaagaaactgcaagaacagctgatgggtgccgtcgtgatggagaagcccaacatacggtggaacgacgtggccgggctggagggggccaaggaggccctcaaagaagctgtcattttgccaatcaaattcccacacttgttcacaggcaagcgcaccccctggcgggggattctgctgttcggaccccctggcacagggaaatcctacctggccaaagccgtggcaacagaggccaacaactccaccttcttctctgtgtcctcctcagatctgatgtccaagtggctgggggagagtgaaaagctggtcaagaacctgtttgagctggccaggcagcacaagccctccatcatcttcatcgatgaggtggattccctctgcgggtcccgaaatgaaaatgagagtgaggccgcccggaggatcaaaacggagttcttggtccagatgcagggggtggggaataacaatgatgggactctggttcttggagccacaaacatcccatgggtgttggattcggccatcaggaggaggtttgaaaaacgaatttatatccccttgccggaggaagctgcccgcgcccagatgttccggttgcatctcgggagcactccccacaacctcacggatgcaaacatccacgac

SEQ ID NO: 53936 - DNA, 354 bp, Homo sapiens
  misc_feature (1)...(354): n = a,t,c or g
ggactgataaatacttttaaattcactagaataagtatatttagcatttccaaaaaaaaaaaaattcagtaaancagcccgtccttngggttttnggggtttttttgaaatttaaattatcccaaananacntgatnttntanggatttaaaancaaanctaggtancaaaaancatcncangctantttnttaaaatctataancnncctaatggtnccntttnttnngatangagttcactngncaactngccagggtctccangtcttnatccnggactntgacttttcgttcnccctgaggctccaaacacaanactcntttacctaaagaancagtatttttcagggac

SEQ ID NO: 53937 - DNA, 2461 bp, Homo sapiens
acatgaaactcctgtggaagtagaactcatgactcaggttgaccaagaggatatcactcttcagagtggcagagatgaactaaatgaggagctcattcaggaagaaagctctgaagacgaaggagaatatgaagaggttagaaaagatcaggattctgttggtgaaatgaaggatgaaggggaagagacattaaattatcctgatactaccattgacttgtctcaccttcaaccccaaaggtccatccagaaattggcttcaaaagaggaatcttctaattctagtgacagtaaatcacagagccggagacatttgtcagccaaggaaagaagggaaatgaaaaagaaaaaacttccaagtgactcaggagatttagaagcgttagagggaaaggataaagaaaaagaaagtactgtacacattgaaactcatcagaacacaagcaaaaatgttgcggctgtgcagccaatgaaacgaggacaaaagagtaaaatgaaaaaaatgaaagaaaaatacaaagaccaggatgaagaagaccgtgaacttatcatgaagttgctggggtctgcaggttcaaacaaagaagaaaaagggaagaaggggaagaaaggaaaaacaaaggacgaacctgtgaagaaacagccccagaaacctagaggtggacagagggtctctgacaacattaagaaagaaactccgttccttgaggttataactcatgagttacaagactttgctgtagatgatccacatgatgacaaggaagagcaagatctggatcaacagggaaatgaggaaaacctatttgattctttgacaggccagccacatcctgaagatgtactactgtttgccattccaatatgtgccccttacaccaccatgacaaactacaaatataaagtgaaacttactcctggagtgcagaaaaagggaaaagctgcaaaaacagccttgaatagtttcatgcattccaaagaagcaacagcaagagaaaaagacttattccgcagcgtaaaggacacagatttatcaagaaacattcctggcaaagtgaaagtgtctgcacccaatcttctgaacgtaaaaaggaaatagctgaaatgaaattctaaaatatttgagaagagccaattttatagccttttggaagttcaaagatgaaagcaccatgtatcaggatttccgcattataaaaatgaactaaacattgccttgctatattcaccaaaaggacttacttcttgttttttcccagttttatatagaggaaacactgtctatgataggatttccaaaagtatttgtggacagttaaatgctaattaatatacatctgtagttattctacattttcttgaaatttgggaggttaataccaagtattcatttcatgatgtaaagaaactgaacagtgaagtggcttgattgcttaaactattgacttggtaagtctactgtatataacatctaatatatatattacaggccaaatgaactaaacattgccttgctatattcaccaaaaggacttaattcttgtttttttcccagttttatatagaggaaacactatgataggatttcctaaagtatttgtggacagttaaatgctaattatatacatctgtagttattctacattttcttgaaatttgagaggttaataccaagtattcatttcatgatgtaaagaaactgaacagtgaagtggcttgattgcttaaactattgacttggtaagtctactgtatataacatctaatatatatatattataggccagctacaaggggtttaaatatttaggattgtgtcttgaaaactaagtattgggagtgggattttcttctgctttcattgatacttgtcagaaaaaaatattagaccaaaatgtaaaatataagtaataattctcatgactcagcttaatcatttctattcatttgtagaccttcaggtttgatcttaattttttccttgtaatctgattcagttctgtaccattttaatttccacctttagtaattaattaccaatatagcacgttagagtatcttaacctataataccagaagcgcattttaggcttaccactaaagactctaacccacttttcctctgtctcttaacagaatggaaaatgatgtcatcattatttccattccttcatgagctataaaacctattaattaaaaaaaaactttttaattgactggacagcacctgcctgtattcagcatgaccacttgctccagcccctacactgaagcattaaggtcaaagtactgaacagttgttggtccctccacactttgtttttccagcttcgtcataatgtgaatattaatgtttaaaaaaaaaacctttattatattgtatttacaacactaggttacataactatagactactcttgccattaaaaaaaaaatctataatgttttcaaaaaaaaaaaa

SEQ ID NO: 53938 - DNA, 194 bp, Homo sapiens
aagtgtatgtatctcaaagccattgccttctctagaaatctgtttctctgttctggaagagcctataaactttgccttcagttgtttttcttttcaaaagggaacaccagtggtagatgattaactcttatttatttttaaaatttaatttggatctatagtcagtatctgagatttataggatgaactttggt

SEQ ID NO: 53939 - DNA, 419 bp, Homo sapiens
cggacgcgtgggggagagaagtgggagataatacttttcagttcttcccacctccatccccatccatcctggtgtgggtaccacagaaacctgaggtccagggggaagctttccacagtgggaccacctcagtgtcttcggtccccagggcacctactttttctcctgacttccagaagatgttcccagaggggctggtctacgctgcaagagtgggcccgccacatctaggcctccaccccgcccccagctcttaatttattattaactctggaactgactttgaaattatggaaggccatgttgtttctttcctctgcatctcttatggccccaaggggaggcgagctgagagtgccagatacacaaatatgcagcgaaaaccctgtggatttttggttctagcaaggggaaggaaa

SEQ ID NO: 53940 - DNA, 414 bp, Homo sapiens
ggcgcttttgtctccggtgagttttgtggcgggaagctttttgcgctggtgcttagtaaccgactttcctccggactcctgcacgacctgctcctacagccggcgatccactcccggctgttcccccggagagtgatggagtccctagagggcttactagagagcccatcgcctgggacctcctggaccaccagaagccaactagccaacacagagcccaccaagggccttccagaccatccatccagaagcatgtgataagacctccttccatactggccatattttggaacactgacctagacatgtccagatgggagtccattcctagcagacaagctgagcaccgttgtaaccagagaactattactaggccttgaagaacctgtctaactggatgctcattggctgggc

SEQ ID NO: 53941 - DNA, 1160 bp, Homo sapiens
tttttttttttttttttttgctgacacccggcactttattagtggggaaactcgccttggtctggcagagactgggatcaacaggaccagcacccatctcgaggtggtattttctgtaagatcaggtgttcctccctcgtaggtttagaggaaacaccctcatagatgaaaacccccccgagacagcagcactgcaactgccaagcagccggggtaggaggggcgccctaggcacagctgggcccttgagacagcagggcttcgatgtcaggctcgatgtcaatggtctggaagcggcggctgtacctgcgtaggggcacaccgtcagggcccaccaggaacttctcaaagttccaggcaacatcgttgcgacacaccggagaccaggtgatgagctttggggtcggtcattaagcgcggtggcgtcgtcgctgggagctggcagggcctcccgcaggaaggcgaagagagggtgcgcccccgcaccgttcacctcgcacttctcgaagagcatgaagttgggctcgaacccaccaccaggccggacgtacttgagggaattcagaatctcttcgttcttggcgttctcctgatgcccaaactggttgcacgggaagccgagcaccaccaggccccggggtccgaggcgccgctgcagctcgttcatctgggtgtagtcccggaccgtggtgcctcagagggacgccacattctcgataagtagtacctctgccccgcagggagcccaggctcacaggctccccgccggccaacgggcgcgccgagaaggcatacaccgactgggccgccgccgccgccgccgctagccgagcagcacacatggcgcaattgtccaagaagccagcggagcgccccgaacaagcactgtaaggggaggccagcaggcgcctccttttaactggccggcggcgggtcacgtggcacaggcagttttccgggcctgaggtcccgcctcatccggcccccgccctaccggaggctcggcccctcctcagccaggaaaaggctggagagtgcgcccgagcgggacgcgtgctcctcctaagccggaaggagcagcaggcatgtctggtctggcccaggcaaccaggcggcagcggtccagttacccttccaaggctgggcccctcgaggggtcg

SEQ ID NO: 53942 - DNA, 900 bp, Homo sapiens
ctttttttctaattttatatgaaatgtgaaaggtctttattttggtttggtttactttgggctgctaaccaccagtgttaggaattaatgtggggcaccctcttattgggaatgtcactgtaattgcctacattttctttgctgtaatattacctgcttataggttgtcaacccattttatctgaatttgaaaatctatctaggtttccagattaaatttctacctttcatatagagagtttaattttaataaaatgtttaattagagcatccttcccttttattctactttgaacaaatagtaattttaccccaactacttttcatgaagagtgctttgaaaattaaaggaatttttattattatggtaaccttatgagtaaaaataagttactttaattgctttatttcgttagttgtcattttattttgtactatgctggtaaactaattgtggtttagaatagttttatgttcactcctgataactgagaaacagaactaaagttttccttacattgctaaatggataaacctcatattcaataaactagtaaatgtagccacttgactgattgcgtaaatcgtgttaaaacattctaaaatgttgtaaataatttaatgtgaatactgttaaacagaaaataattgcttataaaagtctaacttcacccagttaccaagtcttgggccaaattttatcttctgcctatagtttttactagcctttttaaactataatagtgagtgatcattactttatattctcgtaagttagaaatacttgaatgccaaattaattttgttttaagaaagcttatttttaacataattttttagtgtggagggtttgtaaataatgtaaagtttgtaaacctgtatttaaaataccaaagtttt

SEQ ID NO: 53943 - DNA, 1277 bp, Homo sapiens
acaagaatcgcttgaaccaggagacggaggtttcagtgaatgaagatcgtgccattgtattccagcctcggcaacacagcaggactgtgattttctttggagactcctagattttctgtggttttgaactgaatttgttggatgttggcaagtgcctcttatgagctgtttctttatcctgcatttgccccacaaagacttatctggaggtgagcaaagtatgtttggtagtgaggtcacaaaggcaatcagccccttcctccccactcccattgccatcttctcagtccttctccctttctttccaagtagtttacccacccctcctctttcctcccctgtccctaaaataatccacgtgtcttcctaaaatctctctttgatcctgtcctttgataacaccgtcagtgcctactactgggtctagacagacctctgttgagcagtcagagtcttccctgactccacaatgcccctttccttggctgaccagtatgactactggtccccacctttcccttgcctatccctacctccctcctactaggttgtcccatccctctcttcacccattcattcatgaccatttttcactaccaagctccccccctcccgaaggaggctgaggtttttgtgactctctagactctattgtgggatggaatgaacattgctaaagaatcttgtgttcgctttactttaaaaaggtatttttttcctaattataaaactgatgtgtcagttacggaaaaattagaaatgcagcacaaatacatgaatattttaccacaaaattgccatataatatcttgtcttttttgggggtgtgaattttttgcattgttctgatcatattctttatcatgtaatttatgttcttttttactaagtattatgtgtggttattatagattttcacaaagatatattgctggtaatatattttattgtgtagtcttataatttacttaaccttctttcaattgttagaaatttaggctatttccagattttcagtattgtaaataatgctgtgatgaccaattttgtgaataaaatgtttttatgtatttcagattattcccttaggatagtctctcagtgccaagttgtcaaaaacatctctattttgcttatcttcctgctctcttgctgccttagggggtagtaaactgaaacataaagtaaacatgcatacaaataaaaaacataaaacaaaaataagcaacctgatggtaataggtgaaagtggtaacctgttttaactttgaattctt

SEQ ID NO: 53944 - DNA, 484 bp, Homo sapiens
tacttgatccgcatacccacaatggccctcgatgattttgcaaatggtgctgcacagtccggggtattaactctcaatgagaccaacgacatcttcctctggtatactgcagccaaaaagcctgagcttcagtttgtgagtaaagcccgtaagggccttgtcccccagcgctgtcaccgtttccagtcgtgtgcctatcgaagcaaccaatggcgctatcgtggtcgctgtgacagcatccagtttgcagttgataaaagagtgttcattgctgggctttgggctgtatggctccagctgtggttctgcagaatacagtgccaagattgaacttaagcgggcagggcgttgtcctggggcagaacttgagcaagtacttctcagatgggtccagcaatacctttcccgtatggtttgaatacccagtgcagatcgagccagacaccttctacacagccagtgtgatactggatggcaatgaact

SEQ ID NO: 53945 - DNA, 1369 bp, Homo sapiens
ccgcttagacaatgccccggagccgccagaccgttcgcgcccctgccccatcgtagtatatgagctcgcctacacaaggacccccgctaaaagccagagctcccagtccccgaggcttgaagacggggactcccttctccaccaactctgtcctcggggggtggggccccagccgagatcacagcgcgacaggagtgggggtggccgctggagacaggtgaagaaacaagaaaactaagaaatccgagcggttggagggggagtctgtgtggatgggatggggacgccgggggaggggctgggccgcttgctcccatgccctgattccggggagtcccagagagcctgggcttcgggggaaggtgcgggggcttggctttcccactcttgatcttggccaaagttcaaagggagcacggggtcttggggaggtaaactgaggcaacgactggggctacagctgcttagaacttgccacctgaggagttcatttgccgctgggaccgctgcttggcgacacggccgtgattccaaggggacacggccctaatcacgcggccctgggagccccgctcgtaggccagaggtcgatggagtccgcaaagccctgcaagacctggggctccgaattgtggaaataggagacgagaacgcgacgctggatggcactgacgttctcttcaccggccgggagtttttcgtaggcctctccaaatggaccaatcaccgaggagctgagatcgtggcggacacgttccgggacttcgccgtctccactgtgccagtctcgggtccctcccacctgcgcggtctctgcggcatggggggacctcgcactgttgtggcaggcagcagcgacgctgcccaaaaggctgtccgggcaatggcagtgctgacagatcacccatatgcctccctgaccctcccagatgacgcagctgctgactgtctctttcttcgtcctgggttgcctggtgtgccccctttcctcctgcaccgtggaggtggggatctgcccaacagccaggaggcactgcagaagctctctgatgtcaccctggtacctgtgtcctgctcagaactggagaaggctggcgccgggctcagctccctctgcttggtgctcagcacacgcccccacagctgagggcctggccttggggtactgctggccaggggtaggatagtataggaagtagaaggggaaggagggttagatagagaatgctgaataggcagtagttgggagagagcctcaatattgggggaggggagagtgtagggaaaaggatccactgggtgaatcctccctctcagaaccaataaaatagaattgaccttttaaaaaaaaaaaaaaaaaaaaagtttt

SEQ ID NO: 53946 - DNA, 176 bp, Homo sapiens
gggtttttgagatgtaagcttaggtgattgacctgagagcttttcaaagataagcacttgaaattataaatttccccttgagtactaatttggttacatcctacagattgtatgttttattttttttttcaatcagttcaaaatatttctaaatttccctttataatacctctatg

SEQ ID NO: 53947 - DNA, 406 bp, Homo sapiens
ccgagatgaagccggcggtggacgagatgttccccgagggcgccgggccctacgtggacctggacgaggcgggaggcagcaccgggctcttgatggacttggcagccaatgaaaaggccgttcatgcagacttttttaacgattttgaagatctttttgatgatgatgacatccagtgagatgccctctggctgcaggcggggccaagcccttggtacagagccgcagtgtgagcctgcgcaggacagtttcaggtggttttaaagaacacgtggaaatcccttgaatttaggacctggttaaccagaaagataagactgttcttaacgacctagatgattctgttcatctctgaacgggatcaggttttgtcctcactccaattaaaagaaagcaatgtcaaaaa

SEQ ID NO: 53948 - DNA, 417 bp, Homo sapiens
caattatatactgtgatttttatttgttgcaatacattacaatttccagaggtactttggggctcaaaagctaggatttcctaagtcagtatgtgcatttcacacgataaagctgttaatggtgagcaaagtattatatactaactagatttttccacatctgtatagtatattatatgtattttgtggtattgagagtatagaaagtttagagtgtcaaacatgcgtttaatgtgtatttttaaacaaatttatggcaattaaaatatttggagacaagggtatcacatttcaatttgtaaagatctttttaactctactgtgtcattaagatgctttgtacaatgccaaaccatagttggagaaactaagtttaataaatatcaaatagattttctgtattaaagttaaaaaaaa

SEQ ID NO: 53949 - DNA, 2092 bp, Homo sapiens
gccggtccaagcggaggctttcagtgatttaagtacaaacatgcatctcgtgatagtcctgccttgagagcttaggaatcttccggataagtatgaagcaattcgtaggcctgtttcccatctgattccatagggggctgggtgtggccttcgggttgacatgagaaaggtctttagcaatcatttctgcaccggagatgagttttatcctgtgttggggagaggtgctcaccctccaccctgtgtccctgttttggtagcaagagtgaccgatgtcaagaacgagcatcaaagccagaatcctgcttgtttgcttaaaaatgtaattgggggcggcgggggaggagaggggaaagagacattcgcttggtttagtgaaacgcaggtgactttgtagctctgtggtcagcctacttgtctgctctgagggagagtgcgtggggagccatgctcaccgtggcaaacacaggaaccccatgactcgcccctcacctggcgtggagctgcctggtttgggctggagcagagctggtttcctggaatgttcctttggcccacatatggttctgtcccggtgagctctgttgtcagaggctcacgggacagaaccacatgctagggtctagggcccctgtctactgatagtcagtttgctgtgtcagaaagcacttctgaaagcagatatgagtcaccagacaggcaggatcttacaaaactcacgggcctctttggtctgcatgatggccccatgcgtttcataggctgtccactgagcgggattgtctgctgagtgggatgagccaactccagtttcttaaggaaaccactggaatctgcagcccccacatgcatctgtctaacgcatgcctcgtgttcgttttgcaaacatgcctgtggtggagggtggtcagttgtagccctgtgcgtctcaaggctgccttgtgaggccattcccagtgcgtgcccttgagctccttaccaccccttttcctgctcggccctttaatccctgacagacctggactgtgtggctgaagggggacctgcagcactgcagaaatgcctctgcgtggtgccatgaaggaaagaaaccttggcctggtctcgagaagcttcccatgcttcaggaagttagtaagggtggggtggcttgcaggattggcctgtttccaggggcctcccacactcattggccagattgtgaaactttgtcaggcttgtccctccctgataccaagtatgtcgagaaccgatggccccaccctctggctggtgctgggccggaggtggctatggaggattttggcatgcgtggcctgttcgccacctggacagcgtgacctcaggggttgtccactttacctttatggtgaggcctgtcggatggctaagtccttgaaaccctagagctgtgacgtagaatatgtgctgtctgtgagaaccgtgttcccaggagcactgactgcagttgagagagacccattttgctctcccttaccgccccccgccccgggtgctttctgcacaaagcctagagcctgggcactcaagcccaccggtggcagctcctagtgactggacatgcctggaagaccccctcagccttctgtttgcagaacgttcatttcaggagcttctccttcccacagacatcttacacttgctcgacactgccacctgcagaagcctggcgggctctggtcaccatgtgtctatctgaaggttgcactggccagcatgggcctgtcccaagcgagaggggagacacagtggactgaaaggactggttgaaagtggccaatctctgtcagcttaatttggcagagaaaatttgtaacaactctgagcacatgctgggtgaagtcacagctcaaggaaagataaagctgggcggaaggaggtgtgcgtggcttctggggtgggacccagaggggaggctctgggacaggggctggggttcagtgccagggccctgaggaagaaatggggactgatctcaaaattccagaattccctgtacatctgttcacgtgcttgtgtccaggtgtgacttgtaaactgtctagtgtttgcattaaataaaatggcaccg

SEQ ID NO: 53950 - DNA, 465 bp, Homo sapiens; identical to SEQ ID NO: 904

SEQ ID NO: 53951 - DNA, 1191 bp, Homo sapiens
atttttcattgactagaagtgaccaaaatagattctactgatgagaaaagacttttgaaagcagtatggtcaggttggcaggtgaatggcctcaagagcttaggatttcattgctactaaaagaacaagactattcagttgtgaaacaatgatttagtcaaatactgatgctgtctcagatgagtaactgcaaatcacttcaaaaggtagaagggtagcttaaatgtgaaaaaggttactgccacttcatgtagggaagataacaagcatttgcaaatagcaaaatagaaagaaataaatggtttcagtacaagctcttatattcacttggcatcaaaatagtccaaaataaatctgagaaccacggcaagttatagctgtgttaatgacaaaatgtgatatttactgtttaaatttagcagctgggagaatccccttataaggaagacagaaaatacatttatatccagactgcattactctttggaaaaatatgaccaatcagattttgggtattattgttacaaccttttccttcacctctgcatcatggtgatcaactaaagctcttattttctgggcacattcttctccatgtaacaggaaaaacaatgaaccttcagtgaaagtaggctgcacagctaaatggccttctattttgaggcagttctttatattctgaaatagcgtaagtactcgaagaagaatctcctttgctacgtggctgtcataaagggaaaggaatgatgaatccacttgggcacggagaagtccttctgtcatggctggattttcagacaaattcaaaagcagtttcaaaacttgcaccttcgtgtttccatttccagtaagtaacacctggaacaggtctgtaatgtaactgtgaagcatgtgctggtggtcattggtaacagtcatgtttgtcaacaatgtcagtccagccagctgcacagcagagttcagaggaccagagaagacatcctcacatacttgactgatgtatatctttatcttgatttgattttcaacattcacactcaggttatttagtgcatttaaagctttctctttaatactctggttggaatggttgattttgtttgcaacaattggaataccacccaattcacgaataatagcttggttaactgaaaaggctgcattgttacccaaagtaatcaaagctctttc

SEQ ID NO: 53952 - DNA, 817 bp, Homo sapiens
ttgttactgctaatcttgcttcttaaagttcacacccagtgcaaaaaacccaaccagcaaactaaccccaaaatccaatatatttagaaatgtaagtgttaagagatgtgcattatgtacaaaattgaaaattggtgctaaagtggcaatgtcaatttaaaatttcttgtccagatctgactgactgactcaggagattatagttcctactcattctctttccttttatcagatctttcaaaagcgctttttaaaattgatcaatgtgcaattctgtttgagtctctacagtcctatcccttttggaatgaacagctacacaaataaatattcttggaacttcgaagttgtcttcaaactagctctagaaaatgtccctagttgacattagtgttggtctgttagaaggggaaattgatttgactgcttcatgttttgaaaagagcattaagagggatttgaggaaggtatatgtggctttcttttttcttaagtttgaattacacttgatttcctttgggttattaggcagataaacccttgtcattagtaatacttagcactgtccaaaatgaaaaatgactgccagtgtgttgcacatacataagaaaattacatcttactgcgaagtctttggtttgtttccttatttggtttgactttgacttactattttgctatggtcatatccttaatatctgcggtacatttcatatgtatatatggggtgggagcataattgccattcccatgtgtctcaaggaagcttaatgaggaaactaatgagttaatattaactcttctgaagaaagctgac

SEQ ID NO: 53953 - DNA, 381 bp, Homo sapiens
cgtgtacatggctccatggaggttctccagtcggtgttgctgctgctgttttcgagccttatctcgtctgtgctcctcataagtgtcgtcatcagtgggcagctcatagcggcacaagggacaggaatttgtcagcctgagagcctctgatgactgtcctggggaggttctcaaccacagtcttggcagctggtggaggcaggtggtggtcccaatctactaccaaccccaagtcttcaaagtccatcctattgaaaagtgaccttgcgagctccagcagcatgttggttcgcgtctcctgctcagggtccgacggctcgcagtcgtgttcatcgaaataggacgccatggctgccaccttctgacgtcgacgccggccgg

SEQ ID NO: 53954 - DNA, 1640 bp, Homo sapiens
  misc_feature (1)...(1640): n = a,t,c or g
cggttagagggctggagtggccgccgagttggaggcggtggtggcagcagtaggagtgtgtagagtgcgggattgggggccaggccctgcggagggcgggggaagttgtcttcttttttttccggaggggccggtaaacctggtggctgaacggcaagatgaatttcctccgcggggtaatggggggtcagagtgccggaccccagcacacagaagccgagacgattcaaaagctttgtgacagagtagcttcatctactttattggatgatcgaagaaatgctgttcgtgctctcaaatcattatctaagaaataccgcttggaagtgggtatacaagctatggaacatcttattcatgttttacaaacagatcgttcagattctgaaataataggttatgctttggacacactatataatataatatctaatgaagaagaagaagaagtagaagaaaattccacaagacagagtgaagatttgggaagccaatttacagaaattttcattaagcagcaggaaaatgtcactcttctgttatctttattggaggagtttgatttccatgtccgctggcctggtgtgaagcttcttacttctcttttaaaacaacctagggcctcaggtgcaacaaattattttagtcagtcctatgggtgtttcaagattgatggacttactagccggattccagggaagttataccgtaatgatggcgtcttacctactgcaggcactaacaagaagcaatggtgcaatccagaaaattgttgcttttgaaaatgctttcgagagactactggacattatttcagaggaggggaacagtgatggaggtatagtagttgaagattgtttgattttgctccaaaacttattaaaaaacaacaactccaatcaaaatttttttaaagaaggctcatatattcaacgtatgaaaccttggtttgaagttggagatgaaaattctggctggtctgcacagaaagtgaccaatctacatctaatgctacagcttgttcgtgtattggtatctcccaccaaccctcctgggtgctaccagtaggctgccagaaggctatgttccagtgtggggttattgcaggcagctttgtactatcctaatgggctactggggttcctgctgatatcctgactgagaccataaatactgtatcagaagttattcgaggctgccaagtaaaccaagactactttgcatctgtaaatgcaccttcaaacccaccaagaccggcaattgtagtacttctcatgtccatggttaatgaaaggcagccatttgttttgcgctgtgctgttctctattgtttccagtgtttcttgtataaaaaccaaaaaggacaaggagaaatcgtgtcaacacttttaccttctaccattgatgcaacaggtaattcagtttcagctggccagttattatgtggaggtttgttttctactgattcactttcaaactggtgtgctgctgtggcccttgcccatgccgttgcaagaaaatgccaccccagaaagaacagttggctccaggggttcaacttgctacaagtattgggcaaccctccagtttctttacttcaacagtgcaccaatattctttcacaggggaagcnaaattcc

SEQ ID NO: 53955 - DNA, 1244 bp, Homo sapiens
aaaactcaatgttgacttgtaatttatcagtttaaacaaaaatgacaaaatggaaggtgtatttgacataatcagaaataaaatttcaaatagcctataattcacacaaagcctaggctggaaaatacaagtgctttgactcatttattaaaaaaggcttcatgtaaaccttgcatgagaagatgtccattagttactcaggatagagggcaaagagattatatacaaaaagtattttcaaggactatcttgttcttcctttataagaagttgaatttaatttttgaagtaattacttaggaagaaatgcagaggagttccacagaaaaagatggcaaccagaatgatattccgtcagccagatttttaaaattccttcactctgaaatttcttctttgtcagctaaaactgttttctgggtcagtttccttaggtgagccttgttcacattcagtatcaaaaccagctgacatttattattttggtttcattttcctttttgcgtctttatgtttctttcgacaatccatacgcaggttggttgttctggcctcccaagagttcctgctcatattacttcctactcctctccagaataagtcagaaccttgaagtcgttcatcattcttagagaaaaagaaaaatctagtggtctctttctcaagtaatgatgcttctccaggactggagtttctgtgatctgtttcttcagtaacatcttcctcttctgaactgctgtcttgtaaacgagggtcttcctgccagacaatctttccaggtttcactgtttcaactctgtaggtctcttcctttatgtctttagtgtctgaatcaaaaaaagagaacgtgaacccgctgggctgctcagcgtcactggtcagagctgcagggtcctggatttcctcaggtttctctttaccacagtcctcattcccagggtgtgccctcttccttttcactggtatattttgtagtttggaatatttctttcagatccatagcaatattataatacatttctttagacacctcaggtagtttctcagcttcctcccttttcttttttcgttttgctttactttcttttggtttatcatctctttttctttcgtaagtggcatggtcttgcttcgttggatcataatgtatgatgtccttaaatttcttagcagctactgatcctctgtttgtagaattgcttaagttgatttgcaaaacactttgtacaacattcagggctttc

SEQ ID NO: 53956 - DNA, 1424 bp, Homo sapiens
aacgaatctaacaagattcttgttaataaagatgtacctcagaaaccaggaggtgaaaccacaccttcagtaactgacttactaaattattttttggctccagagattcttactggtgataaccaatattattgtgaaaactgtgcctctctgcaaaatgctgagaaaactatgcaaatcacggaggaacctgaataccttattcttactctcctgagattttcatatgatcagaagtatcatgtgagaaggaaaattttagacaatgtatcactgccactggttttggagttgccagttaaaagaattacttctttctcttcattgtcagaaagttggtctgtagatgttgacttcactgatcttagtgagaaccttgctaaaaaattaaagccttcagggactgatgaagcttcctgcacaaaattggtgccctatctattaagttccgttgtggttcactctggtatatcctctgaaagtgggcattactattcttatgccagaaatatcacaagtacagactcttcatatcagatgtaccaccagtctgaggctctggcattagcatcctcccagagtcatttactagggagagatagtcccagtgcagtttttgaacaggatttggaaaataaggaaatgtcaaaagaatggtttttatttaatgacagtagagtgacatttacttcatttcagtcagtccagaaaattacgagcaggtttccaaaggacacagcttatgtgcttttgtataaaaaacagcatagtactaatggtttaagtggtaataacccaaccagtggactctggataaatggagacccacctctacagaaagaacttatggatgctataacaaaagacaataaactatatttacaggaacaagagttgaatgctcgagcccgggccctccaagctggcatctgcttcatgttcatttcggcccaatggatttgatgacaacgacccaccaggaagctgtggaccaactggtggagggggtggaggaggatttaatacagttggcagactcgtattttgatcctgagagagtccaaaatgcactggtcacgaaacgtctaatactatgactgttaaaatgtcagactataacaaatatctatcttttatttttcattagacccttatacttcaagagaacacactcagtgcttgtttttattttcttgacacatttattaacaaaatgcatcatggaaaaaaaatctacctcttaaaattccatttgcttttatggttagacatgcttgaccaaaaatgttcagaagaaaatatgtacctggtccctaattaagctgcgttaaatttggtagaagcatttaaatggtctatcttcagttttactgaacaaaaaatgtaatttatttagcattctttataaaagaattgatgctaga

SEQ ID NO: 53957 - DNA, 855 bp, Homo sapiens
gaactggaagaagtgaggggacaagaagaaggcagaatgtccagatggaggataagaccaaagagccaggttggtggtgtgacggtaggaaaacaaagctggaggaaatggagaaggaacaagtgagggacaatgaggcatgggttggggctgggctacccctcccaaactcagctctgtcaaaataaaaggcccttgtgtctgctgcgaccaagcttttccactttcctgtctttctccacactggtcccaactgagccctgtcaccaagcctagcggctccaacttgcaaagtgtttaagtatgaaacaaaggccctcagaggcacccccgtggctccatctcagttgcacctcagctgcaattagggttctgctccctcgggtgactgctgggaggttcaggatacctgcaaatgcctcactccctcagctgcaaggagagacttctcctttttattcgtttctaaaatgtgcctaatcaatacggtggaactcagcataccaaaactgtacgtgaggatgatggggaaaagggggtaagggggtgttcactgacagccttatctgggcacatcccctgggacaggacaagcaggccaaggacctaggaaggagcacaggaggcagatggaagaggcctgagggaacctgtgcttgtttgccagtgtgagatgcccacgcaacttcctgtcttcacttcctcttaccagcacctacaggacttgggctgcttcaggctgaacgctgggagaccacttcctgtgctgacacacagagctcccatctccatgaagaccgcacagcgcgtgtaaagccagcccagctgacctaaagcggacatgagacttactag

SEQ ID NO: 53958 - DNA, 2876 bp, Homo sapiens
  misc_feature (1)...(2876): n = a,t,c or g
ggaggacttcaccgatttccaagggggcacactggcccaagatgacccacctattatctttgaggcctcagtggacctggtccagattccccaggccgaggccttgctccatgctgactgcagtgggaaggaggtgacctgtganatctcccgctactttctccagatgacagagaccactgttaagacagcancttggttcatggccaacgtgcaggtctctggacggggacctancatctccttggtgatgaagactcccagggtcgccaagaatgaggcgctctggcacccgacgctgaacttgccactgagcccccaggggactgtgcgaactgcagtcggagttccaggtgatgacacagacccaatccctgagcttcctgctggggtcctcagcctccttggactgtggcttctccatggcaccgggcttggacctcatcagtgtggagtggcgactgcagcacaagggcaggggtcagttggtgtacagctggaccgcaggcaggggcaggctntgcggaagggcgctaccctggagcctncacaactgggcatggccagggatgcctccctcaccctgcccggncttagtatgacaggacgaggggacctacatttgccagatcaccacctctctgtaccgagctcagcagatcatccagctcaacatccaagcttcccctaaagtacgactgagcttggcaaacgaagctctgctgcccaccctcatctgcgacattgctggctattaccctctggatgtggtggtgacgtggacccgagaggagctgggtggatccccagcccaagtctctggtgcctccttctccagcctcaggcaaagcgtggcaggcacctacagcatctcctcctctctcaccgcagaacctgggctctgcaggtgccacttacacctgccaggtcacacacatctctctggaggagccccttggggccagcacccaggttgtcccaccagagcggagaacagccttgggagtcatctttgccagcagtctcttccttcttgcactgatgttccctggggcttcagagacggcaagcacctacaggacttgggctgcttcaggctgaacgctgggagaccacttcctgtgctgacacacagagctcccatctccatgaagaccgcacagcgcgtgtaagccagcccagctgacctaaagcgacatgagactactagaaagaaacgacacccttccccaagcccccacagctactccaacccaaacaacaaccaagccagtttaatggtaggaatttgtattttttgcctttgttcagaatacatgacattggtaaatatgccacatgcctttggtggaagtacaactgttgttattactctatacaagtatgagatcagggttaggaaaaaaagacaaagaggtgatcgacagacacacagtggaaaccccacatcgtctcatggcaaaccgaaggaacgggatgtgggtaagctcagcttcatttggactgcaaagtcccaggggttttgtttgcacatttgctcatgcacatgggtggtgggaggaaagggggatagcagagacacacagaagagggtacagggtgggtgagaaagaaagtagaagggctaatacccccaaagaacaaggccaactacacctggtgagcctcagagggacagaaacccaggaatgattcctgtgatagggctgggagagccaagaggacggattcgctccaggcttgggacacatcgaggacagtggtggttcttctccagcggtgaccccctgcattaggcaaggaggagcccagaggagagtggagaccttcgaggggggccgttgggagggtactgactgctttcttccagctcttcagtcccgcccttgggcaggacgaagggaatgtgggaaacaagggcgaagggaaaggaaggatggttttgagcaatgaaatgctgctgcatggaaagtgggcatccagaccctgcccagcattgcctcagcctcttcctgttcgtggaccgagggaagaaggaataaagggccatgggcattctccgctctgttcccagccctgccctcctccccttgcacctgggcttatccccacattaaatagcccatccttgaagctcagcaattgcccccgaagataggctgaagcagatcccatcctcaggttccactgtctatacacacaaaccatgcaaagaggaggaagagaaaggaggcaaagtagaattcagacaggaaagggtggttcaaaggggaatatactacaggaagaacagagaggcggctctcaaggagagggccccatgacagcacagcaatacacaagcacacctgacacaggctggcacgcctccccccaaggtggggctggtgggtctacatgacttctctgcatcctgaggatcggccgggccccaggaagaacctcttgcctcatccctgtctttggcaagtgcaacgggtggtgtggaggaaaggattccatgggtgtcccaaagatctcacactgctaacaccctcacgctccttcatcaacaggaagagaggaacaggaccctctttaacgagggcaagaagtggccttccctctgagcttgttactttcaaaattaagcacttgactcactgtttctctataactaaacaggcaatctctctctttatgccaacaattaactgggagctaggttaaattatttggctagataaaactaccagctagatggatttatttggtgccctcatacagaatgctgtagaaaatgtaaagaagagaaagctccttccagctagaagcacatgggactgcttctaggatggaaacaagtcctgctattttcacaatccctaagtgttctc

SEQ ID NO: 53959 - DNA, 737 bp, Homo sapiens
  misc_feature (1)...(737): n = a,t,c or g
tttttttccaaacttgaatcaataaatttattttctgcttaagcaggttgagttgggttttctatttgcaatagcaaaagtcctgactggcaaggtttaaaagtttgaagactctcacaggtaagtgcagctcaggatcctgtgagtgcagcagaaagtcttaagaaatggcaggggctggttgaacccagattttccattggctgagcagatatccccagaggcgtagaaaattaaatttgttttatgttgttccaaaagaggagaactgaggccagaggagcacacttctgagacactcatttttgctgggtagaggaactctctggcaagcaggaccatcgatattagagcagctggcctcaggagggagtaagagccccatccctgaaggtacacaagttgtggcagcaaccatctggcctgcagtttccagaggggagtcaggcgtggggtgggactggagtgaacgggtagatgcttccacatgcggcagttggcactgacggcaggaacacgggggtggcttaatgggtcctggggctcccctctggccctcaggaaggcaggagcatgaggggcttgggatgcagcacctgcaaatttgcacgttcctggcctcaggaggcctccagtacagaaaagaccatcaacgaantctgcagccatctgctaagaaacgccacagggaggggacagcatggccagccggggtccatcaggctttgggtggggat

SEQ ID NO: 53960 - DNA, 319 bp, Homo sapiens
cttttctctttttaagccaacttgtgagtagaatcattcacttgtgcctttagctgttgtctctgtgttgaggaatccagagtccagtccttctagacttatctggggacccgagtttccttctgtagagttaaaacctgttgcatccatccccagtccctttacggcacctgtgtaggcctgtagtggagctggcttttgtcctttgctgtccctggctgagccttggcctcatcttgggccagcgcctcctcccctgggctgctgtgatgtgttggcatttcctgggtagagtcttgtacttgctggtttctcctgg

SEQ ID NO: 53961 - DNA, 429 bp, Homo sapiens
gctatgacatgattacgaatttaatacgactcactatagggaatttggccctcgaggccaagaattcggcacgagcttcgcacctcagcctcgcaagtagctcagactataggcatgcaccaccacactcagctaattttaaaatttttaaatagcgagataggtctcgctatgttgcctaggctgttcttgaacccctgagctcaggccatctgcctgccttggcttcccaaagtgctgggattacaggtgtaagccactgtgcccagccagtggttaacatgcagtgttatgcaatgctcgatggagtcaagaatcaaatattttttcagtacctactatgtaccaggctctgttgagggcactggacaagacagaggaggtgacattgggctgtgacctgaagaagtcagccatacagagggctgg

SEQ ID NO: 53962 - DNA, 5703 bp, Homo sapiens
ctgcccaccatctttgtccctggcaaagtgggttttgcgcagtggcttagacctagaaaagaatcgtgacgggcaggaaaccattacaccaccacctgggctgtgcttcatgctcccgccgccacccccgccctcgccttcgcctccgctccggtgcacattaaagatccaaagtcatgactgactccaagtatttcacaaccaataaaaaaggagaaatatttgaactaaaagctgaactcaacaatgaaaagaaagaaaagagaaaggaggctgtgaagaaagtgattgctgctatgaccgtggggaaggatgttagttctctctttccagacgtagtgaactgtatgcagactgacaatctggaactaaagaagcttgtgtatctctacttgatgaactacgccaagagtcagccagacatggccatcatggctgtaaacagctttgtgaaggactgtgaagatcctaatcctttgattcgagccttggcagtcagaaccatggggtgcatccgggtagacaaaattacagaatatctctgtgagccgctccgcaagtgcttgaaggatgaggatccctatgttcggaaaacagcagcagtctgcgtggcaaaactccatgatatcaatgcccaaatggtggaagatcagggatttctggattctctacgggatctcatagcagattcaaatccaatggtggtggctaatgccgtagcggcattatctgaaatcagtgagtctcacccaaacagcaacttacttgatctgaacccacagaacattaataagctgctgacagccctgaatgaatgcactgaatggggccagattttcatcctggactgcctgtctaattacaaccctaaagatgatcgggaggctcagagcatctgtgagcgggtaactccccggctatcccatgccaactcagcagtggtgctttcagcggtaaaagtcctaatgaagtttctagaattgttacctaagggattctgactactacaatatgctgctgaagaagttagcccctccactttgtcactttgctgtctggggagccagaagtgcagtatgtcgccctgaggaacatcaacttaattgtccagaaaaggcctgaaatcttgaagcaggaaatcaaagtcttctttgtgaagtacaatgatcccatctatgttaaactagagaagttggacatcatgattcgtttggcatctcaagccaacattgctcaggttctggcagaactgaaagaatatgctacagaggtggatgttgactttgttcgaaaagctgtgcgggccattggacggtgtgccatcaaggtggagcaatctgcagagcgctgtgtaagcacattgcttgatctaatccagaccaaagtgaattatgtggtccaagaagcaattgttgtcatcagggacatcttccgcaaataccccaacaagtatgaaagtatcatcgccactctgtgtgagaacttagactcgctggatgagccagatgctcgagcagctatgatttggattgtgggagaatatgctgaaagaattgacaatgcagatgagttactagaaagcttcctggagggttttcacgatgaaagcacccaggtgcagctcactctgcttactgccatagtgaagctgtttctcaagaaaccatcagaaacacaggagctagtccagcaggtcttgagtttggcaacacaggattctgataatcctgaccttcgagaccggggctatatttattggcgccttctctcaactgaccctgttacagctaaagaagtagtcttgtctgagaagccactgatctctgaggagacggaccttattgagccaactctgctggatgagctaatctgccacattggttctttggcctctgtgtatcataagcctcccaatgcttttgtggaaggaagtcatggaattcatcgtaaacacttgccaattcatcatgggagcactgatgcaggtgacagccctgttggcactaccactgcaacgaacctggaacagcctcaggttatcccctctcaaggtgatcttctaggggatcttttaaaccttgacctcggtcccccagtcaatgtgccacaggtgtcctccatgcagatgggagcagtggatctcctaggaggaggactagatagtctggtgggacaatccttcatcccatcatcggtgcctgcaacctttgctccttcacctacacctgctgtggtcagcagtggactgaatgacctgtttgaactctccacagggataggcatggcacctggtggatatgtggctcctaaggctgtctggctacctgcagtaaaggctaaaggcttggagatttccggaacatttactcaccgccaagggcacatctatatggaaatgaacttcaccaataaagctctgcagcacatgacagattttgcaatccagtttaacaaaaatagctttggtgtcatccccagcactcctctggccatccatacaccactgatgccaaaccagagcattgatgtctccctgcctctcaataccttgggcccagtcatgaagatggaacctctgaataacctccaggtggctgtgaaaaacaatatcgatgtcttctacttcagctgcctcatcccactcaatgtgctttttgtagaagatggcaaaatggagcgccaggtcttccttgcaacatggaaggatattcccaatgaaaatgaacttcagtttcagattaaggaatgtcatttaaatgctgacactgtttccagcaagttgcaaaacaacaatgtttatactattgccaagaggaatgtggaagggcaggacatgctgtaccaatccctgaagctcactaatggcatttggattttggccgaactacgtatccagccaggaaaccccaattacacgctgtcactgaagtgtagagctcctgaagtctctcaatacatctatcaggtctacgacagcattttgaaaaactaacaagactggtccagtacccttcaaccatgctgtgatcggtgcaagtcaagaactcttaactggaagaaattgtattgctgcgtagaatctgaacacactgaggccacctagcaaggtagtaactagtctaacctgtgctaacattagggcacaacctgttggatagttttagcttcctgtgaacatttgtaaccactgcttcagtcacctcccacctcttgccacctgctgctgctatctgtccttacttgtgggcttctccatgctgtgccaatggctggctttttctacaccctcttttgagtgtagtttggtattttgtaattgagagctcatttcaaaagcagaaaaagacaacaaatattaaagcaaggaaaagtgtaactgaaacactgcactttactgttttatacttttgtacatatgagaaatcaagggattagtgcaaccagtagaaggcattgaaatgactgtcattaaccacacagtcctggaggcagagatgcagttacctaccctagcttttgatgggttctcttacctgtagtagccttatccctggtcatttggattttcagtttgcttttttctttttttcccctccaaactccttttccttggccaagccttcatgcttccccctttccatattataatctcatttgattgctctgcagttgggaacggtgatcttcttgaatgatgtttcagtgtgcaaaaactatagagcctgtcagcaccaaagctgacagaagttataccttactcctttcctttcccctgaacaaacctgctaatcccactaattcaggaatttgagtagagatggggaacaagaacccagatgctgtcccctcaccccctctcctgtatttctcaggtccagttcaaatctaaaattctacttttagagttgaaacagagtaataacttatctaaccctcttttcctacaaaggagaaagataaaaggcacaaaggttaccgccaaggcccgtcagctgtgtagtggcaaagccgagaccgagtctcctaagtccccgtcagtgtggttttcaccacaggactgtctcttgtcgttttcccctaatgccttctcctgccttttctgtgcctagtttttggctcttcacatattccatattgattttgacgctctgtatattggcatcaggtggcagctgaatatcttttgaattactcgaaggtaaagccagatgccagaatgaaggtgtagccagtgtttcccatatgcccctggagccccacttattgaggccagcagaataggtgcagagatgaagtgagcttagagatgttgcaaatgctctttatcccttcagctctctgatctgctctttcttcatgatacttagtctgcagggcatattaagatcatcccagaggttcaggcagttcctgtcatctctgaaaagactgggggatatgaaatcttccccctaccccacttaatgcgttggatatgatttttcaaagaatgcttcatgcccaaaataccagcctgtttagcagtgttacactgtttgatctgcgggcacttgttgcattgcctggcacccaatattcagggtccatgactaagactggtcttctcagatgccctgcttaaatcaggggcacttcaggctccacaggcgtcatgttggactgagacctaactcactggactcagaggaggaatcgtggaaaacaagagcaaaactaccccacacccctatttcatgtctgaaataaccctgtttcataccagttgcaaagcttgtggggagcggtcccacaaagcactttcttaaaccttgagaatctccaagagaaaaatatttggggaaggagggaggaaatatgtcgccttgcacaccacccctgaagcacatggcagtaggaaacagcataggattgtatgtgggaggtggataggtcggtgatgtgtggagcggaaaagcaggttggtaaagttcccttcttgggacttattcctggagtcagtggatacaagtagtgcagaaggttcacactgcaaatagtgttctcatctcaaagcaaactatcattccagaaggaaaagtgtgtcagggcaagcagacaacacaatttcctatcagaatatgtccctcaacccccgaaacaaggcttctctcagcctccccaccagtgatggataacagctcctattctcagctgacctgactgagccaacccatgaactcttcactccttggggaagccacctcccatcacacccctgagcagagttagggaggaattctacttcccataaaaggacctctcctgagaggcaaaacctgttgcctccaccacggcttccctcttggctcattccaagcttggccaaattggggaagtgggatggaggttgccctgcatcccccctcctctgcctgagtgtgtctttgtaatgtcagctggcatcatacaaagagcaggagaagcaaacacccagaactcttttgctggtcagagattccctgagtgtctgtcctcacccaagcctgctctgtgtctgtgttgtgaagcttgagactctggaaagaaatggggagggggggcaggggaaatgttgccctaagaatgcttctcattcctctgttcttattgggtcctgtttttcgggagggtgggggttgggggaagcttgaccttgtgtcttcgtcaataaactcacatttacac

SEQ ID NO: 53963 - DNA, 4651 bp, Homo sapiens
  misc_feature (1)...(4651): n = a,t,c or g
ttttttttttttttttgctttcaatatattttattctgacgaagttacaaaagtagatacaaaatactttttttagaagtacagttaactgacttagaaaaatagataaagcccctaaggattttaaaacacaacataaatttttatgtaaagaacatttaaaaatattttagatggtaaccaaaactaacttacacaaactatttttgatgtagaatagaatgctgttctataataagaagtctgtagcacactggtaatccatttggatctacagaatacttgtttggaacagaatctgataatgagagaaaactcaaatgaatgtcagtgcagttgcttcaaaaaaattactgctaccacatgtactatcatcccccaaggccttttacagtctgaaatatcaaaattgaaagcaaaaataggatgaccaaaggactactattttacctcttttcagaactctacaatagtagaaactaaattcccttatggatctcagggggaaataatgtgcctgttgaaggggctcagtgtttggtgtccaggctggcatttttcaggtgagggtttcatactgacaggaggcaggctcctaaaacaaggcggtagcaccagcaccatgactagggctgctttaaaacaaatttctaggacttacgctctttgggcctgatttgttaatacttatgaggtaatgatattatgtttgagaagctctacttctagtatacctcaatgctcagagagaaagccaacaatacaatcaggaaaccacaatattgacaaaacttagtactaccaccaagattgttcctcttgccttggcactactaaaaaactttacctttgttactaaagtcatggtgaatacagattttgcatttctcatgtaagcagctatataagctagggttctacaagccttagatgaaaggaaaaactttgctggaagcccctgtaaaaatcactttattcacaatctgaagaatgaaagacaaatttggctgtcaatacaaaaactgtagtacaaggaagttcaactgtttaaaaatctgcacatcactgtacaagtgttttttgaaggcctgaaaattaaagcaccataggattaactgcataatttagcaagcactctctaccccatgactgtaatcatgtatgaagagcagagatcagacactgagaggagatggcttctgattagcaagggggaagggagtgagtgttatggaacaggcaaaccttgggcatggggagataaaagtgagaagagtcaaaaagattgatttcnnnnnnnnnnnnnnnnnnnnnnnnnnnnnnnnnnnnnnnnnnnnnnnnnnnnnnnnnnnnnnnnnnnnnnnnnnnnnnnnnnnnnnnnnnnnnnnnnnnnnnnnnnnnnnnnnnnnnnnnnnnnnnnnnnnnnnnnnnnnnnnnnnnnnnnnnnnnnnnnacctctttcaataaaggaactggcagaggaggcactgtgtgtgaccacagtgccctctgtgagcagggaggatgggtccagcttgcttcctttttccatcagcctccctgtgaaacagaagtgaggcagctggtttgtactctgctatcttcccagaatcaaatgtctccccgtaaatggtctcaagtttctcccgtaaattctatatatgaacttgtcatttgaagtgggaataaataactgaattttaaaaatcaggaactatatttttagcctaaagaaagtgcaaacttgcagtacagcagagaacaacctcggtgcctgtgattcctcacaatgcccatgccaggcctttcctttcctttccttgtctctccatctgttaaaataccagcatccgtgtttttgtaaatgtacttggcagattcaaaatatttctttaaataattcaggaagtgctttctaaaaggagatgcggggattgttgagagggatctgtaagagcacaggaagggcgagtcccggtgagtgagctctgcggtgtcttcccacatcacaccttggactgctggggctcattcatctccggcacctgggccggtgtgctgcgctcacatgttgtaggcgacatagatggggtccagctggtcagccaggaagccgtcccgcaggtgcatgcgctgcttctcaccccgagagttgatagggatcacccctgggtccacgatgaccaccactcccacgaccaggtagtgctcctccagcaccacgttggtcaccagggccaccaggtccagggcatcctgctctagcccatccagctccaccaccaccaccagcaggttggtccaggtgaatacggcacactcagcgatgctcctgtgtgctcggatgacagaggtctcaatgtcgatggggtggtaccgcatgcctctgagctccagagtttcatccagagacccaaccacatacagtgcatcgtgccgccctccactggcatcagtgagctctgttcgccgaaggaagccaaggtagccggtccttgcccagatggtctgtgtgtctccaaaactcagccgggcactgaagtggtcagcatgaagcgcctcctccccgtaaacggtgtagtacccggtggcattgtgggggctgcttacccagatctctcccaggtgtgagtctcccaagggtcctttggtctcggtgtgtgcgatgatgaccttcacgccggggaggatctttccagactccatcaatggcaggctgtgcggagaaccccgttctaccaaacgaaccctgtcatggcgcagtgcccgcatgtccacgtagacggttgtggggtccgggccagctgtgccctggaggcagatggccacgttgaccctgcacccgaacgtggtgcttacggcgcgggccggcacatgtccttgaagagcttggagaaggactgggtcagcgcaatcctgggccgctcctcggcgaccaccatgcacgtgcgcacacatgacaggttcacccccttcatcctgaggacacccgtctgtgcgcctaggcccttggtgcacatctccatcacagagtaggagcagaaggtgacgcgggccttgtactggctgacggccgacagccacagggacacgttgctctccagctccagcgggggcaccagcactgattggtgtcccgagtagacactgcacagacaccacagggcaaaaccaaggccacagtaggggtcgaggcagatggcgatctgccgcgaggggtacagctcacactgcagctttatggagcggcataaggcgcttgtggccgcgtgcgacatcttcactcccgctaatatcccagtggttgacacgctgaagtccaagtatgcgaggacatcgggggaggggggcctgaaaacgcttgctatcttcttttttgggatgtcatctgtgtctaggatggtgggccaggtcctgatgtccacggcagcagcagcctccttggacctgagcagccgtgtgacagcctgcgtggtgaggacgcatgcagacttgctgacctccacgatcatcttgacggtgggcagtgtggtgccgaggttctgagggtgcgggggccgcacggtgacaggcacgcagccacagtacaagcagccatagaacgcggcaatgaggtccacccctggtgggtagaccagagccacatggtccccaacactcagtcttcccttctccatcagagccgcggccactctctcagcccttttgtgcagctggacacaggttgcagtgcttgtgacggtgcccttggcgttcagcagcaagaacagcgggtggtcaggagtggtgtgggcacgccactgcagcacgtcagccaggaacaggaacttccgtgcctggtcgctgtcctccaggtgggcgagctctctcccggaagcctgagcgattctcttcccagcaaccaggttccccacgatcattgaggctggtccaacctctggttgtttctgacgaggtttggggaggttggtaacacaggtgtgagggcacatcagcacattacacgggtgcagcgtcccttccagaaagcgctgtttggtttcagaaatgtgaatccctccgagaggagccttgggcaaggtgttggcaggaaccagggccagacagtacacgcccacctggtggatgctatcaatggcctgcagcacacggctcatccactggaagctgtcctcctccgaggcatccggccgctgctcagccaccaggacaatccggtcgtcgtgcagcacggtcacagagaacacagcgatcctgcctctgtagacaaacttcatgggctccacggccagtgcggtggccacaacgtcatctgcattgtgtctgcgaactccagtgaccatcagcccgtccagtttgcccacgatgaagaccaggttgtcaggcccgatgaagcccagcaggcctgtcctggtgaatggcctgtcaaagatgggtgctcctcctgtggtgaccggaactgcctcaaacacattcttcgtgattccaagcaatccatagtacgctgtgccagttgcactggaactgacgcatatttctcccacttcatcagttttacaaagataaggggtacttctaacttcacaacacatacattagctccaggcatcacctgacccacgtcctgaacagtaaagactgacaacttttc

SEQ ID NO: 53964 - DNA, 499 bp, Homo sapiens
  misc_feature (1)...(499): n = a,t,c or g
ggcggggtcggcgctgccggggtgaaatcgtaggacagtgaagatgctgctggaattgtccgaggagcataaggaacacctggccttcctgcctcaagtggacagcgcggtggtcgccgagtttgggcggattgctgtggaattcctgagacgcggcgcaaacccaaaaatctacgaaggcgccgccagaaaactcaatgtgagtagtgacactgtccagcatggtgtggaaggattaacgtatctcctcactgagagctcaaagctcatgatttctgaactggatttccaagactctgtttttgttctgggattctctgaagaattaaacaaattgttgcttcagctttatctggacaacagaaaagagatcagaacgattctgagtgaattggcaccaagccttcccagttatcataaccttgaatgggcgactagatgtacagcttgcaagtaggaagtctcagggcaacagatttaaaccagcagtggantatta

SEQ ID NO: 53965 - DNA, 360 bp, Homo sapiens
ggcaaactggcatattgtgtaacttatcattttttaaatccttatgtaacaaatcaattatttgaaaactactgtgaagtggtggtcactctgaaattttatgaaaacaaacattcttcgtaaaacttttttccttttcctaatttatattcattctagaatatttagaaaaacagtctgttctttagagcttggatactgtcagcaaaaatgaactttatctggacagctttattggttcatttccttctgtggatgtatttggaacccctgaaagtatcaaagtggtattaaattctccatatttaattaaatggttgtgtgaagtcccactatcatctgatgactcaaattcacaat

SEQ ID NO: 53966 - DNA, 2019 bp, Homo sapiens
aagatggctgacaaaatcctccctcaaaggattcgggagctggtccccgagtcccaggcttacatggacctcttggcatttgagaggaaactggatcaaaccatcatgcggaagggggtggacatccaggaggctctgaagaggcccatgaagcaaaagcggaagctgcgactctatatctccaacacttttaaccctgcgaagcctgatgctgaggattccgacggcagcattgcctcctgggagctacgggtggaggggaagctcctggatgatcccagcaaacagaagcggaagttctcttctttcttcaagagtttggtcatcgagctggacaaagatctttatggccctgacaaccacctcgttgagtggcatcggacacccacgacccaggagacggacggcttccaggtgaaacggcctggggacctgagtgtgcgctgcacgctgctcctcatgctggactaccagcctccccagttcaaactggatccccgcctagcccggctgctggggctgcacacacagagccgctcagccattgtccaggccctgtggcagtatgtgaagaccaacaggctgcaggactcccatgacaaggaatacatcaatggggacaagtatttccagcagatttttgattgtccccggctgaagttttctgagattccccagcgcctcacagccctgctattgccccctgacccaattgtcatcaaccatgtcatcagcgtggacccttcagaccagaagaagacggcgtgctatgacattgacgtggaggtggaggagccattaaaggggcagatgagcagcttcctcctatccacggccaaccagcaggagatcagtgctctggacagtaagatccatgagacgattgagtccataaaccagctcaagatccagagggacttcatgctaagcttctccagagaccccaaaggctatgtccaagacctcgtccgctcccagagccgggacctcaaggtgatgacagatgtagccggcaaccctgaagaggagcgccgggctgagttctaccaccagccctggtcccaggaggccgtcagtcgctacttctactgcaagatccagcagcgcaggcaggagctggagcagtcgctggttgtgcgcaacacctaggagcccaaaaataagcagcacgacggaactttcagccgtgtcccgggccccagcattttgccccgggctccagcatcactcctctgccaccttggggtgtggggctggattaaaagtcattcatctgacagcagccgtgtggtcattggaaactggggaggggagggggagagaaggggaagggaagaaggtggggaggcagtgggtccctcgggacgactccccattcccttcccttggattcttctccttactcaattttccctagacctaaaaacagtttggcagaagacatgtttaataacattttcatatttaaaaaatacagcaacaattctctatctgtccaccatcttgccttgcccttcctggggctgaggcagacaaaggaaaggtaatgaggttagggcccccaggcgggctaagtgctattggcctgctcctgctcaaagagagccatagccagctgggcacggccccctagcccctccaggttgctgaggcggcagcggtggtagagttcttcactgagccgtgggctgcagtctcgcagggagaacttctgcaccagccctggctctacggcccgaaagaggtgggagccctgagaaccggaggaaaacatccatcacctccagcccctccagggcttcctcctcttcctggcctgccagttcacctgccagccgggctcgggacgccaggtagtcagcgttgtagaagcagccctccgcagaagcctgccggtcaaatctcccccctataggagcccccgggagggtcagcaccaggaggggagggggggtcagggccagccccggggccctgggggtgatctctgtggtgacagggcaggatgaactcctggaa

SEQ ID NO: 53967 - DNA, 905 bp, Homo sapiens
tggatgatagggttacactgggagatacagcagtgaagctgaaatgaaaaatgtgttgctgtagtttgttattagaccccttctttccattggtttaattaggaatggggaagtcagagcctcacttgttcaggctccctctgccctagaagtgagaagtccagagctctacagtttgaaagccactattttatgaaccaagtagaacaagatatttgaaatggaaactattcaaaaaattgagaatttctgaccacttaacaaacccacagaaaatccacccgagtgcactgagcacgccagaaatcaggtggcctcaaagagctgctcccacctgaaggagacgtgctgctgctgctgtcgtcctgcctggcgccttggcctacaggggccgcggttgagggtgggagtgggggtgcactggccagcacctcaggagctgggggtggtggtgggggcggtgggggtgttgaagagcagcaaggagctgacagagctgatgttgctgggaagacccccaagtccctcttctgcatcgtcctcgggctccggcttggtctcacgcacacaggaaattccttcagcttctcctgcagggcccgctcgtccagggggcggtgcttgctctggatcctgtggcgggggcgtctctgcaggccagggtcctgggcgcccgtgaagatggagccatattcctgcaggtgctctggagcagggtacttggcactggagaacaccttgatggccttcttgctgcccttgatcttctcaatcttggcctgggccaaggagaccttctctccaatggcctgcacctggctccggctctgctctacctgctgaagatgtctccagagaccttctgcaggtactatcaggcatccgccatctgctggacggcccct

SEQ ID NO: 53968 - DNA, 469 bp, Homo sapiens
ctgagacagactaacctgaaagctttgcctaacagtagcttgtagagatccagtgcacgccgatgctgctaaactcagtgcctgagcccggccctgcagccccagccgcagtgtctgaaggccacctcccaaagggagcacgttgccttttcaaactcccgtgccgatttcctaagagcccctagtccaagcctctcagatgaagctgaggagccgtgcctaggatcccttcccagctctgaggacgggctgcagagctctgcaggtgtggattcaccttacgcccctacagcaggctcagcccttcccaccctgcccgatgcccagcagcacaacacggagtgagacaggatgcccacggtgactgccgctccgtccgtgcacacacagcggtgctcttcttcccctttagccacccactgcccaacccaacggcaaagacacagaaaccaggtcccttttgcagagg

SEQ ID NO: 53969 - DNA, 2224 bp, Homo sapiens
atattaagcaaagaaagactaaatttattttaataaacattcagaggctgagggtggccaaattttcaagccagaccctcccaatgttaatacactgtgcaaagcttacaccatgaacaactgacccggaccactaccattccaatgggagcctctgccttacaataccaggttagatgtctgtgcccagaacccccaaattagttacaactaataatcttctttcaagagttttttttttcaatcttggagttaacaatctgacttatttttcttttatcaaagaagtaggaaaattacaataagaattctagagatctctataaattacagacctatgactcaaaatccttgaaacaatttctctacgaacataagagttaaaaatagatttcagtaaaaccctatatgcgtcttatgtgtacacagtatagctatgaggaacagatcttattttgaggaactttattgttacatttttgcaataattgaggcacaactacctcctgcttttccaacatcttaataaaaaagacaataaggattaacagtgaaattaaaattaaaaaatacaaaagcctaaggttctggagacaaaactgactagagtctatgtgtagccaagttgtgaatgacagtttagccttgcagagtttccttcttctccaattacaatgtgttacagaatttggaagggggtgtctttaaaaacgttctaattcaccccggtcatgaggaggaggaggaggaagtccagctcagcaaggccaagtgcctcggccagggcggtggggtcagcgctgagcggggttcaaggggcctgcgcccgggggccatccccctgcgctttctatcgagttaaacggaccccacaatatctccttcctttcatgcttctggtttgaaagtgacgagtaaatatgtcagactgtttaaaggaaaacaagcactcattgacaaggccggactactcaggaaggtgtttcaaacaactcccctgctacgcgaatcacagcgctgctgtcgccaacagcgccgcgaagaggctctccccgttggcggaggacccgcttgcacttcctctgggctctggattctaacacacacaggagacacagcgaaagccgacccagaaggcaaacaaagctcaccacgctccggaccgggctgcgcgtcactgttgcagactgcaaatgggacctgagaccaccccgagggccccaccaggagctctctttctcctttaaaacgtggtcatcggcactcatctccggtcacatccgtgaggtctgtgaagagccacagaagcagtacaaaaacagcgacttctttatccagccaaaaaaggagccacaagcccagcaaacactgacacacagcctcgagcactgcgagagagagttccatgctgtctcccgatgagaacgctgtgctaacagggtgaccccagaggcaggtttcccctccctcttctgcttctgcatctgccccaagggcttgcgtttaccgggtttgcggaaaacaagccaagggtgagctgcagaggggctcggggctcggggcagcacggcctcgggacgagggccctgggatatgtgactgagccacagccaacattcgggtgcccaattaagaggacgcttttcattttcttgtaaatgctaggacacatcccaaaacacactaggcaggatttctcagtagagtgatacacagaggggaccagcttggaatgcaatgtattttaaacacagtgaaagccacctggcaggtagctggacaagtgagctgggcccaggactggccagctcgtatcaacattcacaggctcccgcgggctcccccaggacagcggcatccgagagtgtttactcttctgcaagcacagtcatagaagcgaggggcctcgatgagaatcagacttagggagagcggcgaacaggcacggctgtccaaaggcactggtggagcggcagtttggagaaactcaagattcctccagcgtctgtgggcttcccgaaaggtcagctgttagctcgccaagcagctggggcattaacaaaagctctgctagtggccttgccagctttctgaagccccagaagaggaatgtttctgaaagaaggaaacgctatgtgctgccaactgtgtgtgagcagatgacttgcaggaagatgggagagccgtctgcaaggggacctggtttctgtgtctttgccgttgg

SEQ ID NO: 53970 - DNA, 423 bp, Homo sapiens
gcggaggacgcgggtggcgcggagcacgagaaacaacgagtttctgtctagatcgtgggggacccaagcccggggttgcgtccaaggtcggggatggagaggacgcgacccccgcggcagtcgagatggcctttttaaaattctatatttgagaaggagtctcgcgctgtcgcccaggctggagcgcaatggcgcgaaatcggctcattgcagcctcgacgtccaggactcgagcgatcctcccgcctcagcctctcgagaaggagtggccagaaggctcctctccaggcctcacagagggaaacactggtctagtgagagacctgcgtcctgcccatcaggaccgaagcggcacgtgcgaggatcctgcaggccaagagacaacagcgattacaaaccccagtcccagccttgcagctgacc

SEQ ID NO: 53971 - DNA, 4119 bp, Homo sapiens
cgagtttgaggcagcgctagcggtgaatcggggccctcaccatgagttcctcgcctgttaatgtaaaaaagctgaaggtgtcggagctgaaagaggagctcaagaagcgacgcctttctgacaagggtctcaaggccgagctcatggagcgactccaggctgcgctggacgacgaggaggccggggcgccgccccgccatggagcccgggaacggcagcctagacctgggcggggattccgctgggcgctcgggagcaggcctcgagcaggaggccgcggccggcggcgatgaagaggaggaagaagaggaagaggaggaggaaggaatctccgctctggacggcgaccagatggagctaggagaggagaacggggccgcgggggcggccgactcgggcccgatggaggaggaggaggccgcctcggaagacgagaacggcgacgatcagggtttccaggaaggggaagatgagctcggggacgaagaggaaggcgcgggcgacgagaacgggcacggggagcagcagcctcaaccgccggcggacgcagcagcaacagccccaacagcagcgcggggccgccaaggaggccgcggggaagagcagcggccccacctcgctgttcgcggtgacggtggcgccgcccggggcgaggcagggccagcagcaggcgggaggggacggcaaaacagaacagaaaggcggagataaaaagaggggtgttaaaagaccacgagaagatcatggccgtggatattttgagtacattgaagagaacaagtatagcagagccaaatctcctcagccacctgttgaagaagaagatgaacacttcgatgacacagtggtttgtcttgatacttataattgtgatctacattttaaaatatcaagagatcgtctcagtgcttcttcccttacaatggagagttttgcttttctttgggctggaggaagagcatcctatggtgtgtcaaaaggcaaagtgtgttttgagatgaaggttacagagaagatcccagtaaggcatttatatacaaaagatattgacatacatgaagttcgtattggctggtcactaactacaagtggaatgttacttggtgaagaagaattttcttatgggtattctctaaaaggaataaaaacatgcaactgtgagactgaagattatggagaaaagtttgatgaaaatgatgtgattacatgttttgctaactttgaaagtgatgaagtagaactctcgtatgctaagaatggacaagatcttggcgttgccttcaaaatcagtaaggaagttcttgctggacggccactgttcccgcatgttctctgccacaactgtgcagttgaatttaattttggtcagaaggaaaagccatattttccaatacctgaagagtatactttcatccagaacgtccccttagaggatcgagttagaggaccaaaggggcctgaagagaagaaagattgtgaagttgtgatgatgattggcttgccaggagctggaaaaactacctgggttactaaacatgcagcagaaaatccagggaaatataacattcttggcacaaatactattatggataagatgatggtggcaggttttaagaagcaaatggcagatactggaaaactgaacacactgttgcagagagccccccagtgtcttgggaaatttattgagattgctgcccgaaagaagcgaaattttattctggatcagacaaatgtgtctgctgctgcccagaggagaaaaatgtgcctgtttgcaggcttccagcgaaaagctgttgtagtttgcccaaaagatgaagactataagcaaagaacacagaagaaagcagaagtagaggggaaagacctaccagaacatgcggtcctcaaaatgaaaggaaactttaccctcccagaggtagctgagtgctttgatgaaataacctatgttgaacttcagaaggaagaagcccaaaaactcttggagcaatataaggaagaaagcaaaaaggctcttccaccagaaaagaaacagaacactggctcaaagaaaagcaataaaaataagagtggcaagaaccagtttaacagaggtggtggccatagaggacgtggaggattcaatatgccgtggtggaaatttcagaggaggagcccctgggaatcgtggcggatataataggaggggcaacatgccacagagaggtggtggcggtggaggaagtggtggaatcggctatccataccctcgtgcccctgtttttcctggccgtggtagttactcaaacagagggaactacaacagaggtggaatgcccaacagagggaactacaaccagaacttcagaggacgaggaaacaatcgtggctacaaaaatcaatctcagggctacaaccagtggcagcagggtcaattctggggtcagaagccatggagtcagcattatcaccaaggatattattgaatacccaaataaaacgaactgatacatatttctccaaaaccttcacaagaagtcgactgttttctttagtaggctaactttttaaacattccacaagaggaagtgcctgcgggttccttttttagaagctttgtgggttgattttttttcttttcttttttgtacatttttaattgcagtttaaaagtgaatcgtaagagaacctcagcattgtgcacgataagagaatgtgtcagtatttcagggttctacattttatctgtaaaatgtgactttttttttttttttatcacaacagaagtaaaatgttgctttgtacctggtgtcttttattaagaatttactccccccatttctcacagagaataacagtcgggagtcattgtcacaatataatagaaatgttagcaaccagattcatgtaaggactaagtggtcctcatgaattgcattaagactctgtactgctcatattacactccatcctctctgtaagtttgctgggtagtggagggggtaagctaaatcatagtttctgacaataactgggaaggttttttcttaaaataacaatggaattggtataattgggattgaaaactaaaacttggaactaagatagagaagatggagtgtatgtagaagggctgttaaaaatgtaaaacttggttgcattatttgtggaggctcaaacttgtgaaggttaataccataatttttccatttgttctgcattttgattctgaaaagaaagctggctttgcccatttcttattaaaaaaacttgttgtaaatccagttgtctaatgggatctatatgaagttagccatgtctgtatgcccttctcccacaaaatactgtataactagtgtgcttgtagtagttaactccaccatctttgtaagctaatgaaattgtgagtcacccatttatatcttaatttttaatcatgtcagttcttgaatgggtatctccttagcctgctgatttctttttctttctaaagaaagtgggtggagaaattaatttagacgtttgtttgcaataaaaagaattcattttactcttgttttggattctcgccatcaaggttcaaaatccctttatataactcccaagaggagaaatttattaagtgtgtgcttttctggcagcttattctttactctgcatagaacatttaggttttaaaaacttaaatgtatactgacaattgatacataattatgaagtaaagttgaattcttcccttcccctcccccccagacaacttttaacatatttaatgaggggaaaaggtactggctgggagaagttaacactgagtttatcatctttacagaatgctaatgctgtcctcaactgattattttatatacatatatatgatacatgaaactctgggatcagatgcttttaggaagccatcatgcaagccagtcattgatgtcactgctacacaacactggctaacttggactgtaggctatgtaattaacattagatcccctaaattgtaattatattggggtttggcacagaacacttttaatcttcccctcaccaatgtgaagtgaggaatcaggagtcaaactgtagaactaaaatttgacttcagtctagcgtttccttggtgtttttaggttgctttgg

SEQ ID NO: 53972 - DNA, 645 bp, Homo sapiens
ttttttttttttttcaggttgcagggctttatatttcagcaacagtcatacagagccacacagcaggggcacccacagctgcctcaggaggtggcagcggcggcctcttttgcagcttttctctcttgcagcatcctctgcctctgtttggccaggcacttcctggcagaactgtaggcccccaggtcctgatagcggtcctggtaggccttggccacctgggtgaactgctccacttccttgatacagttctgctggtagttctgtccttccctctgctgacaggctttgagccgatcctgcataatgttgataatttcttggtcgactttgtagtccctcttccactgcatttcggcttcatacatgcacatgatgtcctcctccttgcactcagtgatgtctggcacgcggcggtactgccggtggtagtagtaatacctgttctttgcgtgctgccgctctataaattctctcacgagggtcacgggtcggtccacgatgaggtcgaacgctttcatcatgtagacgatgggattgggctgcaccggcgtgcggcgcgggggctcagggtacacatccttgtcccagctgtccggcatggcggcggcgggcgcggactcgctcccggacgcgctgccctgg

SEQ ID NO: 53973 - DNA, 296 bp, Homo sapiens
cacatccatgctgggatgcacagttcttttcctaaggattgtgtttactcctgactgcaacgtcttggccactgtttggagcagtttggtctgaaggtcattaaggatctgcttgcatgttgtggaatgtcctccgtgacagactgcataccatgttaaaagagaaggaaggcttgtggatcaagagggttgacattaggtttggtgagatgagttgcttggcccagatcagcagaacaggaccctggtgataaggcatctggctttgctaccacttatcatcttccattattctc

SEQ ID NO: 53974 - DNA, 360 bp, Homo sapiens
tttgaagttccatgtactaactatctattcgatgatgaagatcccaccaaacccaaaaaaagagatctctcgaggatccgaattcgcggccgcgtccacgatgattgctgtagggtttcaccacgggcaactctaacttgtcacagtcaatccacaccttgtcagcatttaaccgcctcacacagaatgcaggtatctggcccgaggccacagctgttcctgccctctgtgttctttgtgctggtattctcatatactttcacagaaaccacacaatggactgttgtgattttggctttaaacagtaagttatcttttaaagagattgaaacaattttttagtcttttagtcttttatcc

SEQ ID NO: 53975 - DNA, 439 bp, Homo sapiens
tacacactgacatgaaagcactgattcatttatttccatcagtagacatacgcccactataccctaggcagagtttgaagtagaaaggacaaaaccaatatccctgcctggcctggaacttgcattctagcgaaggggaggtaacaagcatactccactatgttagaaggaactggacggggaaaaccagtaaaaagcgtcacaacttaaggctgtaaatgggaagagccttactgaagtggcaacatttgaaggtgtgggagaagctgttctcatagccaagaacactgcagacaagacacagcaggtccaaaggctgaaccacatttgagaaaaaacaaggacaatgtggctgaagaaagggatgggggtggaatatgacagagcctcgtaagtctacgtaagtgaggtggggcgctaatggtgctgttcaagagta

SEQ ID NO: 53976 - DNA, 400 bp, Homo sapiens
tcgacgtggaaacaaacaacaaaactgtacattttttttaaagtttgttgaaaagaatattgtcttattctataaaacatttcaaacctagttagagatttgtaatcaaaaaacatttgcgcagaaagcagcacttagggctgcctgttctataccctacagtcagacaggaaaagaactgaaaatggcacccttctgacattctgaggcagctggactggcagccaagtaaaggagagtgatgaggtggtgtggggagggtggggaggcagcgcgagggtgctctccacagcaggtaggagcaggcaggagtggggacagagggagagcttgtgactgggacagtgaaaataaacgattggctcttatcaatcacttgcaccaactaaaaaaaaaaaaa

SEQ ID NO: 53977 - DNA, 408 bp, Homo sapiens
tgaaaatagaaaataaataacttcatcctataaaaatgaaacaaggcacttttaatgactgtacacaaagctgaaataaacaaacattttttcataaagctgactcaaagaccctaggagacttttgtagaaagtgaaatagtaaaggcactacataattctttctcctaactctacttactaaaaaaatccaccaattaaacttggcacaaaagagtttaattatcataaagtgcatcacttggctaaatatattaaaaagaaaatcagccataatacagtataacaacatcttcacacaaatagaaataaaaatgcaatgtcaggagtcaagccagttaggaactttgcagtatataatggcttttattttcttttttgataagcccctatttatttagaatctat

SEQ ID NO: 53978 - DNA, 1147 bp, Homo sapiens
tctttttttagaaaaataaaactttttttttgtacaaatatacaagtccatgttctttcagcccctttgcgctcataacgtcagacgctggcctccaaacacacagtcatcatagggcagctgaaaacaaggggaaaaaagacacgttaagcttccggagcggagctctgccaagctaccgggatggggaggccactactggaaataactcttggactccattctccatagcccaaatataatgaactttacaggctgagggagtttgcctttaatgcttctctttaaaaaaagagtaagctattaaaaaaggggggggggcaggtacattcttgggatactggttatgcacagaaatttgagagactcattatgtagatacccctctgataaggagcagctctaggggcctgggagggtgaagggaatggcacctcattagttagagcgccgaagaggttcacagactcacctcgtcctctgtgaactccgtgaactctgactctgtgtcatagctctcctcatcctcactctctggcagcatctgaaggttttctagtgtcagctggcccagctgctgctgtatccgggtgcttgggcggccccaggtgagctggtagggagaatagccctggtaggtaactctgttgacatcagccccacacttcaacaggagtgacaccaggtcaggattttgcaggtccactgcgaggtgaagggcagtccggccattacagggctcctgaaaccaaaaggaatttgagatgcttatggctgcatttggaatttctgctcacaacataagcacgaggagcctgactcagtgcgtcgggggcaggaagcaccaacctgagcattgacatcagcacccaaggacaccaaaagctccacgatgcccaggtagccatggatagaggctaagtgtagacacgtgtggcctggaagaacaaaaggaaaaaagtataacccacctgtttcaaccctcactcctttcacctattcttttatggaacaagtagtcttatcttctgaattttaagaacccacagtctgggttctgaaagaactttataaaggcatccaataggcactttgcacacatattttctcaaccttccaaatgttaggagtttaagctcttgcctgg

SEQ ID NO: 53979 - DNA, 1153 bp, Homo sapiens
atggtgagtgtgtcggggggcttggcggcttttctcctcagttttctggagtgctttggaggagaggactatggcagccagggacgccacttcaggcagcctgtcagaggagagcagtgctttggacctgccatcagcgtgtgacataagagattacgtcctgcagggacccagccaagaagccaacagcgaggctttcagttctttggaattccattcttttccttattcttctgatgtggatccagacaccagtaacttaaatatagaacaaaataactcctggaccgctgagaacttctggcttgaccctgctgtgaaaggccagtcagagaaggaagaggatgatggccttcggaaatccctggatagattctatgaaatgtttggccatccacagccaggctctgcaaactcactctctgcatctgtctgcaagtgcctgtctcagaaaatcactcaactaagaggccaggagagccaaaagtatgccctccgcagttttcaaatggcccgggtgatcttcaaccgggacggctgctccgtcttacagaggcattccagggacacccacttctacccactggaggaaggaagtacatctttggatgatgaaaagccaaacccaggactgtcaaaggatattactcatttcctcttgcagcagaatgtaatgaaagacctgtaactggtgccgggtggtgtgcagggtagtaatggaggtgctgtgccatgaccagcagtgttggtggccacccagatcccctagggtctctggccagctctgtgtgcccaatcccaattaagtgctttgaggttaaaggctggcacctgtgacctggtattggagccagtcagcccatatggagagccagcagggtctgggagttctccgtcctctgtgccaaggccgctgactgactgggctacgagtcaaaagcccagctcccttgcctcaaggaaggacattctctgaggagtaatttatgctctagcactccctttcctctagatcggcctgaggctgggacattacatgaaatcacacccttgctgggcttaatccctttccctaccctcccatttatttactggtgtctctgggagcctttccttaataaacctcttatatctgaaaaaaaaaaaaaaaaaa

SEQ ID NO: 53980 - DNA, 652 bp, Homo sapiens
ttttacctgaagcaggagaaaggagacacaggataatcactgcttttcaactaaaatggttttattgagatgttttggttggaggagatactttttctggcaacatttctgactcaaggtccctctgggccccagctcttcccatgagacagtcacaacactgtttaatcagctctgcagaggccagccctggagcagaggaggattcagggccatggaggggacctactctgccctgttctggtcactacttctctagactctcatgcactattgtctgtagcaagtgacatttccactggaagcacataaagatggcgacagcctcatttcttcctgagtgaactgaagcccaaagaaaggggaggtcccaccaaaggggaagagagccagggccccacccaacaaggatgctgaaataaactacatgtaatgctttctaggagacaacacagaaatctctactctgaaatccagaatgttaaatatgggctccccctctataagttaactgtacaagcttatcaatcatttaaaaccccagcaaccaacaatagcaattaggaatccaaattcatagcacaaaagaacacagataccagtgttggacagtggttttgttatggggactgggtgacagcttatcctaaat

SEQ ID NO: 53981 - DNA, 283 bp, Homo sapiens
ctctctcacagaagctgagagcggagtggtggttgtcaggggctgggagatgagcggtgcttgggagggcgttggttaaaggtaaaaagtttcagttaagataaatatgttctggagatctattgtacagtgtggtgactgtagttaatgtatacttggaaatcactaagagattagctctcaaatgttctcaccacaaataagtgcgaggtgggtatgttaattagctagatttaatttcacgaggtctatgtacatcaaaccatgtatattgtaaatatat

SEQ ID NO: 53982 - DNA, 418 bp, Homo sapiens
ccctcccttgagaaaggccccagaatcttgctaaattatataatgggctcacaacgtaagtatagggaatgtgctatgaattagcacatcagactcattttcactgataacctgattttacactgtacatctcattgcagatgggatactctgctccttaattccctgttgctggctttttctcagcaaatcagtccaagtgttttaagaatctgaaagggattttttttcttgctacatttatatctgaaatagggaaatatcaatttaccccaagttcagcagactcacattcaacatgggcaaattaacttgctgctgagttttctgaacagtggcaccttaataggtctgccccagaaaaagacaaatggaagtgtttggggagccccttgggtttcccattgtacatgggcat

SEQ ID NO: 53983 - DNA, 782 bp, Homo sapiens
ttggttagtaaccacctcagccataatacttaccatcataggtttcttaaaatgctttttttttttccctaaacttgagtttccttagtgatttcaaaatgaagtataagaatatcagatccagttagcaaaagcctaggacttgtttctccaaacattgtactaacattcaacttgttttaaaattatgactcaagaattttaaaaaattattctggacatgaattaaaacttttttataatataagtatttttctgattgaaaaaaggatataattgacttcactctaattgtcatgtatatttccataagtaaatggattttgaagtatttttattttttgaactttatttaaagcatttgtgatgacatgttcaacttttgcatgtatgtagcctttgaagtaaaaataaataggaatgttaggctcacgttaatatttctagtttctgtttatgatcatggaacatgactagcacacaaagtagatttttgccccagtgaacttctgcaactgtttctgaccctttagaaaataccaactgtgagaaggatttaatttgcctaatgttaaaaacctatcatctaaattactttcagagaggattttgtcagattttggtttggaaattgttttaattgaatatttaatcataatagactttgtatgaactaagctgatttaatcagtttaaaaacctctcattaccttcttagattaaagaagctaaatactgttttgaggtagaaggaaatattttgtggggcatgtgacttttgt

SEQ ID NO: 53984 - DNA, 323 bp, Homo sapiens; identical to SEQ ID NO: 43383

SEQ ID NO: 53985 - DNA, 2603 bp, Homo sapiens
gatgaaggattaccaacgtgaattagaagaagctcgtgcatccagagatgagatttttgctcaatccaaagagagtgaaaagaaattgaagagtctggaagcagaaatccttcaattgcaggaggaacttgcctcatctgagcgagcccgccgacacgccgagcaggagagagatgagctggcggacgagatcaccaacagcgcctctggcaagtcccgcgctgctggatgagaagcggcgtctggaagctcggatcgcacagctggaggaggagctggaagaggagcagagcaacatggagctgctcaacgaccgcttccgcaagaccactctacaggtggacacactgaacgccgagctagcagccgagcgcagcgccgcccagaagagtgacaatgcacgccagcaactggagcggcagaacaaggagctgaaggccaagctgcaggaactcgagggtgctgtcaagtctaagttcaaggccaccatctcagccctggaggccaagattgggcagctggaggagcagcttgagcaggaagccaaggaacgagcagccgccaacaaattagtccgtcgcactgagaagaagctgaaagaaatcttcatgcaggttgaggatgagcgtcgacacgcggaccagtataaagagcagatggagaaggccaacgctcggatgaagcagcttaaacgccagctggaggaagcagaagaagaagcgacgcgtgccaacgcatctcggcgtaaactccagcgggaactggatgatgccaccgaggccaacgagggcctgagccgcgaggtcagcaccctgaagaaccggctgaggcggggtggccccatcagcttctcttccagccgatctggccggcgccagctgcaccttgaaggagcttccctggagctctccgacgatgacacagaaagtaagaccagtgatgtcaacgagacgcagccaccccagtcagagtaaagttgcaggaagccagaggaggcaatacagtgggacagttaggaatgcacccggggcctcctgcagatttcggaaattggcaagctacgggattccttcctgaaagatcaactgtgtcttaaggctctccagcctatgcatactgtatcctgcttcagacttaggtacaattgctcccctttttttatacagacacacacaggacacatatattaaacagattgtttcatcattgcatctattttccatatagtcatcaagagaccattttataaaacatggtaagaccctttttaaaacaaactccaggcccttggttgcgggtcgctgggttattggggcagcgccgtggtcgtcactcagtcgctctgcatgctctctgtcatacagacaggtaacctagttctgtgttcacgtggcccccgactcctcagccacatcaagtctcctagaccactgtggactctaaactgcacttgtctctctcattttcctttcaaattaattgatcaatggctatttttcagttgaggcaaactgtggaaagggggctttgggaaagagtagggagggggtggggctgggatccgggaagcaacacccatttggggtttaccatgttccatccccccaaggggggccctgcccctcgaagtcgatgggtgtcccgcatctactcatgtgaactggccttggcgagggctggtctgtgcatagaagggatagtggccacactgcagctgaggccccaggtggcagccatggatcatgtagacttccaagatggtcttcccgaaccgcctgggttctgccggcgccctcctcacgtcaggagcaagcagccgtggacccctaagccgagctggtggaaggcccctcccccgtcgccagccgggccctcatgctgaccttgcaaattcagccgctgctttgagcccaaaatgggaatattggttttgtgtccgaggcttgttccaagtttgtcaatgaggtttatggagcctccagaacagatgccatcttcctgaatgttgacatgccagtgggtgtgactccttcatttttccttctcccttccctttggacagtgttacagtgaacacttagcatcctgtttttggttggtagttaagcaaactgacattacggaaagtgccttagacactacagtactaagacaatgttgaatatatcattcgcctctataacaatttaatgtattcagttttgactgtgcttcatatcatgtacctctctagtcaaagtggtattacagacattcagtgacaatgaatcagtgttaattctaaatccttgatcctctgcaatgtgcttgaaaacacaaaccttttgggttaaaagctttaacatctattaggaagaatttgtcctgtgggtttggaatcttggattttccccctttatgaactgtactggctgttgaccaccagacacctgaccgcaaatatcttttcttgtattcccatatttctagacaatgatttttgtaagacaataaatttattcattatagatatttgcgcctgctctgtttacttgaagaaaaaagcacccgtggagaataaagagacctcaataaacaagaataatcatgtgaacgtgaaaaaa

SEQ ID NO: 53986 - DNA, 2232 bp, Homo sapiens
  misc_feature (1)...(2232): n = a,t,c or g
gacatcttttgtccagcttggattaacttgacgtgtatccctgcctgacaaggttgaactgaaagatctatatgttaagctaacatgaaaattcatattctgcaacatagtagatttttctaatgcatgaaataagtacccagcacagtaaaaatactctgacttatgtccctaaatggttgttttgatacaactatatagaaaagagccacaaaataaagataaaagttattgtggccatctctgaaaaaaatatataaaatatttaagaagaattatatcttaggaaattatttttacagtgtgtttgaggctacaaacataactcccccattaatacaaattaaatgtgagagctcattctcaaaattttttttgatcaagcacttgtcattttaaatcttgcactaaaaaatggtaacaagagggaccaaactttgcttcccacaattgggatggaatcacctggatttttctgaatgttttanagaattgctgagaggtagaaacagccaagtatgaaatactgatcttggggctaccgcccaggatcaatcagaaagttatatgcaaaatttcggggtcccaacaaggagagaacaatatgtcaaccatttgcatggggtcgatggatgagaaacatgagcgtanaagnagttacattttgcagaaaaatagcggaggcacacccagagtagaagagcagccagcaagctgccatcctgatcaatttgtgatgcaaggttagggagtatgagcaccgcatgggtccatgctagggagatgtgcaccaggcttagctaagaaacttaaagcagtattttaccaactcttgtcttagggagcataaagtttggatgtccctttatttcagcagtgtgaaggtaaatggaagggtgagggtttgacttggtactgattggtcaagaatcctgctggataaagaaaaggaattttagaagtgaccagagggacagtccagccaaactattatttgataaggaacccaaggccctgggaggcaacaggctagcccttagtttcatggctagctgcagagcagattaggagccaacgttgtttgcacatgtcccatcacacctgagatgtcagacatggggaagttcgtgctattattcagttgcctctctggaccatggcaagatttcctcattcatcaaacagactccaggccctgacaaagcagttggatttggcatgtgtgatgaaaacaattagccatccatgtacaacattatgcttactgcatcccatggaaacttaattccctcctagcacatatttgcatactgaaaggtccgaaaagggcatccacggcagcttgagccccttagcaccatgtaaggagcacagcatccaaacggcttcttgagaaccattggggaatgtctttctttttcgcatccaattgtttagtgtctatttattcttgggtggccagttttgaaacctaaaaatggacaataaagcaaaaagtatcagtaaggataggtggctgagacccactgccctgagctactactagtgtgggctgtgcctgtgggtctctagaaccatctgcattggacgtgaagccacagcaggtggctggactgctggcctgttcctaatgagctacgctgggctttgaggtagaggttggggtttatgaacccccaactctggcttaaagatcttgctgtggctctgttatgttctgaggccttgggattagcctcttcctcattacggagctgattttctagtctgtggatcagctatgcctttggacacttctcttttccattgtgccttttgaatgttgtcttctcactcagcatcagcacttcgatctaaatgcagactagggagttgggaggaggaaccaaagtgaaccatcccttcatttattcagtcattcgttcatctgtcaaacacgtatttggacatcaaggttgcagagatgaacaatgcatggatttcatctttgaggagttcaaaacctagtggagagaacacatggtacaatcgtaacacatgaaggacaagtaagtgctgcagtaaaggtactaataacatgttccttggaacagaggaagaaaaaccacgaaaccatggaaattagggaagcctttacagagggtgtgacaaaactcaatttgacattttcaagctatgtacaatgatgtgcaccttgcagatgctcaataaagtaattactgacaactcgtt

SEQ ID NO: 53987 - DNA, 1735 bp, Homo sapiens
acctggatcagcggctgaaactcgagagaacaagtttgccaagtgcctcatgacctgtctcaaatgctgcttctggtgcctggagaagttcatcaaattccttaataggaatgcctacatcatgattgccatctacggcaccaatttctgcacctcggccaggaatgccttcttcctgctcatgagaaacatcatcagagtggctgtcctggataaagttactgacttcctcttcctgttgggcaaacttctgatcgttggtagtgtggggatcctggctttcttcttcttcacccaccgtatcaggatcgtgcaggatacagcaccacccctcaattattactgggttcctatactgacggtgatcgttggctcctacttgattgcacacggtttcttcagcgtctatgggcatgtgtgtgggacacgctgttcctctgcttcttgggaggaccgggagaggaatgacggctcggccgagaggctttacttcatgtcttccaccctcaagaaactcttggaacaagaccaacaagaaggcagcggagtcctgaaggccccgtgctccccacctctcaaggagtctcatgccgcagggtgctcagtagctgggtctgttcccccagccccttgggctcacctgaagtcctatcactgccgctctgcccctccccatgagccagatcccaccagtttctggacgtggagagtctggggcatctccttcttatgccaaggggcgcttggagttttcatggctgcccctccagactgcgagaaacaagtaaaaacccattggggcctcttgatgtctgggatggcacgtggcccgacctccacaagctccctcatgcttcctgtcccccgcttacacgacaacgggccagaccacaggaaggacggtgtttgtgtctgagggagctgctggccacagtgaacacccacgtttattcctgcctgctccggccaggactgaaccccttctccacacctgaacagttggctcaagggccaccagaagcatttctttattattattattttttaacctggacatgcattaaagggtctattagctttctttccgtctgtctcaacagctgagatggggccgccaaggagtgccttccttttgctccctcctagctgggagtgacgggtgggagtgtgtgtgcccaggtgggggtgtctcctggctgggaaggagggaaagggagggagagttttgcgggggttggcagtggagagcaggctggagaggagatggctaatagctgtttaatggaaacctgctgggctggagggagttaggctgaatttcccgacttcctctgccagttattgacacagctctctttgtaagagaggaaagaaactaaacccacccaagggatgatgtcagggggagaggtggagggcagatgtcctgggcaaaccgggcccctctgcccacacacctcacttgatccttttgccaaacttgtcaaactcaggggaactggcttcccagttgcccctttgccatattccaagtccccctcagacttcatgtctctgctcatcagcactgtcccaggatcctggagagggagaacccctggccccaggggaaagaggggggggtctcccgtttcctgtgcctgcaccagccctgcccccattgcgtctgcacacccctgcgtgtaactgcattccaaccactaataaagtgcctattgtacaggtcaaaaaaaaa

SEQ ID NO: 53988 - DNA, 1556 bp, Homo sapiens
  misc_feature (1)...(1556): n = a,t,c or g
taccagctatgacatgattacgaatttaatacgactcactatagggaatttggccctcgaggccaagaattcggcacgagagcgtgttctttttggaaacattggcaaatttggagcgacagatctatgcttttgagggaagctacctggaagacactcagatgtatggcaatattattcgtggctgggatcggtatctgaccaaccaaaaaaactccaatagcaaaaatgatcgaaggaaccggaagtttaaggaagctgagcggctcttcagtaaatcctcgggttaccctcagcaagctgaagtaagtgcatttgggaaggaagttcaggaccagctcatttgaaaagaggggagccaggaagttgggacggaaagttgacacttctccagacttccacaatcaggaaaatgagcccagccaggaggaccctgaggatctggatggatctgtgcagggagtgaaacctcagaaggctgcttcttctacttcctcagggagtcaccacagcagccataaaaagcgaaagaataaaaaccggcacagccccgtctggcatgtttgattatgactttgagattgatctgaagttaaacaaaaaaccacgagctgactattagaagacacattagtgcagaagcttccaggctgtagagccctgcttcccttctctgacctcacaaagataaacatccttcacctgagttcgtggccatccacctctgctctcccagacccagtgcctgtgactttgagtagtttgttctaaatgtggtgacaaacaagtcatttctgtaagacattgggtcttactttatgtcatttttagtaacagaactgcaggaagatcaagacaatgttgtaatcccggcaagttgctaactgtgcgtttctcccttcttagaatgaatgtctcccccaaaactggctggcaccagcttcatctgtgatacccttcaagaaatgttctctggttttgttttatgctgaaagtagaacacaagtcacatttcagatggaggctgtaaatatctggcattttcttatattgttttatgttttcttgtttttctcttgttgtttttatcttattttctttggggtttttttgtaatgcctttgtacagctcatactttcctgctgacatatctggatcatctctttcatgcagttgcccaatattcataactgaaaataatctggtttatcataagtaaaaatgggaaacttgcctctgttttttgcaaggggaggtaaagagtgtttagtaattacctatcttaaatctttctgagttggtagtagattcatgttcaaggaacaggaaaaatggaaaaacataagtttaaatcagttctttttaaataactttttattcttttgtataaataaaatttcacaggcttcaaattctcatgctttacttttaaacccgagattgttttttcacttatttattcatatcatgccttatggaaatttctttttctgtattttctctctttgctggnattcacctgattaaatattgctctaaaaatcaaaaaaaaaaa

SEQ ID NO: 53989 - DNA, 518 bp, Homo sapiens
  misc_feature (1)...(518): n = a,t,c or g
agcagcactatgcctggcatgtaagaaagtgccaactgtcgacagatgatccaaaagatttccttctaagcatctaacactgactgaggtcactgaagaccacactggcaggaatttcagggactgatgacatctccttcccttgtactcatgtttgagagagtaggtctgattcccttactgcaggcccccatgaggtcnnnnnnnnnnnnnnnnnnnnnnnnnnnnnnnnnnnnnnnnnnnnnnnnnnnnnnnntgtgtcaagggagggacctggtgggaagtgcttgcatcatggggacggttttcccctatgctgttctcctgatactgaattctcccgagagctgatggttttaaaagtgtaacagttcccccttcacttgcgtgcttgcttgttctctcttgccaccttgtgaagaaggtannnnnnnnnnnnnnnnnnnnnnnnnnnnnnnnnnnnnnnnnnnnnnnnnnnnnnccacacagaactgagtcaattaaacctcttttgtttg

SEQ ID NO: 53990 - DNA, 441 bp, Homo sapiens
gcacagaggggcgcccaggaggcagtgacagtcgtcgcggaatcctgcgtgtgacaccccgcccctgcccagcggattagggagttgtcctctggtaaaaggatttctgggctgcttccagcttggggccctcatgccctgccctggcaggcctttctacaccgatctgcatctagtggggggtcagcgtgagcagcagcgccgtgagttctgaggccaagaaccttctccacttgagaagccttcctgggggaggctgagtgggccaggcctggagccacgtaccaacactttatacccaggggaatggatcccaagggcccagataacgcccccaacttcttggggttcacacgcgtcctgagacatctgggaactgcctctgcctgggccaaagctattccattaaaactttattgctgtgcttaaaaaaaaaaaaaa

SEQ ID NO: 53991 - DNA, 143 bp, Homo sapiens
ccttagccgagatgtctcaccccactctctatgatgcaacaagaagcccctggggaacgtttcagtcccagtctgtactattgtcatgtgctcatcacagtctggtaagtgctggcatacgattcctaaattagtccattttg

SEQ ID NO: 53992 - DNA, 3998 bp, Homo sapiens
  misc_feature (1)...(3998): n = a,t,c or g
gcagcggttcctgtcaagggggcagcaggtccagagctgctggtgctcccgttccccagaccctacccctatccccagtggagccggagtgcgggcgcgccccaccaccgccctcaccatggtgctgttggcagcagcggtctgcacaaaagcaggaaaggctattgtttctcgacagtttgtggaaatgacccgaactcggattgagggcttattagcagcttttccaaagctcatgaacactggaaaacaacatacgtttgttgaaacagagagtgtaagatatgtctaccagcctatggagaaactgtatatggtactgatcactaccaaaaacagcaacattttagaagatttggagaccctaaggctcttctcaagagtgatccctgaatattgccgagccttagaagagaatgaaatatctgagcactgttttgatttgatttttgcttttgatgaaattgtcgcactgggataccgggagaatgttaacttggcacagatcagaaccttcacagaaatggattctcatgaggagaaggtgttcagagccgtcagagagactcaagaacgtgaagctaaggctgagatgcgtcgtaaagcaaaggaattacaacaggcccgaagagatgcagagagacagggcaaaaaagcaccaggatttggcggatttggcagctctgcagtatctggaggcagcacagctgccatgatcacagagaccatcattgaaactgataaaccaaaagtggcacctgcaccagccaggccttcaggccccagcaaggctttaaaacttggagccaaaggaaaggaagtagataactttgtggacaaattaaaatctgaaggtgaaaccatcatgtcctctagtatgggcaagcgtacttctgaagcaaccaaaatgcatgctccacccattaatatggaaagtgtacatatgaagattgaagaaaagataacattaacctgtggacgagacggaggattacagaatatggagttgcatggcatgatcatgcttaggatctcagatgacaagtatggccgaattcgtcttcatgtggaaaatgaagataagaaaggggtgcagctacagacccatccaaatgtggataaaaaacttttcactgcagagtctctaattggcctgaagaatccagagaagtcatttccagtcaacagtgacgtaggggtgctaaagtggagactacaaaccacagaggaatcttttattccactgacaattaattgctggccctcggagagtggaaatggctgtgatgtcaacatagaatatgagctacaagaagataatttagaactgaatgatgtggttatcaccatcccactcccgtctggtgtcggcgcgcctgttatcggtgagatcgatggggagtatcgacatgacagtcgacgaaataccctggagtggtgcctgcctgtgattgatgccaaaaataagagtggcagcctggagtttagcattgctgggcagcccaatgacttcttccctgttcaagtttcctttgtctccaagaaaaattactgtaacatacaggttaccaaagtgacccaggtagatggaaacagccccgtcaggttttccacagagaccactttcctagtgggataagtatgaaattctgtaataccaagaagagggagctgaaaaggaaaattttcagattaataaagaagacgccaatgatggctgaagagtttttcccagatttacaagccactggagaccccttttttctgatacaatgcacgattctctgcgcgcaaggaccctcgactcacccccatgtttcagtgtcacagagacattctttgataaggaaatggcacaaacataaagggaaaggctgctaattttctttggcagattgtattggccagcaggaaagcaagctctccagagaatgcccccagttaaatacctcctctacctttacctaagttgctcctttatttttattnnnnnnnnnnnnnnnnnnnnnnnnnnnnnnnnnnnnnnnnnnnnnnnnnnnnnnnnnnnnnnnnnnnnnnnnnnnnnnnnnnnnnnnnnnnnnnnnnnnnnnnnnnnnnnnnnnnnnnnnnnnnnnnnnnnnnnnnnnnnnnnnnnnnnnnnnnnnnnnnnnnnnnnnnnnnnnnnnnnnnnnnnnnnnnnnnnnnnnnnnnnnnnnnnnnnnnnnnnnnnnnnnnnnnnnnnnnnnnnnnnnnnnnnnnnnnnnnnnnnnnnnnnnnnnnnnnnnnnnnnnnnnnnnnnnnnnnnnnnnnnnnnnnnnnngctcctttattttaatccctaaatataatccctaaatatagttatatttcatacttagtttgtttttaaaaagttttctctgtagaaaattttaatcattcataccctttacctttaggtttttctttctatacattcagtcaggcactgggatcatctgtttacaggcattatatttatttggcactcctggaacaagtatatctaacccattcttgatttttggactattcaggtgaactatttgaggggtatggggtctagaagttaaaagatacgcatgtcttctgttcttttcccgtatcaattcattccttcatctctttgccaagttgttttcctttcagggcctgtccttccagtttagaacagtaccatgaatcccacttgtgtcaatattaaagatagctgagaagcacctttcaaatggcacagtccctcttcaagatgtctaaaagaatggttatgtctgtccagttagggatttcacatccacatgtaatcatgtctgctgctgttgctacccaaattttcatttctccacattttgggtacttaagctaaaacgtaatggccacagtctgtaatccattcacattcctcagtttcaccacctccctcttccagactgcactctctgtcatcagtcccctcctttctaacagaaatggggttatggattttgaaggctgtgggttcaggggagtctttgccaatcctgttgggccctaaactatcaaggaggctccatttcaccatttgattttttggcatttcagggagggcaactgattgtttcggatatgtacatattacttcacggtattaccccatttccttccagtcaggcccaacattttccaccagtctgtccccatctctgaaatccttccttctctttccccctaagtcttttgagtgtcatcatgtactggtggtttctcggttccatctcatccatttccttttcaatggagactacagcgtcagccagctcagccttggcttttaactcaatattccagtccataggggtggttaaaagttgctgcaaggctgcaggcactggcagtgggaagaggcagacgactagatgacttctgcacttttagctggttgaaaagtaccactcccactctgaacatctggccgtccctgcaaagagtgtactgtgcttgaagcagagcactcacacataaatggctgtgtgtggaattgcttgccaaagaagtttctagcctttccctttcccctaactgcatcagggaagaattcttatctctagcttggtttccacatgaggtttttctgagaagggcttgggacaagaagtctgtcatgttagttaagcaggcaagaaatcctactaatccagttttgtttgaaagttgtttgtccgtatgattttttaaaagtcaagtttaatttcaaaaaaccttttttttctgagattacttttggggtaatatttaaaatgagagacattttgtaaccctgtaaaatacatagggaatataacattccagtgtatacaaagaaggcaaattctttaatcaaataaagcgcattataaaatgagatgtttattggattattgactcactttggtgtctgcttgttgattcaggatgctgtaatgggacctaacattaaaaattaatgacatgttttttttaagagaaaaaaaaaaaaaaaaaaa

SEQ ID NO: 53993 - DNA, 582 bp, Homo sapiens
aattcggcacaagggaggctttgaagacaggtggtcacctggacctggggtaagggtgcgcagggaggccgggcttgggggcagcctgctgctatgtccttgctggcgcccatacctgttggactgcctgaactttgctactagcctgaacgacagtgccttggaaaggcaggctccatgcggcacgaacaggattgtcttcggtaccttaaatatgctccctgtgcttccccagggaggatctctgggagcagagggcggctgtagacatcacagctgaagaggtgacctcaggccctgggagcctcagctccctctgccctgtaccctaggcacgtggctccagcaagagccccaggcaggacaaagggagcaggcagcagctgcagaaacagccctagacaggtgctggcctcaaccctggcaggggagggggagcccagagtgatgtttctcctaaggccaaacccccaggggtgggtcatttgagaggagttccagctgttctggccacactgggctggtggggaaggagcggcggcctctttccttggagggtccctgattcctgaggatcctccg

SEQ ID NO: 53994 - DNA, 337 bp, Homo sapiens
gattgaatagctcttctctgttgccattaaatagaggatatggcagagaaaggtgcaaaacagaaatgatgatcaggatgacagagtagctctaatgctaggctacatttcaggagggagagcaatgcttcctactgactcacacacattctccctccattctgaagtgagtactgcggaaaggagccttggccctccagacactgaactgtgctccagacatcctgctacacgtctcataatttgaatatataatggcagacagggataaatgttatggaagcaaagaacccttctttgtgtggggtggcagagaagggtgagcatctctagccag

SEQ ID NO: 53995 - DNA, 425 bp, Homo sapiens
  misc_feature (1)...(425): n = a,t,c or g
gaccccatccaccttcgatgcaagaaagaggaggacagagcctgtcgggaaagcccaacctggctctagaaggctccttgcaagcccagtggctggtccttccagcctgcctggaactaccccttcacagaaccgcaggcctctcccaggaagggatggccaatggctgcgcctccccttggggatagtcctgggggatggtggctctcctgctggtcctctgtgtgtggtctggtgtcggtgccctacagaatagatccatgccggggttgtttatgtacaatccttaattggncatgtcggtttcttgttgggggaaactnatggaattgancaagcaccccnggtctnnntngannagttgnnnncnnaagggggnaccccaccccaanccttccctttcccaccngngggntcanntgggg

SEQ ID NO: 53996 - DNA, 5800 bp, Homo sapiens
aaaagacctgagaacctggtgtagttacttttggtgacgctgtccagttcccacaatgtatcattccttatctgaaactagacatcctctgcagccagaagaacaagaagtaggcattgaccccttgtccagttactctaacaagtctggaggagattcaaataaaaatggaagaagaacaagttctactttagactctgaagggacttttaattcctataggaaagaatgggaagaactatttgtaaacaacaattacttggcaacaataaggtagaaggggattaatgggcagctgagaagcagcaggttccgcagcatttgctggaagctatttctttgtgttcttcctcaagacaaaagtcaatggataagtagaattgaagaattaagagcatggtatagcaacattaaagaaatacatattaccaacccgaggaaggttgttggccaacaagatttgatgatcaataatcctctttcacaggatgaagggagtctttgggacgaattcttccaagataaagaacttcgatcaatgattgaacaagatgtcaaaagaacgtttcctgaaatgcagtttttccagcaagaaaatgtgagaaaaattcttacagatgttcttttctgttatgccagagaaaacgagcagttgctttataaacagggcatgcacgaactgttagcacctatagtctttgtccttcactgtgaccaccaagcttttctacatgccagtgagtctgcacagcccagtgaggaaatgaaaactgtcttgaaccctgagtatctggaacatgatgcctatgcagtgttctcacaacttatggaaactgctgaaccttggttttcaacttttgagcatgatggtcagaaggggaaagaaacactgatgactcccattccctttgctagaccacaagatttagggccaacaattgctattgttactaaagtcaaccagatccaggatcatctactgaagaagcatgatattgagctttacatgcacttgaacagactagaaattgcaccacagatatatgggttaaggtgggtgcggctgctatttggacgagagttccccctgcaggaccttctggtggtctgggatgccttgtttgcagacggcctcagcctgggtttagtagattatatcttcgtagccatgttactttacatccgagatgctttgatctctagtaactaccagacctgtctcggccttctgatgcattacccattcatcggggatgtacactcactgattcttaaggctctgttccttagagatccaaagagaaatccaagaccagtgacttatcaattccatccaaatttagattattacaaagcacgaggagcagacctcatgaataaaagccggaccaatgccaaaggtgctcccctgaatataaataaggtctctaatagcctgattaattttggaagaaagttgatttccccagcaatggctccaggcagtgcaggtggccctgtacctggaggcaacagcagtagctcctcctctgttgtaattcctaccaggacctcagcagaggccccaagccatcacttgcaacagcaacagcagcagcagaggctgatgaaatcagaaagcatgcctgtgcaattgaacaaagggctaagttctaaaaacatcagttcatctccaagcgttgagagtttgcctggaggaagagaattcactggctctccaccttcatctgctactaaaaaagattccttttttagcaacatctcacgttctcgctcacacagcaaaactatgggcagaaaagaatctgaagaagaattagaagcccaaatttccttccttcaagggcagttgaatgacctggatgccatgtgcaaatactgtgcaaaggtgatggacactcatcttgtaaatattcaagatgtgatattacaagaaaatttggaaaaagaagatcaaattctggtttccctggcaggattaaaacagatcaaagacattctaaaaggttccctgcgttttaaccagagccagctagaggccgaagagaacgaacagatcaccattgcggacaaccactactgctccagcggccagggccagggccgaggccaaggccagagcgttcaaatgtcaggggccattaaacaggcctcttcagaaacgccagggtgcactgatagagggaattccgatgacttcatcctggatttccaaagatgatgatgggagcagtgccaggggctccttctccgggccaggcccagcctcttcgcaccctcagaagcacctctgggaaaagccaggccccagtctgctccccactggtgttctcagatccactgatgggcccagcctcagcttcctccagcaaccccagctccagtcctgatgacgacagcagcaaggactctggcttcaccattgtgagtcccctggacatctgaccacagtgcccagtcctgccccacagggatctagccacccttcagtggccccaaggccagactgaggctcatccagtggagaaccttcttaaaccactgcttccttcccggcatgcatttggcattggtccagccctttgaaaccccttagagagaagcatatatggccacaaagcacagaggcttaggtttgccacatgcagacagggctttctgggcccttacctaatccccacccgactcttgctctgagttagagctgagttacgtacccagtatcacactcacagttagaaaagaccgaatcacaatttagaatcacttttcctctgtccccttctccccagctaagaatgtgtggcacctccatcagttatacttagaaggagcagaaatagttattttcgtatcttctatccctcaaagcatcagacatgggaaaattggtttataccaagaaagcttcctctgtggaaatctgtctcagcctactttattcctgcattgggaagccatatcgcagagctaaatgcaatagaatgaaccagaactagtggattccagggctgggggaaaaaaaaaaaagaaaaaacctcattactgacctctcaaagttataaggatctctgcaaacaggatctaagcttaggaataatatttaggtgtgatatagtgttagatttttttgatgtattaaagaatgcatctccaatccttaggccatatcaactttggccatcaatatctctccttaaacaattatatttcaccttttagaatctttcatagccagaaaacaagattactgtaagccagttttagctgcactgatttcaaaagatataagaatattactatccttcaaatggaaaatgcgaccttgactttatgggataaacatctttcagacagtcagttttctagtcaggtttctctggtttcagagctgtatatacctgtcaactgaggaataaagggaaaaacccaagttcattcccacccaaagtcagaatccctcattggccttaaggtagcagtcataagacagagaattggacctagagtcccttctgtggggaataaggatacctagagaacattccacatgccaagaggatgcaggatttctacacaaccccttcccttcttggaagtcaagtgtaggtactgcagggcctgtgctcagctgtgaaccccgtatcctgggccccactgccgggaccgggtctgacatgccagtgccttcctgggctgagcacagattagagactctcccccttgtcagtcagcaccttaggaaaccatgatgggcacagagcatcacatgagctgtttctctccttaaagaagatccctggaaaggatgcttttcctctcctttgcctgcgcaggaattctaacaggagtgggtgaggatggcagagggacacagtgcctgtctcgcctccatcagggagagcagccatgccagggatgactagctctttgagcctgtcctcagaggatggcgaggcagccgggcagtggaggccttcatggtaacaaatgaaagctcagtatagaggaacagacactgtttacgtccctcccactgctaaccttatatatctctatagacaaatgtgataatgacatgatttcccacctgccctccaagaaaatggtgactcactctcaagtcagctactgtagagagggttctaattggttctgcaatttgctcttaaactctagcagggaactctcctcttaccacatcagcatgtaaggtgaataataactctggttttgccagacagcaggttgtctgaccttcaaccactggggcaattgcctggcagatgcacacagtagctccctggcttctggctctgagtgttcctctcagcacctctgagtaagctgctgccaagcacatatccctatgacaacactttgtaaaagccgcggggcccccatacagcgagtgaccttgcaactgtgcagggttgccattggtcactttctcaccttgggaaggtgtcagtgttttcagttctaaggtaagaggtgtagagctgttcccaccagggctctgggacagactggaaaggaccacagacctggccatccctgggcagcagggccagtgtcacctgctgacctctagtatttcctttgccctagagctagagtcatgatagctgagggtcactcgccctgcaagagtcactaggcacccaccatgccaataaggctctccgctggctccctgcagttggctgggtgtttaatagtcactgaaaactcccagccctgctgcacactagaggcaggtcctctcggtcctctccatcctgtgcttctgtggcccccagcaagctcaccgcctccttggaggagagagacatacaaggacagtgggtcatgggtagtaccagcctcaaattcccacaggctcatactcagacaattgtattactgccttatgttttttaagtgtttttttaaattcttcatagttgagtattatttgcaattttattagttacagtgctattaaagaatatgtgctcctttttattatattatcagatacttatgtttaattgtacattttttaaatcctgaatatattgtgttttgttaacaaatgtaatcagtgggaacccttcttacgttttgattattagcagttaaatacattttgtatacatgaagcttagattaattcccatcatcatcatctcctgtttttatatgtgtccctatgtgtttcatgcattcctctttgatcagattggaatttgagttaaaatttagctttgtacattacgtgtgagagttacagactagcaagtctaattactttgccttaccttgagtgtatgccacagggtcagataacacattaaacatttagttacactggattactcttccaaagctgacctcctgctaatgttcagaggtaactgcaatccggaaagaaataatatcactgcagaaagaatgtgactctaaaaataaaccaggacctccctgtgatttgccttgcctgcagatgaccagttgactcttgtgctgtcagccctggggttgctaaggaagctgcttcagggagttgggggttagttgcccgctctcaacaggaatgcctcctctactttgtcagagatgctgaacaaatatcaaactctgtggcagtcatgctggcctcctaagaataacctgtgagtcagagttgatgcacattatttttgtttttattttatttttttaaggaactgctccaagggttcattatagaacaggagtgtgtacggaggacttaggtccccacatagagtggccgttctgtggcggctccaaccaa

SEQ ID NO: 53997 - DNA, 693 bp, Homo sapiens
ttttttttactcttccacatccttttatttactattttctgatttttaaaatgacagtggcaattaccatttatactgtgttatttgtataagctgttaaacacaacattgttaaacacaacgaaaattcatttttctacctgaaagctgtatcatagaaaattattttcaagtttatattcaacagcttaataatgttcaaaccagggctgggcgcggtggctcccagcactttgggaggccgagccacggcacccagcctaaagcaatgttaggtttcaagaaaaacccaagcatagccccactagtttttactgtttccctttattatattgcaatctgcaaaactatttgtattcagccaagtatctatgtccagttttaataaaatagtagcctaagcttacaaaatagacaaattaagcagcaactgttgattctgagtaagtctgtatgctatcaagaacacaagaatgcaggatcatgggaaatgcacgcaaatcctgttgaagcaatgcatgcttcaacaaccactgaccactttgcataattgactccatcaatgaatctgtaatttagcttctaatttttcataattgtgcatttatggtagtatgcttcactaactttaaagttaaatgtaaattactgttataataaaaacatctgttgtacaaataaaaaaaaaaaaaa

SEQ ID NO: 53998 - DNA, 896 bp, Homo sapiens; identical to SEQ ID NO: 17556
  misc_feature (1)...(896): n = a,t,c or g

SEQ ID NO: 53999 - DNA, 439 bp, Homo sapiens
ctaataggtaagattaaacaggtgacttaaaaacagtgttgtctgacagcatgaaattaaatattaggtggttctgatttctaactaataaaactctttcagtgtcaaatattaacccctcgccacctcccttattttaagttgaatgattcttattcttagcgttttattatagttttcttttgcaaaactcctaaattgatactttagctttattagcaggtcatttaaatgattagtcttatttaataacttagtgttgatatcgtaaaactgctgcttatagtacctgccgaacctctgatagctgcttaagactctgtaaaaatatgttttagctaaaagactaaattttgtgtcttttttcttgataatctgatcaaacatttaaataacatgacatcttaaagatcctaagcttatagtatattatcatcag

SEQ ID NO: 54000 - DNA, 965 bp, Homo sapiens
agccacctcagcgcagtggaacggggcccagggggaggcaggagaggagggttccggtcccatgtcaccttctcatttgctgtgtgactttggcccactcacattctctttgggcctcagttttatcatttatacaaggagggcttttctagctgtaacaatctgtgaggattgagaggataggctggtgctttgaagaaaggccttgtaagtgacaagacagtcccctgggaagaaagagaaaggaaatgggctattgccaaaggacaggtggcgttagatggctgtgagggtgacctggtgagggaagggttggaatgagctgctgcaggaggccaagggatgcctgggctgggctgggctgggctggcttaggctcaggattgcctggggacagtaggagcatggcaggagctggggcaggtgcatagcagtgcagtgggaagggacagaggagatcttagaattttgaggaaaatctgggacttgagacctggattctaacagaccaactgcatgtgtgtctgtaggtctcagtttccacattcatacagtgagggtgttaagtcaggtagctggagacttcccatcgcctctgacacttttggaggtgatatgatacagcccccgaccaaaccaggctttgtggggggtgagagaatacagacacaagtggcaggattcagatggaagcttcgcaaggctgggggccgaggaccacccacttctctttcccagccctagttctgggttccccagtgggcaaaggggtggtggaggcagtgcccatgctgggctgagcctgcagtttttgtgagctctgggcttgtctccatgggaacaggggtgccttcttagttgagctcatttcacacagatcgagggggtatgcgtgggggagttgtgagtgagctcagctccttcaggcctggcctctcccagaacagagtgaagcccctgccctg

SEQ ID NO: 54001 - DNA, 674 bp, Homo sapiens
  misc_feature (1)...(674): n = a,t,c or g
cagggagacacctgtgtttccagggctgggactgacctcacaggatcactgctggctctgctaacaaccccaaggacaccaacgtttcccattctgagtacttctccgcaaaccctttgtttcattaaggactgttttacatgaagggtgcaaaagtaggataaaaatgagaaccctagggtgaaacacgtgacagaagaataaagactattgaatagtcctcttctctacccatggacttggcatttttatattcgattttaaggaaatataacttagtagtaaagagatgagcattcaagtcaggcagacctgaatttgggtcaaggctgcgccactcaaaagctatatgacctctatatgagcagcttattcaacctcttttaacctccattttgtcatctgtagaatgatgataaatgcctagctcagaaggattcctaatgaataaatgagtgacagtgcatgtaaacagactagcttaattaatattaatatgattaggatgtnnnnnnnnnnnnnnnnnnnnnnnnnnnnnnnnnnnnnnnnnnnnnnnnnnnnnnnnnnnnnnnnnnnnnnnnnnnnnnnnnnnnnnnnnnnnnnnnnnnnnnnnnnnnnnnnnnnnnnnnnnnnnnatttttttaaataaacgatatttctagaaaaaaaaaaaa

SEQ ID NO: 54002 - DNA, 737 bp, Homo sapiens
gtcacagcctgatttgtggccaggctggacaaattcctgaggcacaacttggcttcagttcagatttcaagctgtgttggtgttgggaccagcagaaggcaaacgtccagccaacacacaggactgtaagaggactctgagctacgtgccctgtgaagacccccaggctttgtcataggaggtcgttcagcttccccaaagtcagaggtgatttgatttggggaagactgaatattcacacctaagtcgtgagcatatcctgagttttacttccttatggcttgccctccaagttctctctctcatacacacacacacccttgctccagaatcaccagacacctccatggctccagctatgggaacagctgcattggggctgcctttctgtttggcttaggaacttctgtgcttcttgtggctccactcgcgaggcagctcggaggtgtggactccgattgggctgcaggcagctctgggacggcacagggcgggcgctctgatcagctcgtgtaaaacacaccgtcttcttggcctcctggccagtctttctgcgaatagtcctctccctggccagttgaatgggggaagctgctggcacaggaaggagaggcgatcccggctgaggcttaggaaattgcttggagccggctccaagcagataattcactggggaggttttcagagtcaaacatcattctgcctgtgttgggggccaggtgtgtcacacaagcatt

SEQ ID NO: 54003 - DNA, 946 bp, Homo sapiens
gcacgagttttttttttttttaaatggaataaacttttaatcatacagagaaaataatttttgagaatcaggacaggatcttccactgtgttctcttacaatgtagatgtcttggcgaccactgtccccagaggaatgaaaatccacctttaaaaacagaaccttttatacagtttatacagcacaaatcacaaatcactttagaaacaaaaatgtgttatcctaaatttaaaaaaaaaaaaaaaaggaagcgagaagagagagaggaacggagtattttaatgctatcagtttctattcaggcttgatacaacataaagaagatgtaaacatttaaaataaataataaaataaatgtcaatttcttctccccctccctttcccataaccctctcaaaatttgatccagcccctcctgaacatgtcgtcaagcattggataaattaaaccccttggttgatgtatggccaaaacactagaagcataagaagatgccagattcatagtgggatgactgggtttccttttaaaaagctacaggacacaggcacgcctggaaatgtatacacacatgcgcacacacacagcccaacctgtcaataaatagtgagatgctggcttttaatatgaatgccaaaacaactcaacaagcagaaggtagcaaagactccttaagttttttaaagaaaattcacacatcacatattctattggtccccaaattctctaaggacttgggttacccctctgaccatctgaggagtgcacgggagcacatggtggggtagaaggagaagtatggagtgggagaatattgtaggggataagtccttgagaacaaacatcagactgaaggcaatcttaccttggatcttgaagacagaccttctcacctctaagtgtttctgtttatccattacttaggggccttttataaagagatgtc

SEQ ID NO: 54004 - DNA, 961 bp, Homo sapiens
  misc_feature (1)...(961): n = a,t,c or g
aatcagtccttttatagctttctaagttcttattgatggctaatatacaagggttaatttttaatattttaattgatttctttaatcagtttctcgacttgtatttattaaatactcaaactcagtattacctactcaatgccttttaaaagaaagttataatggagaaaaaattgagccttaaacaaatggttacttctgtatattacctcgtaccagtgcttcatcctatttgtaaaatctttctcctttaaaattattggttaatactttgagactttgtttacgtgtggcagtgttgtaaaaagaaactaaagatcacattttacctgtatggatggaatatcccttttcttcaagtgcagtttgtgatgtgttttgtttttttttgtttttttctgtaattaacatgttctgaaggttacaattgatatttgaaattgactgtagagcatttagttgaagagttaagcattcagttccattaggttttcacatgtgttaatctcatttacagcattgaattgcggcagtaacattttcctttctgtgaagttctaaatttagttatgacctatttagcaatgcctttgaaaagggatattgtatccatggtaaattaattgtatacctaaacagagatagctcatctttgcctatcaggcttgtaattgacatctagtagacttctgcacatgtaaaattgaattcaaataaaatcatacacactttctagttcttaatatttgtctttctgaataatagtttaaagcaatatttgttaaagttttcttgcactatcacaattgctttttagttatttctcaagaagcatgttcgtattagagacaaaatctgtgtaacaggagggagaatagcgccaagtctctgggctattttttattttttgcaaatgtgctttctaatagccattggctttcatggtggttacctnatcaaa

SEQ ID NO: 54005 - DNA, 462 bp, Homo sapiens
cctgcctggcctgagacctccaggggtcagaggggcatgcttactgtccaagcccctgcgtggggtgggcctgaggacaccaggggaactgggcttggccttggtggctatgggtggcagagccaggtgtcgaacaccagcaggcacagctccctagcctggcccagcccttctgaggcaacagctcaacttcctgtggtctgccctccccacagctctgtgatcagcagctgcccgggcctgctctacctcaacctggagtcctgccgctgccttccccggggtctgaagcgggcctaccggggcctggaggaagtccagtggtgtctggagcagctgctcaccagcccctcacccagctaggcagccacagacctgggacacctcagccagcttgcccaccctccacctttgcccaatttcagatatttgagcattttgttaaaaaaaaacatttttagg

SEQ ID NO: 54006 - DNA, 436 bp, Homo sapiens
ttttttttttcctaaaaatgttttattttaacaaaatgctcaaatatctgaaattgggcaaaggtggagggtgggcaagctggctgaggtgtcccaggtctgtggctgcctagctgggtgaggggctggtgagcagctgctccagacaccactggacttcctccaggccccggtaggcccgcttcagaccccggggaaggcagcggcaggactccaggttgaggtagagcaggcccgggcagctgctgatcacagagctgacagtgcttggtgtgacccgggtgcccctgaggttaagagagcacagggctgggtgtgagcccccaggggtgcttaagaaggcagccagggcctgctccaggtccttctcactgaacccctggccactcaagtccagttctcgcagtgtatggcaccacttctgggtcaaaaaggg

SEQ ID NO: 54007 - DNA, 433 bp, Homo sapiens
cggacgcgtgggctccaggattcttttagccactcccagctatccttatggattcccatcagagtcatgaaaatgcagatcctcaaagacctcatgctccccaggcctctggggccttgcacaggtgtgccctctcgcatgcccttcttcccttgtttaccttttaaactcttattcatctttcattcttcattctctgtaaaatcttctctgattcctcaaattagaattaaaggctctatctatgctctgtgtttcttggagggcagatgggatcttattttatcaatctctatagcttctactagccagtgcctggctcatggtgagacttagtaagtacttgttatgtgagcgagtgaatgaaagagtgaatgagaaactcaagggtccaacaaataggaataaaaattcttggggacagcaggaatag

SEQ ID NO: 54008 - DNA, 1291 bp, Homo sapiens
tttttttttttttcacggaaacagccgtttttattccacaaacagtaaactccatccactacacagtgacatacactgtgtagcacaccccatcaccttgggccagtgctgccagccgacctttctgtggtgatggaaatctttttctgtgctgtccaatacagcaggccaccgaccacttttgcttattgagcacctcaatatagaggtggccactacaggtgaggaaatgaatttctaagttaattcaaattcaaatgccacatttggctcgtggctcctgtactggacaacacagctgtaggccctgacctggtccagggcactttggttcaaaagccaactctgaggagagcaagtggcagaaacagcccttgggctcccctccccagagagaaacgggcagctgcagctgctggaaagggcaagaatcagagtggggggacacctcgggcgcgccggataaggttggccagccgcttggccaggccacctgtgcggggctcctcgatgtggaaggttcgggtgaggagattgtagaaggagccgtagcacacggccaccacagtgcacgtgaggcagatcacgttgtagggcatgctgaagtccggtgtcggcaggttcaccagcagcggctccgtgtagagccgcacaaagtagttagagccatcagagactgggaacaggctgttgaagaggggactctcttcccagtccactggcttggctgctaccatgctgggcacaagggcgctgaggacagatgggctgacatagaagccatggttaggatctggcgtgtactcggtccacttcagcagcgcccgctcaaactggatggaaaccttggtgactgagttggccggcagctgaatcagcatctccaggaggtggggttgcagccggtcctgggcaggctggtagtggatgtaacttggtttgttctccttgcccttggaggtgatggtgagggtgtgcacatacagccgcagataccagggtacggtgtccagcagcagcaccgggaaggcccggtatgggtgggtgttgtacagcagtgtgctcagctcccccttctgcagcccatagccactcacgtaccgctgggcatgcaggaagggcactgggggggcctctgtgtaaagaaatatcaacagttaacagctgccaaaggtaagaatcactccccaccccacctgcccaggccatgttcagagtcccaagccagtgagtagatgggggaacagccctgccactgaaactgggcaatctgggttctggaatcatcccc

SEQ ID NO: 54009 - DNA, 1450 bp, Homo sapiens
agagagagcagctccagagagctcgactgcagcagttcttcaggaggaggaacctggagctagaggagaagggcaaagcgcagcatccccaggccagggagcaagggccctccaggcggccaggacaggtgactgtcctcaaggaacccttgtcttgtgccagaaggatttcttctcccagagagcaggtgacaggcaccagctctgaagtctttccagcccagcatcctcctccctcaggcatctgcagggatctgtctgaccacctctcctcacaggctgggggccttcctccacaggacactcccatcaagaagccacccaaacaccaccgtggtactcagacaaaggcagaaggaccaacaattaagaacgatgccagtcagcaaaccaattacggagttgcagttctggataaggaaatcatccagctttctgattacctcaaagaggccctacaaagggagctggtcctaaaacagaaaatggtgattctccaagacctactgtccactctgattcaggcctctgacagctcttggaagggacagcttaatgaagacaaactgaaggggaaactgagatccttagaaaaccagctatacacctgtacccagaaatactccccttggggaatgaaaaaagtactactggagatggaagaccagaaaaacagctatgagcagaaggccaaggagtcactgcagaaagtgctggaggagaaaatgaatgcagagcagcaactacagagcacacagcgatccctggccctggcagagcagaagtgtgaagagtggaggagccagtatgaggctctgaaggaggactggaggacccttgggacccagcacagggagctggagagccaactccacgtgcttcagtccaaactgcagggagcagatagcagggacttacagatgaaccaggccctgcgatttttggaaaatgagcaccaggaactgcaggccaagattgaatgcctgcaaggggacagagacctgtgcagcttggatacccaggacctacaagatcaactaaaaaggtcagaggcagagaaactcaccctggtgaccagagtacagcagttgcagggtttgcttcaaaatcaatccttacagcttcaagaacaggagaaactcttaacaaagaaaggtcagcaaatttattaccacaaattctaagatattgctcttctcttacctgcctagaggcagcgggatggactacatgacctcctggagtcccagccagttctgggagtctgttaagtccgggatgtgtgggagctttttaaggactgatcattggctctgaggacacttcaactagttagccttctatcttgaggtatataaactgtgaaaaagggtttctattctctctgaaagcacatgtctgtgttgaacatttcaataaatttattttgaactcagaaaaaaaaaaaaaa

SEQ ID NO: 54010 - DNA, 1652 bp, Homo sapiens
  misc_feature (1)...(1652): n = a,t,c or g
agcatccagcggcggccanagtntccagtccgttgctttactttttgcttcaccgacatagtcattatgccgaagagaaagtctccagagaatacagagggcaaagatggatccaaagtaactaaacaggagccacaagacggtctgccagattgtcagcgaaacctgctccaccaaaacctgaacccaaaccaagaaaaacatctgctaagaaagaacctggagcaaagattagcagaggtgctaaagggaagaaggaggaaaagcaggaagctggaaaggaaggtactgcaccatctgaaaatggtgaaacttaaagctgaagagatccacatctctcgctcaactgttaatgtctcaacctccagaggcaccccacccagcacactgtcagtaaaggggcagattgaaacagtgagagttaagggcacagaaaactgaatctgtagataacgagggagaatgaattgtcatgaaaaattggggttgattttatgtatctcttgggacaacttttaaaagctatttttaccaagtattttgtaaatgctaattttttaggactctactagttggcatacgaaaatatataaggatggacattttatcgtctcatagtcatgctttttggaaatttacatcatcctcaagtaaaataaatatcagttaaatattggaagctgtgtgtaagattgattcagcattccatgcacttgctttaaaatttagtcctgtgcatactgtggtgtttttactgtgcatatttgaatttttctgcagacaagtaaaccttttattttaaaccacaaatagtcagcaggtggccacaactatccatgtttcattaaaatcacataaaacctaggtacaaaagcaccactgattattgctctagaaaaactgcatgaaaaattcaaatatgcacagtaaaaacaccacagtatgcacaggactaaattttaaagcaagtgcatggaatgctgaatcaatcttacacacagcttccaatatttaactgatatttattttacttgaggatgatgtaaatttccaaaaagcatgactatgagacgataaaatgtccatccttatatattttcgtatgccaactagtagagtcctaaaaaattagcatttacaaaatacttggtaaaaatagcttttaaaagttgtcccaagagatacataaaatcaaccccaatttttcatgacaattcattctccctcgttatctacagattcagttttctgtgcctcttcagctttagtttcaccattttcagatggtgcagtaccttcctttccagcttcctgcttttcctccttcttccctttagcacctctgctaatctttgctccaggttctttcttagcagatgtttttcttggtttgggttcaggttttggtggagcaggtttcgctgacaatctggcagaccgtcttgtgggctcctgtttagttactttggatccatctttgccctctgtattctctggagactttctcttcggcataatgactatgtcggtgaagcaaaaagtaaagcaacggactggaacctgctggcgccgccgctggaatgctgcctctgccgctgcagctgctcacgcgcagggcacgacgtagcccggcctcttcgacctgcacctcc

SEQ ID NO: 54011 - DNA, 714 bp, Homo sapiens
catgaagggttttgctatttccaaagcttccccttatcgtcccctgtgattatctcccaaccccgtgacaaaggtagagcaaatattgttcttcccattttacagattcagaaaccaaggctaagggactggtctaaagtctcacaggtagtatatggtggagccaacacttgcactcagacctttttacacaaaatcccatgatttttccactgagacaaatcctaggctcctgggaggccctggcagaagccagaacacatggctgggcctttccagcccaacccactgtcttgcagtggacggagagccttggcgagggcagcagggtagagaggacaaagaatgtggggctggtttctgccctttaagagcacccggtcagtcagagaacagagatcacacacaccaaaccagacagaggcagggcagcatggagacaggtagacacacctccaggtccctaagctggggacagagaaggttctgagctgtcccatactcccactttgtgccaaatgactttgcacctgcaaatggtgcttcaatgtcgtttggtatctttaagctgtgatgttgtatatatacaatgcctcccagctagactgtaagcccttgggtgacaagggctgctgccatgtctgggatggcgttctgttgtgtacgtgccttcaactggtcgtgattgggtaagcactcagtagtggctgagtt

SEQ ID NO: 54012 - DNA, 457 bp, Homo sapiens
ccacgcgtccgaatgcttataaaggttaccacatgactagggtacagccagatttggaaaccatagcttgaaggcagtgagggagccatgaaatggtttttaatagggggactccagatcagatgtgaacttaacctgtttctggctggctagccaaccagcatggaaaacagattaggttagatgttcatgctgtatgtgcccgtgcctgtagcttccctgttaatcagcttcttacactactatatttgcttattttgtctctgaataagctttaggcaccacaagggtgggcctggggatattttgcttaccagtatagcccctgcaaaaaagcacagtgcctgacacaaaacaggcacccagtaaagtttttgaatgaatgaatgcatgagtgaatccatttgtgagagagcgaatggagatgacaagattagctaggagactggaaaaagac

SEQ ID NO: 54013 - DNA, 400 bp, Homo sapiens
ggtgattccacactgaggcgagcgcggcggccggggtggtagtggcagtgttcgtgtgctcaggtctgaatcgccgagggaggaggcggtggaggaagaggtggcggcggtggcggtggtcgtagcggtggcggaggaggcgggtacgaatcagctgcgggcggagacatggccaacatcgcggtgcagcgaatcaagcgggagttcaaggaggtgctgaagagcgaggaggaggaagataccaactagagataaaaataccagaaacatacccatttaatccccctaaggtccggtttatcactaaaatatggcatcctaatattagttccgtcacaggggctatttgtttggatatcctgaaagatcaatgggcagctgcaatgactctccgcacggt

SEQ ID NO: 54014 - DNA, 332 bp, Homo sapiens
gacatcatagtcacctggggagcttttaaaatggttatgtccaggctgccctccagaccaattaaatcagaatctctggagctgaggcccagactctcaggtaattccagtgtgcagtcaaggttgacaactggtggcttagaacagagtttctcaaaccttaatgtacccacgaaacacccggggctcaggttagagattaaattctcattgagcaggtctggagtggggcctgctatcctggagttctaataagctcccaggtgacactgatgctgctggttcctagaccacacattttaagtagcaaggacttaagagaggatgccagc

SEQ ID NO: 54015 - DNA, 1221 bp, Homo sapiens
tgcaaaaaaataggatacgcttttactggttggtttaatgagagagaaccacttttggccattatcaccttacgttactacaaatcctgaaaggaaagcagctttgagtcttgggctcggctgaaccccctgcatggaccggggctaacagtaccctctacgactcccacaggtctctctttgtgtccagatggatggcgactgtgagtcagcaacgccagccaagacttcctcgcctttaccgtggcattggggcagtttttcaggctctctacggagagagaagtgggccagtaagggagagggctagagagaggacaccagtttacatagggttgactttcacttgtgtgtagtagcagttcagaatttaaaagaaatttccttgcagaaagaatgtcttcctcttggcccctcttaattttttatgtttttatttatttttaatctttggcagcatagaactgattgtggtcctccgatgcatttctggtgtcgagaacttcctttctcaacctccccttcccccatagccatccccacaagctgtcccatcaaggaatatttcaggtgtaaactgaatatgccacgaggcctcctcttcatgaagtgcttggttggcctacgtatgggtggcaggctggacacagctgaatcgtctttctgggtcaccctgtaactcaagtcccctttcccgttctctcccaacgctacttatccgcagaaattggatgccggctggccccctgatggttcctggcctaggggctgtcatggcagagggaagccaccaaggtgccattgaggattggtgtctggctctctatgggcaagagcgccaggggacacacagtgggaccggaaccttccagaatgtcctccctcaatccaggttttccaagggggagggaatgcggagacaggagaaaaaaagtgctgagggccaaagctggtgccagggtgacggtgcgtctgggtaaggcaaatgagaggcagtgaggtgatctcagaatggcgttgaggcggtcagattaggccgggctggctcacacgagggtcccgggcttggctttttcctgcccgtaccactggacatcagctagttctggatagagggaggaatccaggaaacagctatcattgtagctcccagtctgccaggttaggatgtggtgggggctgcttgggggggtggctccaatttcacttgacggtgtcgag

SEQ ID NO: 54016 - DNA, 365 bp, Homo sapiens
caggctggtctcgaactcctgacctcaagtgatctgcccatctcagcctcccaaagtgctggggttacagatgtgagccactgcacccacccgtcccccgccccccctttttttttgaaacagagtcttgctatgtgacccaggttggcgtaatcatagttcactgtgaccatgatctccctggttcaatcgatcctctggcttcagtggctgggactacaggcatttatcaccgtgcctggctaactttttttaagttctagtagagatgtggtctcactatgtagcccaggctgggtctcgaattcctgagttcaagtgatcctccctccttggcttcccaaagtgctgggattacatacgtg

SEQ ID NO: 54017 - DNA, 1770 bp, Homo sapiens
tttttttttttttttttccaaagaattgtaaaatttattgtataagtattgcagcttttcagaatgtcatcattgccactaatgattactgatacacaacaagcagtttcttcaggcctgtggattggcatccaaatacagagtcttacgcagcggggacgtgggtgcgcgccccgcatgccacggaaagcttacataagtttaacttgaacagagcttgggaaatggggctgcaaaggagagcagttcccacgccaggaaccaacgtgaaagcattggaatcagcacaacagccatggaatcaggcaggcaggggaggacgggctgtgtccttctgagctctatagtacagcaagatttcaagcagtttccagaaaaacaacaacaacgacattttctttccttatcgacgggatattttatggttctggaagcttcgtgttgcacataggaaaaaaaatttctctgaaacgtacaattcatagggacgaccaatgaggacagggaatgaacccggctctcccccagccctgatttttgctacatatggggtcccttttcattctttgcaaaaacactgggctttctgagaacacggacggttcttagcacaatttgtgaaatctgtgtagaaccgggctttgcaggggagataatttttctcctctggaggaaaggtggtgattgacaggcagggagacagtgacaaggctagagaaagccacgctcggccttctctgaaccaggatggaacggcagacccctgaaacgaagcttgtccccttccaatcagccacttctgagaacccccatctaacttcctactggaaaagagggcctcctcaggagcagtccaagagttttcaaagataacgtgacaactaccatatagaggaaagggtgcaccctcagcagagaagccgagagcttaactctggtcgtttccagagacaacctgctggctgtcttgggatgcgcccagcctttgagaggccactaccccatgaacttctgccatccactggacatgaagctgaggacactgggcttcaacactgagttgtcatgagagggacaggctctgtccctcaagccggctgagggcagcaaccactctcctcccctttctcacgcaaagccattcccacaaatccagaccataccatgaagcaacgagacccaaacagtttggctcaagaggatatgaggactgtctcagcctggctttgggctgacaccatgcacacacacaaggtccacttctaggttttcagcctagatgggagtcgtgtacaaatcttggcaaaaaaaggttggaggagcaggagtaacctcaccaagctaggcacctccctggtagagacagggtgaggacgcgcgaggatgatggggtgtctgaaaagcaggagcccttgggtggacccctgggaggggataccagtcccaggtgagtgaggcactgtccgggaacgtcctcaccgagcgacgggagtgtcactgcttcttcagtaaggcactagagacgcgtcacataaaggaaagatacgttttaatcatctttacaagtgcgtccttgtacctttcgggataacctgtactgatttctctgcaggaccttttcaaagaatcctcttcaagagagaaacaaattttaggctgacgacttcacggagaggcaggttctgctgttgccaatgaacgagaactttctactaggctggcggcatgcagagcccacgtctgtcagctgccaccttcgtaaagcacacg

SEQ ID NO: 54018 - DNA, 358 bp, Homo sapiens
gctgtggcttacatggcacctggttcttttgctgagtacacagttgtgcctgccagcattgcaactccagtgccctcagtgaaacccgagtatcttaccctgctggtaagtggcaccaccgcatacatcagcctgaaagagctcggaggactgtcggaagggaaaaaagttttggtgacagcagcagctgggggaacgggccagtttgccatgcagctttcaaagaaggcaaagtgccatgtaattggaacctgctcttctgatgaaaagtctgcttttctgaaatctcttggctgtgatcgtcctatcaactataaaactgaacccgtaggtaccgtccttaagcaggagtaccctg

SEQ ID NO: 54019 - DNA, 381 bp, Homo sapiens
gtgggattgataacaataaacctgtatttctgcacaatgttttaattctggaggtagaagcagcacaacacacaaggaaggaaccgtaggcggccctgtgctcatcctggctgccgcttgttgagtgtggatttcgactccacatctatgcagagcctggaggctcactcagccacattgggccatcgggctgtaccagggctctggggccacaaggtttcataggctaaggcagggttcctggaatgtcttggcctaaatgctccacatcttgggaagacattcttcatcatcatctccacaaaccagggtcagtctgactccccctgcctccacaggtgtgccacacccccaagcatgagtgtaatcatggagtttctg

SEQ ID NO: 54020 - DNA, 1021 bp, Homo sapiens
tttttgggattttgtgcaagatttaataaaaaacaaacaaaaataggaatggttgctttcaacattttccaggttgtgaaaggtttgccacgactctcaggggtgtggttctaagctgcatcagtggaacaaatacaaaatgctgtcctcctcctgggctggaaggcagtgcactttctcctcttaacagccagactagcgggtgaggagtcagtgctgtgacccaggccaagctggagtgtccgcatagctttttctctgaccagtggggattccatctaccttgaggcgtgctggctgggccccgtttccacaccagcacatggtgagacagggtagcttatcaacaggctgctgggccttaatactgacagtgagtgtggcgggtcacagccaggaaaggactaacacagatgccctcccagcccccactgctggcctaattttagaataccacggaaaaaagctttgatgaagacaacaggaagtcaacacagcagagagtggtgtggacaacccagaagccagcctcacgcattccatgcccacagttaacgatgacaacaacagcaataataataataataataaaacaaaggtacaggtgaaaagcagcgccttggggtgtgctgctgcaagctggggaaggcgcgtgctcaacttggatgggacacacctagtctttcttcaagtccctggattcaaagagcttcaaccgttcttgcaccgtcaggccttccttcagactctcctgcatgggccgggaagcgggtgcatttcaggtatcccacgagacctgctcaattacggacttggacctgatgtttctgagttgccgggtgacacaggatctgtctttcttcaagaagtcagggttgcttttagatttcattatatcatatccggacaccgtggcactgtcaggggacttctcccccagtgcttccgttcagccttgagctgctccttcaacctgctgatgtcacagtcagccttagccttcgcgatgctgagctctgtg

SEQ ID NO: 54021 - DNA, 626 bp, Homo sapiens
cttaaaggagctgctcctttgaagatactaaatataggaaatgtcagtactccattgatgtgtttgagtgaatccacaaattcaacggaaagaaatgtaatgtgggggaggatgtggcacaaagattttctccttttctaatgatttcaccattcagaaactcattgagacaagaacaagccaactgttttcttatgcagctttcagtgattccaacatcataacagtggtggtagacactgctctctatattgctaagcaaaatagccctgttgtggaagtgtgggataagaaaactgaaaaactctgtggactaatagactgcgtgcactttttaagggaggtaacggtaaaagaaaacaaggaatcaaaacacaaaatgtcttattctgggagagtgaaaaccctctgccttcagaagaacactgctctttggataggaactggaggaggccatattttactcctggatctttcaactcgtcgacttataccgtgtaattgcaacttttgtaattcgggtcagagttcatgatgacagcacagctaggaagcccttaaaagatgtcatgctgggaattgggctacaaccgggaaaatactggaggttccccaaaagcagaaag

SEQ ID NO: 54022 - DNA, 651 bp, Homo sapiens
ttttgttttttttttttttttcacataccaacaaaggactttattagtgcaaattcatttgaatatttacaagcatatatgatagtgcatttcgatgcaatctaagaaggaatacattacatgggaaactgtcttaatattttcattataccgtgcagatttctagaaaaatcaacaagcaatagtcctgtctgaagcacagaatttaaaataaagtttacctccattacagacaagaaaacaaaaaattatcggccttataaattttagtatgagtacttaaattaggtacttcacagatttattttcattaattaatgaacgaaagtaactggtatttataagaaatataacattgtgttttaaatagttctttaaaatacacatttactggtaagtatttttacatatatttaaattaaaaataataacattccttcatacacacgagctatttcaaaaaatgtgagtaccctttccatgtgaacatttttaaaataaatatttacaagaggagagaataattttcctatccaaagacaattcctatttctctcttactcaacagatgttcgtctcattttttcagctaattcttttctcacttcaatgtgtttttctaaattttgcacttcatgtggaagattgatg

SEQ ID NO: 54023 - DNA, 447 bp, Homo sapiens
tacatacaaaaagaaatacaacccaaggactaatggtgtggatgtagttttatgactgtttcctctgtaacgtgaagcaatgatccttctaaaggaaatgtgttattaaataggcgatcttaccccactccaacttcctcagtattgtgtagcctgtagttaatgtgcaagcacatcattaaaaagaaatccaagcccagagaaagaatcagtacagtatatcttatgcaagtttatcaggatgaatggcttctcactccctttcttttgaagaggaattagtgtgagatgtcttttaacaagattattgtactcatttgcatttaacaagaatgcagcacgtagctaagattttcaatccgtgtgcatcacataaaatgccaaaaaagcaccttataaagtacctttccatgctagatctcaagaagtatttggatagcaaatttg

SEQ ID NO: 54024 - DNA, 921 bp, Homo sapiens
gggtttcagctcttttatctagagcttgagataattcaagctgagtttttcagggcatatcacaacggcaaagtgttcagcagtgggatatcaatgcttatttacattttcctactgctatttatataaaatgttattccattcagaggatgccttttatccccacattaaagcacagatcattaagcaataaaaaccaaattgtctgtcattcaaattataactgcagttatttttgcatggtaagagtgaggtgctaattttgtgtgagatgaactttgtaaactactttgggaaatgttctttggaagtaaggttttttctcctttagtcttatgcttccacttttgtctcagattcacaatccattaaaacatggggaaaaaagaaaaggtaaaattgagagacttttgttagaggagctatttggaatgaaccaacatttcagattttccaaaatgtaagttaggaagtctccattgtctctgcattaacaaaatacactgttactatcttaatctcaagagtgtcattacagtgagaatctcatttaaaagcataccagtgagattaatagcagtgcttatcaaagaacactgaaatctgtgagaatctttctaggagcattcttttcttcttttagttccaagttccagggtatttttcattcctagtaggtttatatgactcacagaatgtggacttttttcctgtttggagtatttttgtaatgtaagtatcggatagctgcaccacagcatgcataaattgcacattttgttttactttctttatagaatatttaatttcaaaaatataatttatgccaaaaaaagcatacctttcaattttgctacttggttgatttagcacaaaatgcaaagtcttggggcagagagggggagtgaaaaaaatttatag

SEQ ID NO: 54025 - DNA, 420 bp, Homo sapiens
ataatcgatggctaaactcatccttcaaagaaacagctgtggcttcaagttgttggtcggtgctgaaacagaaaagacaacagatgaagatcccagatggattttttgcccatttttatgccatttgtgaacacatcagtcctgtcctagcctggggctttttgggtcctagaaattctctgtatgatttatgttgcttttttaagaatcaagttcttttatttctcaaagacatttttgactttgagaaggtgcgctattcaagtacagagactttagctgaagacctcatgcagttactcattcgccgcactgagcttttaatggctatcttgaagcagatgccctgaggcatacaagtagttgtctaagcagtcatggcatgttatgtccactggctactggaagccaaagtacaat

SEQ ID NO: 54026 - DNA, 784 bp, Homo sapiens
atttttttccgtagcatttcttaataatagctcagtttttaaaggaggggaacaataccccatgagttcaaattaattttctctactttgaggtataccttcctaattatattttacataggctgttttttttaagtttaaattctcactgttaagttgcattgagagacaattagaaatgttgtaattgtcatatctttacatgtgggattatgaacaaatgaaagtttgctgtgtgattgcagttttaaattataacatttcataaatatgtcaattttaggaaactcaaactctttcccatcttttgtatggataaagtttatggtttcatttctgagaatagagttggtctgctgtgctaacttcatgtttcttattccaaaggcttgattatatttttttctccagtgattaaaaatgcagcgaaaatccaatctacaagttcatatattggtatttctagacatagtctagttctaaaagaatgtacttggtgtgcatttttaagtgtttcatgtagacagattaatatatttttgtacaacattgtatttctacatttatttcaagactgtacttttcagtgactttttcaagtgcatgtgttaacagaagattgtttggaacgagagtgcagtggcttctttactagcaaagagaagtgtaatacaagtgatcatagaaggtgagaatgtgtttatactgtatatggaaacctaatgcctcttttctaaagctttgtacatttttttcgtgaaatagattaaatattttctctcta

SEQ ID NO: 54027 - DNA, 448 bp, Homo sapiens
  misc_feature (1)...(448): n = a,t,c or g
ccctntgacatgattacgaatttaatacgactcactatagggaatttggccctcgaggccaagaattcggcacgagctctggtcagctggtccaggctggtccccgccggtccccttccagtccagccaccaagagtccacttgtcccgggcttccacctggctgacaggaagaatttctgagagctggatgtgcatgccctgtggacgaaggtacagctcgcctgcctgccccaatcccagccccgacaatcacatgcagctgactcggacactggccttgggaacaatgttcgagagaacacttgccccttgactgtaggagccagaaggggacccaggtgtgcatagctctctgtagacatttttacccaaacctgttggtaaagtgcccatctggtgctcaagagagcctgggggtctaacagggagcccggctgctcacctgc

SEQ ID NO: 54028 - DNA, 761 bp, Homo sapiens
  misc_feature (1)...(761): n = a,t,c or g
cgtcacggtactcgtttccagacagaagtcatgaggaacaagagggaaggtgctttcccgtgtgcagcgcttggggagactcacacagacagaggatctggcatgacagggaaaggaggaaatggcttctgttaatctctccttcagcttctcccgcccttcccatgcactcttcctgtttccctttccagttctcacggtgactcaaggaacaacgtgtgaaatgaaagacctcaggtgctgtattggctcttgacagctcttcagaagaaaatacctcctgcctgttctgttcagtcctggtgcaggtggtcctggacaacactttgaaaaatgctggggcagaaacaagccagcaagcatatgggattcatctgctgtgagtgataatttatctagtttctaaaaatagtgttataggctggactgtgtccccttcctgtgccccgccgccatgcatatatggacgnnnnnnnnnnnnnnnnnnnnnnnnnnnnnnnnnnnnnnnnnnnnnnnnnnnnnnnnnnnnnnnnnnnnnnnnnnnnnnnnnnnnnnnnnnnnnnnnnnnnnnnnnnnnnnnnnnnnnnnattnggacacagatgctacacnnnnnnnnnnnnnnnnnnnnnnnnnnnnnnnnnnnnnnnnnnnnnnnnnnnnnnnnnnnnnnnnnnnnnnnnnnnnnnnnnnnnnnnnnnnnnnnnnnnnnnnnnnnnnnnnnnnnnnnnnnnnnnnnnnnnnnnnnnnnnnnnnnnntcaa

SEQ ID NO: 54029 - DNA, 419 bp, Homo sapiens
ggccagaatgtccctcattgggtgaatggttaaaaaacagaggaacctttaaaggtctgtaccatggaatcctacccggcaataaaaagaaacaagctatggatatattaaaaatcatggatggctctcatgacattgtgtcgactgaaaaaaggcccatctcaaaaggacacttactatgaataaattgtatctcaataatttagtttaaaaaagaacacataactatgtgattctgtttctataacattctcaaaatgacagcattttagagacggaaaacagatgagtggtcaccagagattaggaatggtagagggcagaggtcggcgtgaatgctcctaaaagggtgtcatgagggagatctttatggtgatgggacagttctacattttaatcgtggtggtggttacatgaat

SEQ ID NO: 54030 - DNA, 359 bp, Homo sapiens
gctttaattattaacgttcagggcacagcactgaggaagttttctgttagtgcctatacagttctcacttccaggatttacccaaatttgttcaaatggtactattatattaccctggccccttggagtaggtttgattttctaaggtgtagaatactctagatctctttgagtgtaaaaaggtactttgttttgtttgtcctttctctgtgtttctggaacagtgatgtcgtgtttactcttagcatctcagtctcagttttctcaattgacattttgccaaattaggaaaaactgatacagtttaatgttatcttcaccaccatttagagcagctgtcatgcgtttgtgtaccgtga

SEQ ID NO: 54031 - DNA, 414 bp, Homo sapiens
ctttgatacatctgggatctgaaggagtgaccaaacgacttttgagcacacctgacacatactatactgtattgtaaggggttgtacacccttttcttttctgtcatccatgtgtctgtcatgtaattgtccatgttagctgcataattgctgaataattctaacgctgagtcgtttatcatatggtgatggttcttctcaaggttggtatttgccacattttctaaaactctttttttcctcctggtttctcagtctgtgaagactatagattttcagaaatacgttgaattattgctctaaaattggaaaaatatacttttgaaatattttttataatttggaggccagaattcagaatgagggcatactgctgtaatagaactttcttataaaatgggtttatctgtgagg

SEQ ID NO: 54032 - DNA, 383 bp, Homo sapiens
gttggtttttttcatggtcatgacagccagcagcaactggaacaacatgattttttgttcatatgtaacgtaagagcctaagacttgcttctctttccgaaaagccccaagcaagcctcttcttgtgtctcactggctcaactggcttatacccgcccaaccctgaaccagtctgtggtaaagcaggtagaattactgacttagattaataatctgcagtagcaggaatattatagagtctaccataatcttaagatattatagttttggtcaattattgtagtatatcattttaaaagtttatttagcatattgaaatattgaatccaaagaaatttatgagaaattttgtttctttatcaggacaaacagcatattctatg

SEQ ID NO: 54033 - DNA, 1636 bp, Homo sapiens
ggtacccattacaaggatgcagagcagtgaagacactgaggcaggcccagcctacagtgatgaggactatgaagaagacatcattgagcccaggaccttaaatgagatcaccacggtgacagacaaaactagcccttggtctagtgtcatatcagacacaagtgaggtcatcagccctcagcctgacgaggtgcagagggaaggcccctcttgtccttctccagggcctttctgcagagaggagcttatggtcaaaagtagctttctctccagcccagaaagggctgtcaacccccacctgcctaggcagggttctcctagccaaagtcttgttgcttgtgagtgtgaggcctctaaggccagggttggtggcgagtctgcctcagccaaccctcagcccatcccatgcccaacactctcaggagctcaacagagcagcacgtttgttggatggagctcaccacagacagatcagaacaaggagcccaagtcagaggccccagctgagaatgaagctgccaccagtgagctcggtgactctggctgatagcttcaagaagttgccgctaaatctagcctcccagagcagaagggaaaaccataagggaccacccatcgactcctctgacatcaggcagaggcaggtgacaactggatcagagacgtccacaaagcagagcctcctgctcccagggcccattgtggtgcccaacttctttttgcctccccagcagttggaggcttccctgcggatgcttccactctcagcaactttgccaccagcagccacaacagatcaggacaagagcgacgcacccgggggagctctctcccaaaggccttgtcgccccagacctaactcgctccccctcaacctgcctgaggaagaaactctcaggattgcacggatattttcttctcagtactcccagaaagactgacgcagcctgaggggctggggggaaggagacacctgcccaccctccgtcagctttgtccagcttgcaggaggcaccaggtctggctccttcagggctgtcacagtcctgaaaccaccacttgcctaggccacggatgcctcaagagacccggtcagcccagactggaggagtgccccaaaccagtccagtgtccacttgccagaatttcagctccttttttctgtgggtgagggcaaaggctagaaataaaatggaatccgcgcccaagtgggacccaagcaggcatctttcggtggagaaacgcccccccagtgtccttgacacagctgactgctggcatgagcccaccctctgcctgaagatgcaggaccatttttgccttaaaagttggggaggagggacatgtagattgtgtgcattgtgcatagtcaaggaaatcctagggccacctccagttcatttgtgtgggaacaaggatattttatagatacaaattatttttatgctgtgttgaattaatcaattaggagaggaaggggaaatcacttccttcaaactttttatctgattgtctaaaattctaaccatgcttttaacttattatttttacccagctctgaaggtcattgttcttgcctgtgtttgaataaaatcatattggtgtttgtaaaaaaaaaaaaaaaaaaatgaaaaaa

SEQ ID NO: 54034 - DNA, 2306 bp, Homo sapiens
gaattcgggcgtgggcgcgggggcgcggcgtgcggcacgctgcagggctgaagcggcggcggcggtggggactgcacgtagcccggcgctcggcatggctctcctggtgctcggtctggtgagctgtaccttctttctggcagtgaatggtctgtattcctctagtgatgatgtgatcgaattaactccatcaaatttcaaccgagaagttattcagagtgatagtttgtggcttgtagaattctatgctccatggtgtggtcacctgtcaaagattaacaccagaatggaagaaagcagcaactgcattaaaagatgttgtcaaagttggtgcagttgatgcagataagcatcattccctaggaggtcagtatggtgttcagggatttcctaccattaagatttttggatccaacaaaaacagaccagaaggttacccaaggtgggcagaactgggtgaagccattgtagatgctgcgctggagtgctctgcgccagctccgtggaaggatcgcctcgggggacgaagcggaggatacagttctgggaaaacaaggcagaagtgatagttcaagtaagaaggatgtgattgagctgacagaccgacagctttgataagaatgttctggacagtgaagatgtttggatggttgagttctatgctccttggtgtggacactgcaaaaacctagagccagagtgggctgccgcagcttcagaagtaaaagagcagacgaaaggaaaagtgaaactggcagctgtggatgctacagtcaatcaggttctggcctcccgatacgggattagaggatttcctacaatcaagatatttcagaaaggcgagtctcctgtggattatgacggtgggcggacaagatccgacatcgtgtcccgggcccttgatttgttttctgataacgccccacctcctgagctgcttgagattatcaacgaggacattgccaagaggacgtgtgaggagcaccagctctgtgttgtggctgtgctgccccatatccttgatactggagctgcaggcagaaattcttatctggaagttcttctgaagttggcagacaaatacaaaaagaaaatgtgggggtggctgtggacagaagctggagcccagtctgaacttgagaccgcgttggggattggagggtttgggtaccccgccatggccgccatcaatgcacgcaagatgaaatttgctctgctaaaaggctccttcagtgagcaaggcatcaacgagtttctcagggagctctcttttgggcgtggctccacggcacctgtaggaggcggggctttccctaccatcgttgagagagagccttgggacggcagggatggcgagcttcccgtggaggatgacattgacctcagtgatgtggagcttgatgacttagggaaagatgagttgtgagagccacaacagaggcttcagaccattttcttttcttgggagccagtggatttttccagcagtgaagggacattctctacactcagatgactctaccagtggccttttaaccaagaagtagtacttgattggtcatttgaaaacactgcaacagtgaacttttgcatctcaagaaaacattgaaaaattctatgaattgttgtagccggtgaattgagtcgtattctgtcacataatattttgaagaaaacttggctgtcgaaacatttttctctctgactgctgcttgaatgttcttggaggctgtttcttatgtatgggttttttttaatgtgatcccttcatttgaatattaatggctttttccattaaagaataaaatattttggacaatgccgataaatgtatgaagttagtatccacatcataaattcagagtgatgtttagcagtaaatcaatattttgaagtgatacacagatgtctttcctccccacaaacttttttaaacaaaaaacaagacctcttttctttagatggtgcccacctatgcccaccacaacagagattttacatggaaaccgggctcagtgagaactgatttcctgcccaatatttgtctttgggctgtctctagtgactaattattaaggaatctagctggttatacagttcaaggctttctatgttgttaatgaacctcaaaatagccgttaagacatgaaatacagcagcaggttaccaatgcgaacaggtagttcgcatttatgtaaaacattcagaaaatgaagttttgaatttgttggaacattcaaaggacttgagagcattttattgtaacttaaaaaaataaatacaactgtcactaaaaaaaaaaaaaa

SEQ ID NO: 54035 - DNA, 757 bp, Homo sapiens
tttttttttggtagtcggatttgttatgaatttctctctcccctcacccctcttaaagtatttagctgaagaagctggcagatagagagtgacagacagacaggcagcagtgtgaggccacaggagagtcattcttccggagttatcagtccatccatccatcactggagaagagctttgattgcctggttgtcagtggcttcaaaggcggtcagtccatctgggcctttcacagtcttatcagcaccctttgacagaagcaatttcacacaggaaacatgaccctcatagacagcagacagaagaggagtaatatgatgtttatctggagcattaatatctgctcctttcagcagcagaaattccaggatttcaagctgcccacaatctgctgcataatgaagaggtttccttccaccttctagtgtccggttgacatcttctcccttggccacatagtctttcacctcatccaagtctccgtttttcagggcccacatgaactccttgtcgcacatcactgcagcggggcaggccggttggccgggcagaagatgaggaggcggtggcagcagcaagcggatgccgccgggcgagagggaggcagggccgcgcgaagccggagaggagaagaagagaaggagggttaggctgccaggcgggcgaggcagttggccgcggcgaccgttcgggcgggagaaagaaagttcttttgcggccaccgggcccagcagagaggttccgcctggccgaggag

SEQ ID NO: 54036 - DNA, 2702 bp, Homo sapiens
  misc_feature (1)...(2702): n = a,t,c or g
gaaggccggctgcctgaggaataccagtgggcaagagaattagcatttctggagcatctgctgtctgagcagcccctgggtgcgtccactttctgggcacgtgaggttgggccttggccgcctgagcccttgagttggtcacttgaaccttgggaatattgagattatattctcctgccttttaaaaagatggacttcagcagaaatctttatgatattggggaacaactggacagtgaagatctggcctccctcaagttcctgagcctggactacattccgcaaaggaagcaagaacccatcaaggatgccttgatgttattccagagactccaggaaaagagaatgttggaggaaagcaatctgtccttcctgaaggagctgctcttccgaattaatagactggatttgctgattacctacctaaacactagaaaggaggagatggaaagggaacttcagacaccaggcagggctcaaatttctgcctacagggtcatgctctatcagatttcagaagaagtgagcagatcagaattgaggtcttttaagtttcttttgcaagaggaaatctccaaatgcaaactggatgatgacatgaacctgctggatattttcatagagatggagaagagggtcatcctgggagaaggaaagttggacatcctgaaaagagtctgtgcccaaatcaacaagagcctgctgaagataatcaacgactatgaagaattcagcaaaggggaggagttgtgtggggtaatgacaatctcggactctccaagagaacaggatagtgaatcacagactttggacaaagtttaccaaatgaaaagcaaacctcggggatactgtctgatcatcaacaatcacaattttgcaaaagcacgggagaaagtgcccaaacttcacagcattagggacaggaatggaacacacttggatgcaggggctttgaccacgacctttgaagagcttcattttgagatcaagccccaccatgactgcacagtagagcaaatctatgagattttgaaaatctaccaactcatggaccacagtaacatggactgcttcatctgctgtatcctctcccatggagacaagggcatcatctatggcactgatggacaggaggcccccatctatgagctgacatctcagttcactggtttgaagtgcccttcccttgctggaaaacccaaagtgttttttattcaggcttgtcagggggataactaccagaaaggtatacctgttgagactgattcagaggagcaaccctatttagaaatggatttatcatcacctcaaacgagatatatcccggatgaggctgactttctgctggggatggccactgtgaataactgtgtttcctaccgaaaccctgcagagggaacctggtacatccagtcactttgccagagcctgagagagcgatgtcctcgaggcgatgatattctcaccatcctgactgaagtgaactatgaagtaagcaacaaggatgacaagaaaaacatggggaaacagatgcctcagcctactttcacactaagaaaaaaacttgtcttcccttctgattgatggtgctannnnnnnnnnnnnnnnnnnnnnnnnnnnnnnnnnnnnnnnnnnnnnnnnnnnnnnnnnnnnnnnnnnnnnnnnnnnnnnnnnnnnnnnnnnnnnnnnnnnnnnnnnnnnnnnnnnnnnnnnnnnnnnnnnnnnnnnnnnnnnnnnnnnnnnnnnnnnnnnnnnnnnnnnnnnnnnnnnnnnnnnnnnnnannnnnnnnnnnnnnnnnnnnnnnnnnnnnnnnnnnnnnnnnnnnnnnnnnnnnnnnnnnnnnnnnnnnnnnnnnnnnnnnnnnnnnnnnnnnnnnnnnnnnnnnnnnnnnnnnnnnnnnnnnnnnnnatggtactatttagatataacactatgtttatttactaattttctagattttctactttattaattgttttgcacttttttataagagctaaagttaaataggatattaacaacaataacactgtctcctttctcttacgcttaaggctttgggaatgtttttagctggtggcaataaataccagacacgtacaaaatccagctatgaatatagagggcttatgattcagattgttatctatcaactataagcccactgttaatattctattaactttaattctctttcaaagctaaattccacactaccacattaaaaaaattagaaagtnnnnnnnnnnnnnnnnnnnnnnnnnnnnnnnnnnnnnnnnnnnnnnnnnnnnnnnnnnnnnntgcttgaacccaagaggtcaaggctgcagtgagccatgttcacacngctgcactccaggcttgggtgacagaacgagaccccgtctcaaaaaaaaaattttttttttaataaaacaaaatttgtttgaaaacttttaaaaattcaaatgatttttacaagttttaaataagctctccccaaacttgctttatgccttcttattgcttttatgatatatatatgcttggctaactatatttgctttttgctaacaatgctctggggtctttttatgcatttgcatttgctctttcatctctgcttggattattttaaatcattaggaattaagttatctttaaaatttaagtatcttttttccaaaacattttttaatagaataaaatataatttgatctt

SEQ ID NO: 54037 - DNA, 410 bp, Homo sapiens
tgccaggtggttagatgaacgtcatgcacaatctcactttattccagctttattccgaccttctcctcttgagcggataaaaactaatgtcataaatcctgcatatgctactgaatcaggtcagacagaaaactcactacatatgggctatagtgcactagaaataaagagtaaaatgttagccctagagaaagcagatacctgtatttacaaccctttgtttggatcagatcttcagtatacaaatcgggtagataaagtggtaataaatccatactttggtctaggagctccagactactcaaaaatccaaatacctaaacaggaaaaatggcagagaagcatgagcagtgtcacagaagacaaggaacgacagtgggtaagatgattttcctctccaccgaagcgcg

SEQ ID NO: 54038 - DNA, 1884 bp, Homo sapiens
ttctattgcgcgaggcattgtgggttgctgggcggcccggtctcggagaagaggggagagtggcgggccgctgaataagcttccaaaatgatgcccacaccagttatcctattgaaagaggggactgatagctcccaaggcatcccccagcttgtgagtaacatcagtgcctgccaggtgattgctgaggctgtaagaactaccctgggtccccgtggcatggacaagcttattgtagatggcagaggcaaagcaacaatttctaatgatggggccacaattctgaaacttcttgatgttgtccatcctgcagcaaagactttggtagacattgccaaatcccaagatgctgaggtggggtgatggcaccacctcagtggaccttgctggctgcagagtttctgaagcaggtgaaaccctatgtggaggaaggtttacacccccagatcatcattcgagctttccgcacagccacccagctggcagttaacaagatcaaagagattgctgtgaccgtgaagaaggcagataaagtggagcagaggaagctgctggaaaagtgtgccatgaccgctctgagctccaagctgatctcccagcagaaagctttctttgctaagatggtggtggatgcagtgatgatgctcgatgatttgctgcagcttaaaatgattggaatcaagaaggtacagggtggagccctcgaggattctcagctggtagctggtgttgcattcaagaagactttctcttacgctgggtttgaaatgcaacccaaaaagtaccacaatcccaagattgcccttttgaatgtcgagctcgagttgaaagctgagaaagacaatgctgagataagagtccacacagttgaggattatcaggcaattgttgatgctgagtggaacattctctatgacaagttagagaagatccatcattctggagccaaagttgtcttgtccaaactccccattggggatgtggccacccagtactttgctgacagggacatgttctgtgctgggccgagtacctgaggaggatctgaagaggacaatgatgggcctgtggaggctcaatccagaccagtgtgaatgctctgtcagcagatgtgctgggtcgatgccaggtgtttgaagagacccagattggaggcgagaggtacaatttttttactggctgccccaaggccaagacatgcaccttcattctccgtggcggcgccgagcagtttatggaggagacagagcggtccctgcatgatgccatcatgatcgtcaggagggccatcaagaatgattcagtggtggctggtggcggggccattgagatggaactctccaagtacctgcgggattactcaaggactattccaggaaaacagcagctgttgattggggcttatgccaaggccttggagattatcccacgccagctgtgtgacaatgctggctttgatgccacaaacattctcaacaagctgcgggctcggcatgcccaggggggtacatggtatggagtagacatcaacaacgaggacattgctgacaactttgaagctttcgtgtgggagccagctatggtgcggatcaatgcgctgacagcagcctctgaggctgcgtgcctgatcgtgtctgtagatgaaaccatcaagaacccccgctcgactgtggatgctcccacagcagcaggccggggccgtggtcgtggccgcccccactgagaggcaccccacccatcacatggctggctggctgctgggtgcacttaccctccttggcttggttacttcattttacaaggaaggggtagtaattggcccactctcttcttactggaggctatttaaataaaatgtaagacttcagataaaaaaaaaaaaaa

SEQ ID NO: 54039 - DNA, 475 bp, Homo sapiens
tttttttttttttttcttacaaagcaagttactttattagcattttaaacaatgtataagtgatggaatcattctaacaacacatctattcactgcttacaattccaactaatttcagttctttgatatctaatgacaagagcgaagacctgttaaagttccttccaccagtaaaactcacagctcaaagttgtgggagtgattaactgagccacaggccttcattcacatgtttaccacattaaaataccacacagtgttttcttataaggtcaaccaactgggaagcaattaacattagcattaagatttaaactgttaggcacagggctaaatcaggcattatatgaaaacttgtggttccctagtcaagtcaaacaaatccccaaatatttcagcttgtaacagttttgtccttcctctcttgagacaattatttgagtacttgcttttggaaataaggtaattcatgatg

SEQ ID NO: 54040 - DNA, 995 bp, Homo sapiens
tcttccaatgcctaagctattccctagaattaaactgggcacttttggaagcagcaacagtaacagcagcagcaaacttttcctctcatattttgggtgtatcaaaagttctagacttttgaagttatgatttcagtggcccactttatttctaaggaagagtgtctactttggaacgatactttgcacatagtaggaactcaagaaatacatttgaataattataattaactgtttagctatcttaatgagaatttgttgacaacaaaagatcatccatcgccttatgtgtgagtaagattggagcctctatcaagatttagtcaagttcagttagattgattctagaaacaaatatttatttctttcttttacggggatgtgaataaggcttttccttaaggccttcattctttaaacaaacaggttgaaatggtatgttgtaaaagagaagacgggagagaggtatttagatgataagtgtacttcacaaaaatgccaaagtttgaaaaataggtatgtttgttctaaatgtttaagtgcttctctgttaggttctggggcttgcaatcatttgaattgttctgtttcacaataaaggagattcactgggttctgcattttcaggattcaatagaactgctccattaaaaaaataatccttagcaagcattcgaatcctaactgctttgatgcacttgcccctcgggcacctgtcatttccaatatggtaggtgtcaaagtcaaaagtatttactgggagaaaaaagagaggagtggttgtagaagtctccctaaatcagacatgtcaagcaatcagccaacgtggtgtatttctcattcaatattttagtgtgaattgagacactgagataaagacatcgtgcagagataaatggggatacagttaaatgtagcaactcttgagttcattttttcccactgtagcaaaattaatgctttctctttattgaaataaattgctcattcctcaa

SEQ ID NO: 54041 - DNA, 629 bp, Homo sapiens
gttagaactagatttaactagtctataatgaacatgaaggcttttatatatgaagttgtatacctttttgtgtttagagaattatgggaaaccctggtaagcaaaactttcctcccagataattgcttccaaattcgaagagttagtcaccaagagagccatatgtatgaaagcgtatctgtgaaaggtaggaaacttaccccccctaagtgtaatgttgctttaggcaactcttgtaaatagtgagacttgtttggtctcttacatgtagagatttgagtgcagttggtacagtactttggtgtctccaccactgtcccttctccccgcttcaaaataagtgtaatccacggtagcagccacacttcctttagaaggaactgttataatttatttaaaagttgaaaaaccacccaagatgactaccaactttcacttttttcttctgccatccaccctcatttttcctttagcaagatttttatatctaactttccttccctccattgagtacgtgctttgaggaaaacatttcttaaaacagtgtgtgccacctaaggctgggatggggaaagtgcagtcttgttgttcatattaaaaacacacttctttattagtttaccacttgc

SEQ ID NO: 54042 - DNA, 422 bp, Homo sapiens
gaggtagatgagttccgacactgtcacggctgtgttcccagcagcgtccgaagtcgagaatcgtcagctgtaagtaggagctacacagcgcagagaaaatggaaccacccatccgtgaggcctctttccggagggagccgcacacttggacttgagagtttgccagcagcgagctcggatgcatctctccaaaagccaccaaggtcggcgcgtctgaagagcgttttgcggtcatcagacttcctcatctgaaaacacagaacatactgaccctttcaagtacttagtcattttcctgaaagtgtggtctgtttcagaatgctgtggcaaccaggtaggtgtggcactggccatgtgccacgtctttgccctttgtaagtctgcagatattaaagtttctaaccctgttttttaatctccaa

SEQ ID NO: 54043 - DNA, 2132 bp, Homo sapiens
gcagcctgaggcagagctcgggggctgtcggtggggaccttgcaggagggcaccccaagcccgcccggcccgcccaacccagcccctgcgcgcagcccgggccgagtaggaccccgcgcgcccctcgctatggcggcgccctcgcggctcctgatccgcgggggtcgcgtggtcaacgatgacttctcggaggtggccgacgtgctggtggaggacggcgtggtgcgggcactcgggcacgacctgctgcctcccgggggcgctcctgcggggctgcgggtcctcgacgccgccggcaagctcgtcctgcccggaggcatcgacacacacacgcacatgcagttccccttcatgggctcgcggtccatcgacgacttccaccagggcaccaaggctgctctctcaggaggcaccaccatgattattgatttcgccattcctcagaaaggtggctccctcattgaggccttcgagacctggcgaagctgggctgatcccaaagtttgctgcgactacagccttcatgtggcagtgacgtggtggagtgaccaggttaaagaagaaatgaaaatccttgtgcaagataaaggtgttaactctttcaagatgtttatggcctataaagatctgtacatggtgacagacctggagctgtacgaagccttctctcggtgcaaggaaattggagcaattgcccaggtccatgcggaaaatggagacttaattgcagagggagcaaagaagatgttggctctggggataacaggccctgagggccacgagctgtgccgcccagaggcagtggaggcagaggccacgctgagagccatcaccatagccagcgctgtgaactgtcctctctacattgtgcatgtgatgagcaagtctgcagctaaggtgatagcggatgcaaggagagatgggaaggtggtctatggtgaacccatagcagccagtcttggcacagatggcactcactactggaataaagaatggcaccatgcagcccaccatgtcatgggtccacctttgcgaccagacccctcaacacccgacttcctcatgaatctgttggctaatgatgatctaaccacaacagggactgataactgcactttcaacacctgccagaaagctcttgggaaggatgattttaccaagatccccaatggggtgaatggtgttgaagatcggatgtccgtaatatgggaaaaaggcgtgcatagtggtaaaatggatgaaaacagatttgtggcagttaccagcacaaatgcagccaaaatttttaatctctatccaagaaaaggaagaatagctgtaggatcagatgctgacattgttatttgggacccaaaaggcacaaggactatctcagcaaaaactcatcatcaggctgttaacttcaacattttcgagggcatggtttgccacggggtgccccttgtgactatttcaagaggcaaagtggtatatgaagccggagtgttcagtgtcacggcaggagatggggaagtttattcctcgaaaaccatttggctgaatatatttacaaacggattaaagcagcgagacccggacttggcacacctacccctgttgggagccgtgcaccctataagggagaagtcgccacactgaaatccagagtgacaaaagaagatgccacagcagggaccaggaaacaggcccacccctgaagtgtgtgccatcggtaaaaaaaatcagaggaaaggaggctgccattcccttcacagccaaacattgtcaacccatggagaagcaggccttattcaactccctaggatcctttagaaaaaattcaccactataggcttctttgattttctttcagaagcaattgctgtctttctcactgtgtttttgttgctgcataagattgaaggtataaatttatattattgtgatggaaaggctgtgtggaaattcattgatgatactttaaaatgtcatctttgcttgtactagatttcttacttagaatttttaaaaatcattttcttgtttaaatagtttctttttttaaaaaaaatggttacattagttttaaaatagctctgtgattttactttttattgtaattaataaacattgagatcttcattttatacctt

SEQ ID NO: 54044 - DNA, 357 bp, Homo sapiens
ttcattttcagataaccctgtgaagaaggtattacccccatttaactgatgagaaagccaaggtcaagttagttgcccgagacagcaaacatttttttaaagcactttattcatttagtcttcttaaaaatcctgcgaggtagttggtattattatccctattataatagggagaagtgaggcacagagaggtgaagtcctttcctcaaggtcatcctgtgagtaactgaaggagctgggaatgcagcactccagtagcctggttcaggaaggtctctgtgctcttaactaaccactatgaaccattggggtggtccagcctcagtcgttctgactcagagctcgcagcctttctgc

SEQ ID NO: 54045 - DNA, 429 bp, Homo sapiens
aaaatgtattaaaaatagctgttttccagacaaaatacatttagtgagaagagtggcgttttacatttttgcagatttctttagttgaagtcagtaggtttttccctacttaattctgtatattgagtttgcagtgagatgtttgagttgaagtatatgaaggaaatctggcttcccataaatatgcagttggaaaaggaggagtattttagacttttcaggtaattgtggatattattctttaatactacatcaaaatttgccaaagtgtagtttattaaagtttaattgcagtgtggaatctgaaaccatatcagtgaacttgtgtactctgttacattaaaatccattgcactttagatggcgcttttacttgtaaatgatttagttatagcatgcattggtcattgggagaatactggttcatca

SEQ ID NO: 54046 - DNA, 1439 bp, Homo sapiens
  misc_feature (1)...(1439): n = a,t,c or g
gattggctgttgctaggaaccgtctcaaggccttatgggccctggttacggaagccgaggaaggctgagcgcgggctctcaaggaaagtagtcgcggaatctcagttagcggtggagaggcagtatgtccggttcaatggcgactgcggaagctaggcggcagcgatgggaaagggcaggaagtcgagacctcagtcacctattaccggttggaggaggtggcaaagcgcaactccttgaaggaactgtggcttgtgatccatgggcgagtctacgatgtcacccagctttcctcaacgagcaccctggaggagaagaggttctgctggaacaagctggtgtagatgcaaganttcaagaccaagcctgggnnacatagcgaagacccctatctgtattaaaaaaaaatctgatttaattcttttatttatcataaggggtttaattcctgaagtaaaggtttgcacctattaaacttaaaactgccaaatgatttttgttcttttatgtgcgtgataaaaatacaaagaatggtgtggccacctcctccctttcaagctagggcagcaggtagctcttcccagcccctgagcccagccccttcccaagtggtgccggacaaaaaactacatggccctttcgtgtcttgggggtggaaagggagggatgaattggggtgatagaaccctggtgaattcagagtaatctttctttagaaaactggtgttttctaaagaaacaggataggagtttagagaaggcaccaaagctttcactttggtttggcaccagtttctaaccatctgttttttctaccctagctatcttttattggtaaaatataaatgtataattatgtttgtagagctttaccaaggagtttccctccttttttgtttgttgattagcaaatttttgattctccattttccaaaagtaagagactccagcatggccttctgtttgccccgcagtaaagtaacttccatataaaatggtatttgaaagtgagagttcatgacaacagaccgttttccatttcatctgtattttatctccgtgactccaacttgtgggtttgttctgtttttccatgagaataaaatactggcggtttttttctcagatgtgtgttcattgagaagtaggttactagaattatgttactgtgtcttattggttcaatgatgatttctctggcatattagacttttattttttcctccatggaagcacttgaggaaataaatagtacactggctgttttctgccagcaactgtggtgatttttctccctgtcctttgagaattgctagtctgcttctgagccattgtcatatccagcagggagcagcttggttcaagaaggaccatagaggctgctcagcatctcctccctccctcccagcttgccagggatttgatgagacaggaaactg

SEQ ID NO: 54047 - DNA, 366 bp, Homo sapiens
ctgcggtgttcccgaaggccaccccgtgagactggagtgccgcgtgataggcatgcccccacctgtgttctactggaagaaagacaatgagaccatcccttgcaccagagagaggatcagtatgcaccaggacacaacagggtatgcctgccttctcattcagccagccaagaaatcagacgctggatggtacacgttgtcagccaagaatgaagccggcatcgtgtcgtgcactgccaggctggatatatacgctcagtggcaccatcagatcccaccgcccatgtctgtccggcccagtggcagtcgctacggatctctcaccagtaaaggacttgacatattttctgcttttcctccatggaa

SEQ ID NO: 54048 - DNA, 1207 bp, Homo sapiens
ctcggagtgtagtggagagtgatgaactttaagaatgtctaggtacctgctgtgtaagagagcggactgtggagggggaatgagaacaagccagacttggtggtttccaagcaacccgaagttgagtaagttcccacactgctggacctgtggcaaagagtgctttgaataagtcagctagggattcttgcagtctcagctgagggagaaaggtagggctgtgccttctaaagattccaacagagatgtgagaagataatacagatgaaccaaagatgtcacacagttgccatccactgctttgggaaaaaactagcatgctcccctgctccctgttgtgttagggatgtttaggtcatactaggagcaattaggagccatatgcctgggctgagaagagctaggcagtagtgaccttaggatatgactaactcaccaaacaatgccaaggagaaaggcggacaggtcaccatcacctttcatcgattacatgtatagcagtagttttggtgaattcaccaaatcagcttccacttagcattaggaggtgatgccatacaactcacgtatgcgggcaaacacttttgatttgcatatcctgggtgtactggagccacataataaggtgtccaaatgtgcttgagattcccaaaacttgctgaaacacttgatattggcacagtgcacttattttgtgggcccaagcatgggccttaccagccttgtcttgcactattttcttttgggtggtgactgtttttttctgactttgcatatccctagacactagaactaaaggattggtaataaaccaatcagaaagaaatcctctgtggggtcactttaaaaactactagcttcaactaccacttacaaaatgtgcaagagtcatcatttgcccataaaatacacctcatgggctcctacccctttccccaaaagtctgaaagtgtaggaggaaggaaagatacaaaccaaggagaggaaatgatgggagagtgttgtttttgtcacttgccccagcagagcaggggttttggaaggagaggtctttaatagctttgaaatgctttgagatcattggtcaaattgcattttctatgtagagaatattctgctaggtggaaaagttgggagaaaggggaatatgcatctttattctaatcaccaattcaaaccctgcctcttaaggaatttttagacttaa

SEQ ID NO: 54049 - DNA, 365 bp, Homo sapiens
ctggaagctccctataaaaaagaagaggatgagcaacaaaggaaagaagttaaaaaggattatcctagcaataccaccagcagcaccagcaacagtggcaatgagaccagtggaagcagcaccatcggggagacaagcaatcgtagtcgagatcgggatcggtatagacggagaaatagtcggagccgaagtccaggtcggcagtgtcgtcaccgtagccgtagctgggatcgtcgacatggtagtgagtcgcgaagtcgggaccatcgtcgtgaggatcgtgtgcattacaggagtcctccacttgccactggggagccagttgataatctgagtcctgaggagcgtgatgcccgcacagtttt

SEQ ID NO: 54050 - DNA, 2540 bp, Homo sapiens
tttttttttttgatgttactaatgttttatatccctagaaacatcataagttgggctaatgagaagttgtcagacacacaacaaagaccacacacaaatgggcaacagctgccacaaggaggaggcttgccttttgtacaaagtttttatatatatatatatatgtatatatatttatgtacacagacacaagggtataaaatccagtgagaagggctcacacatgcccaggtaagggatgggagtagctataattgccagggttgaggccacagtagaggcacacaggaagtggtagagtagcagcctccctccatcctcctacctcgggccaaagggagggaaatgggaggaaggacaagtatacaaaggaagatggaagatactggaaaggcatactccaccttttactaaattcctgaaagcccctaaatgcctcacagggacagatcactctcacacctcctggcaggacagatcactctgaggcctcctggcaggatagatcacttccatgcctcctagcaagatgctgaggctacagtaggtctggcctcaagctgcttcaagctaaggtctgaggctggcttctcaatgcacgtccatgctatctcccagggcccttgtagcagaaagagcaccttcaaggttcacccacaaactcagtcctcttgattcagaggtcctaagggttttccttgacagactaaaggttaaaggtacaggaaaaggagagaggtcagttccttcagttaaatgcccctatggcccttccccaatgggggagaaaattgaggaaatccactaaggtgttggaaaagggccaagaaggtaatctcagagacgatacacatggagaaacaggtattcaatgcaggtgtggattctgttctcttcaactggtggctttgctcagcagagtccatttccagtgggaccatgggcaggagcttttcttggtatcttaagggtggccccaatttcctcagagacaatgtccatgccctcaggatggcttggtcccacaaaatggaagaaatggggcccatggaagagtagatgtgaagtggcaggatccagaggcacaaggaggcagtaatactgtgccactgatttacatggtctggggggtaaagaggctggagagctggaaacactgggaggcaaggttcagggctggactcagagcagtcagagctgctggattcagggcccccaagggaactgctccattcagttgcaaggcagcagcctgggcggcggcggcggcagcagcagcagcagcagtgcttggcagttggattccagcgccttctgccagttttgccatgagctgaaaacgtccacctgctgatcccagatccagctcctggtccccatcaggaaaagtgatgtctgtgccaccatccagtcgctcagtcacatggccaaccctcataggtcgaccagcaagctcaaacccattcaactgttccagggcccgccgggcacactcagaatcagagaacgtgatgaaaccataacctttagagcggcctgtatctgaagtccttcatcaggacaatattatcaattttaccaaagggctcaaagatgccccggagcatgtcttcagtgatattgaagtgcagggaacccacatagaggcgcattggtccaccattgcccttttgcaggttgttggccatggctgccagtcggtttttctctgcctgtgaagcctgtacaatgataggcactcccagcaaccgctgcccagtcagcccaatggccagtggcacagactggatttcacagaattccacgtaggcaatgcccttagaacgacgtgagttccgatctgaaatgatacgtacatcgcgaaccttgcctacagcagagaaaaagtcctccagatctcgaggccgaattcgggcagctaactgcatacagaaaactgtgcgggcatcacgctcctcaggactcagattatcaactggctccctgactgggctcttctctctgaaatgaggactcttactgtgtccatacctataaccagtggcaagtggaggactcctgtaatgcacacgatcctcacgacgatggtcccgacttcgcgactcactaccatgtcgacgatcccagctacggctacggtgacgacactgccgacctggacttcggctccgactatttctccgtctataccgatcccgatctcgactacgattgcttgtctccccgatggtgctgcttccactggtctcattgccactgttgctggtgctgctggtggtattgctaggataatcctttttaacttctttcctttgttgctcatcctcttcttttttatagggagcttccagcatggcctcaatcactatgtcaaagtcatcagatgccatcctgtcagatcagttccgggtccccgcagggggggtcccggttctctccgttcctttgagtatgttgtggggagtggagctcggatagttcctagagtctaggcaagaaaagcagcactgcaggtacagcgcctcctcttcccgcaaaat

SEQ ID NO: 54051 - DNA, 947 bp, Homo sapiens
gggggcgtggccaagatgcgccgtgcgtgatcctcgggtaccgggagcgaacgaggaggttctggctcagtgcatccactctgggagagcgtggacctggttcctgggggcgatcgacagtcacccatcaacattcggtggagggacagtgtttatgatcccggcttaaaaccactgaccatctcttatgacccagccacctgcctccacgtctggaataatgggtactctttcctcgtggaatttgaagattctacagataaatcagctgcacttagtgcattggaacgcagtcaaatttgaaaactttgaggatgcagcactggaagaaaatggtttggctgtgataggagtatttttaaagatttcggaaacttctggcagcccagtgtctactgggaaggcccaagccgcttgccagaaagctgcgccccgcccaaaagcactgggttctgcagtccaggggccttcctcagctcccaggtccaggagaactgcaaggtcacctaattccacaggaagcactgggtccgcatccggcccctccgcaccactcctcccagctgggactacacccgcatctgcatccagagagagatggtccccgcccgcatccgcgtcctgagagagatggtccccgaggccctggaggtgctttcccaacagcgtgccgctgctgagcaacatcaggcctgatttctccaaggctcccctggcctacgtgaagcggtggctttggaccgcccgccacccccacagcctgtccgcagcctggtgaccgtgaaaatcgccccgccagagagcagaggaagcccgacgcccaggccatctgccttcaggtctgtgatgagaaacggagtggcctgttccgttgtgcccaggtctaggccgctgagcagagccctcactcccaggcagagttgtctgaatccttctgtgcggccgca

SEQ ID NO: 54052 - DNA, 1039 bp, Homo sapiens
  misc_feature (1)...(1039): n = a,t,c or g
gaattttggcatttgctaaaagtaggaaaaacagtaacatattactgtgcccagattctaataaatatagctcaattgaaaccaaaactgttacattaaacaaattacactctggcactatgctaaatcaccacagatgttttaggtgtttgatttccaagcaggatggtatatcatttgtttggttcaatatatgaggcaccatttgtagtcttttaggaaataaattagcttttatcacagatttaggaaacttgtctaaaaaaactgtgatcatcagttacagagggaaggaaacatattgaacacaaggcatcatagtagctggaggccttaaaaattatgcacgaccaaaaagaatgatctggtgagagatgtgtagctgattgacaattttagtgtgaattcatattcatttaacccagcagcaatctacataagctatgctttttcccgcctgtatttatgtttcttagcttataaagtcccaatatattatatcttttgttgctttggcagttttaatttagagctctgcgttcacagagatgccacctatagcaaaaactatctttaagaattggaaaataaaatgaatgttttagataaaatattgcaagccattatgtgtagagttaatgtatggaaatttgcatttgtttttctgaatcatggtgtacattaatcactcattgaattctatttctaagcaaataagagaatcaaacatttctaaaaggaacatatgtcttgctattaataacaaggagacaggtaaaatagtaaggtaatataagcaaaaaagaaaaatgtaatgaatttagctatcctaaattggaatttttacagattgcatgcatacttagaattttaaatttttaaaagatttacaattgagtatggtacccacagagagtgagtaccaagggaaggaagacctaatacaagtgatgttgcctgataaatcacatcttgccaaaaaaaatatattntagtaaatacagttctttaggaagaaaaatgttgccctttcacactc

SEQ ID NO: 54053 - DNA, 540 bp, Homo sapiens
agctaagccactcggggcaggccagcaataaaaactgtctgtctccatcgtctcatcctcctttcagttcgttggtagagccctcagaaccatttaagagactctttatttttctctttctcccttttttttttaaatttttatttttacgtagaagctcttggacaacagctctcgttctccttccccatttccactgtatattttttaatgtattcccttcagggattccctgtccccaacaggaatttttaaaccaaaacaccccaacttggcagctttttctgtggaggacagacggccgggccgggacctctgagcacatagtgtcctgcccaccctaccagctcctccagccctgccgggcacatgcccggggggacgcctgccctgcccaggtggcctcctggcctgccctcacctctgatagactttgtgaatctgaactgctctactttgagaagatgaccggtttggagtaatcagaatgaaccctcctcctttttaaggggtttttttttttctttttctaaaaagcta

SEQ ID NO: 54054 - DNA, 938 bp, Homo sapiens
  misc_feature (1)...(938): n = a,t,c or g
ttcagagggatctaacccggcacattagtttgaagagcaaaactggagtacaccttcctgagccaaacctcaatagtgcccgccgcattcgcaatattagcggtcaccgaaagagtgagacagagaaggagtctgggctcaagccaaccctacggcagattctaaatgcatctcggagaaatgtcaactgggaacaggtcattcagcaagtaaccaagaaaaagcaagagctgggcaaaggcttacccaggtttggcatagaaatggtaccccttgttcaaaatgaacaagaagccttagatttggatggggaacctgatctgtccagtctagaaggattccagtgggaaggtgtttccatttcctcgtcccctggcttggccaagaaagcgaagcctttctgagagcagccntgatcatggacagagctccttctgtgtatagcttcttcagtgaggaaggtacaggcaagaaaatgagccccagcagatggtttcacctagtaactcattgagggctggacagagccagaaagcaaccatgcacctcaaacaagaagtgacacctcgggctgcctccctccgaacaggtgaaagggctgaaaatgttgcttacccaaaggcgacatagtgcacaattatcctctgaccatataatacctttgatgcatttggcaaaagacttgaacagccaggagaggtctataccaccgtcagagaatcagaattcccaggagagtaatggagagggaaactgtctgtcatcaagcgcatcctcagcccttgcgatctccagtttagcggatgcagccacagatagtagctgtacctctggtgctgaacaaaatgatggccaaagtattagaaagaaacgaagagccactggagatggatcttctcctgaactnccaagtcttgagagaaaaaataaaagaagga

SEQ ID NO: 54055 - DNA, 386 bp, Homo sapiens
ggacacatgtaagctcggtagggccagacgccagagaagaaaaagctggagcatggcttatggatggtgagcacaacctgaggtggatagctgctgaaccacagcttcgctcagtgatgaccttgaaagaaacacaaatacttctgatgggcagagcttcaggcaatgcacctggccctccgctgtgtgtgggaagaggagcagcctgaggtcaaaacaccggggctgagaggcagcagtgaatggcttggccagctcatcaggggcccggaaggagaaagatgagggacaagaggcctggagcagaggttgatggatgggcgtacaggagtgggaattaaagaggaaggtctttgcgctccttccaggaagcatctgcaccaaac

SEQ ID NO: 54056 - DNA, 1764 bp, Homo sapiens
tttttttttttttttcacagtgagaggcacggtttattgccaggttataccctaggacggtgtccttccctccctcctagggtgggaggtcatgtgcgggagttccgctcctcttcttcgttctccagtagataggctggacggtatgtggggtgtcctcctgggctcaggcacttcagggccgggttccgcacggtattctcccgactccccagtgatgtgtatcctcggtcatacaggatacagtatgggacaaacagctgacgcagaaaatcccagatgtctctgtaggtccagtccagcagtgggttgatgcgcatgaatgcgggccagcctgggtcagtggggctgaaagggcagaggctacaggagtaggggtcagtccggcgggtgcccataaggacagcctccagctgggggtgccgtgccctgcagttcacccagggcctgcttcatgctgccctcagcttccaacatctgcagattatacctcttgatagtgtcctgtagaaactgttccagctcagggaaaggggagatgctgcggatatacaggatctggagggggtttggaacatcaggtaatttcctctgcacagctgcatggaagaggtgcaggagggcagtgcagtctttgcccccgttgaagcccacacagagctgggtgaggctgtactgagccagggaggtctcaatggtctgtagggcacctgccacctttttccccaaagaagaccctgattcagcgagtttgtatacagcctcactggcctgctccacagcgttgggcatgtaggggaccagcgatccctggggcaaacgggcagtcaggtaggccaagcattcctccaggggtccttcttcctctgagtctagagtcagcttcacctgatagtagttgctgccccagtcagggtaggaacccaggccaagcctacgtccaaagtgggcctgggcctcagccagaatgggggcgatggaggcttcatcagcagccacatatagctcctttgagtggaactgaacagctgggttttggaatagtcccttcatcccctccagcacccgccgcagcagctctggaatgcctgggaagaggtagacgtttcggacggagaccagagggaatctgaaaggttgaccagtgcaaggatctgtgccataatgcaggcgggcagaggagggcacccaatgatagcttctcccagccttccccctcctagggctttggtggctgcttcccaacttggggtgtggcttcagctcatctccaaaggcctgtgccactgcctcaaaggtcacatcatcatgagtggggccgatgccccctgctgtgaggacatgggtgaagcggttggagaaagaagtgacctcagctgcaatggtggctacctcatcaggtacaactgagactcggcaaacctggacccctagggagcgcagtgtccggcacagaaagaaggtgttggtgtcctgagtgtgtcccttaaggatctcatctccaacaatgatgatgccagccgtcacgctgcgccccggagaaagttcagaggccctagatgtcatggtcctgccttctctgcccctctgcaaggccctccagtagccacccagacccccaaataggggtcgcaagcacggggggcctgccaggtctacagggcactgggggccatagcctgggaacagggggtcctgggtcgagggaacctgcctgttctgccccttcaccggctctttcccttgttcctttcctcatgtccc

SEQ ID NO: 54057 - DNA, 1029 bp, Homo sapiens
acaatgtttcccattttttttttattttttccctctacatttaactattaaaaaagttttttattaataaatgggctcctctgtggttcatatacaatcataagtgaactttaaattccattttatacaaacatctcaaaaaatattgggagtgaagtatggtaggaaatattgctcacattgctaattaacatgcgtatatgaaaggaggaaaatgttttgttagtgcatatacctccagagcagaaaacccacccaaaacaaaagatctaaaataaaacatacagtagctgattacaaaaaaaggtaatgtccacaaaattaagtttttcatgctattctactttccagtactatgcttcaggtaatcaatttgcatggctagatgttggatacttgaggtatataagaagggaaacctgcatgttgaggaaaatctgtcatcttaagggttgtttctttttgtttgtttatcctggtactttaacatttttaaaagatattttatttacatcaaaattcactgaactacaatgacattccaattataatagatgacaaacaacgcctctatcactaggcacttttaaaagggagttcaggctttacagaacccttctgatgcaatcccatgtatgatatgacatcatcccaccaccctcgtcccactaaaattaccctctggggaaatattaccttatatagcctgattaatttactatggaagaaattagcataaaatgaccaaagtaaatgcatcatttaagactaataaaacagccgaagatgtcaggtttgaaagaggagacaaattgtgtatatttaaaactaattaaataatttaaatttgacctatactttatatattagtgagacacaaatataggctattgtcttttaaaatttcattcacataatggaaaatttcttgtttattaaaaatatcacattttgagactagaaacagtaaagtgcatgaaaagtttaaaatataaatttcagaaaactcttatagcagcaaaaaagcag

SEQ ID NO: 54058 - DNA, 387 bp, Homo sapiens
cccacgcgtccgtggaatcttataacttgaagaactgccctggagaaaggaagaaacttataataaatgggaaattataaatctagaccaacccaaacttgtactgatgaatggaagaaaaaagtcagtgaatcatatgttatcacaatagaaagattagaagatgacctgcagatcaaggaaaaagaactgacagaactaaggaatatatttggctctgatgaagccttcagtaaagtcaatttaaattaccgcactgaaaatgggctgtctctacttcatttatgttgcatttgtggaggcaagaaatcacatattcgaactcttatgttgaaagggctccgcccatctcgactgacaagaaatggatttacagccttgcattta

SEQ ID NO: 54059 - DNA, 811 bp, Homo sapiens
  misc_feature (1)...(811): n = a,t,c or g
cctaaatgacataaaggacttaaaaatcgaccagaaaacacctttgcgcgtccttcaccgaagcccctggctgtgcgagctcgcgtcattcacttcatggagacacagtacgtggatgagcaccacttccgcctccacttgaaaactcaggctggcacctacattaaagagtttgtacatggagacttcgggagaaccaagccaaacattggggtccctgatgaatgtgactgcagacattctggagctggatgttgagtctgtagatgttgactggccacctgctctggatgactagctttcaaatttggagacaaagagtatggttttcctggcatgatgtggacatccatggagcacatgccgtaaaatggctgtttacccaccataacggtgtcttgaaaactatttggatcatgtngatctatataattgttaatttgttgnaacatctcaggatctatatatgtgtatattttgtgttaaattgttccaaggatgtcttaggatttttctcattccctctttcacccccacaaaccaaactatgaataatgaaataattctccttaattctttcatttagagaggtgcacaaacaggacacattctctgttaacctaagaagctgtaatttcagcaagatttccctccacaagagatataccacctttaaaatcatgttctaatttttgtaaattatctgaataaaagttatatctagatttatgcagcataatatcctataatagtctaagattgcaaatgcaaatctgacatcattattttccccaggaagcctcaaacaagc

SEQ ID NO: 54060 - DNA, 779 bp, Homo sapiens
  misc_feature (1)...(779): n = a,t,c or g
gagaaaggaacactcaagtaagtgtgggcttcagtgggaattatcacaaaacattggcaagtatttttatttaaattattttcaaatttgacttctacagccaagtggaattggtaggctgtagctgttacactgaaatttctagtctttgtaagtgcctcctgaaagtcatttaaaatggaaaaatatttcaatgagcttttccttttttcatatttatggacatgaatattttattggagatcattaactcctagaatttgagattatatttccatacaacattttataaagttatgttgaacttactacctgttatgtgcaggttattatggaaactattcacagattgcttcatatattgctttatcttcccatctaacttcttaaagttaaaatccggacacacatgttgattatctagaccagtcattctggaaattgtaacactcccacataaaccccaggagactttttcagaatgcaatgtttctaaatgtactgttactggcagtttactctccagcatataaggttgcattttaacttttagattatgaactgtggcaaactttacccaaaactatcttggcatgattccctcctaaatatattccttgattaaggtaaatctgggcaaatcactgtttgaggctaggttacattaaaatttgttattcaggagaagggnttttcttacaagttttccnggatttaacattaaaggaaaagagggggattcacgggggcattttaggtggcaccttccccntttactt

SEQ ID NO: 54061 - DNA, 646 bp, Homo sapiens
gccctcccgcggggcgggtactcgtctcccggccgagcgacttcagctcggggacctgccccatggccgctccccagcaggacaggggaaccgccgaggtggggggcttcttgtccgacccagcccccccaactcaggccctctcgctgcccctggcgaccaccgcgtgcgcccttacccagggcgggcgcagtcctggacgcctccgccgagcgagactgcgtgcattttctctcctttcccttcccaacctgcggagagaagacagccccagagccgctgtctccatcctctgctgatgcctgctgtctttatgttggcctcgtcgtccgcactgcagtgtggcaggggcgtcctcgtttcccgcggactgaggtgggcgccgggcattcagtaaacgaagaaaccaaagcggagaaggttgggaatcaaacgtctgtcatatctgccaccagcagacaagcggctttgggtacctcctggacccaaagacgaactcagcccctccaggagcgcagtcattggcaccctcgtgggaacaatgccagtgggatgggtggccaccggatgtttccggggcccctcagagcccagcaagcgcaagtcttggagaatgaatgtgggtcactgggccccgcttgcaaag

SEQ ID NO: 54062 - DNA, 660 bp, Homo sapiens
aaaaaaaattcttttaattaaaaaaaaaaaaagctttactacttcctgtggagttcataaaaagttcttccctttgttttagtcatccagagtaaagtcatagggctcaaagtctttccggaagcggcgagccagggtctcctcgtcttccttgctgatctgacactgcctccagtcagacttatcaggaacattaaggatggcttcactggccaggacctcccttccaaactgcaaaggaaaattctttttaattctgtggaaaagcttttctcctgtgtcaagttcaacataaaaatatgctgctcctggctgtgcaatctgtagctggaggtgatggctcttataatttctctcaaatacaacacaccatttccctcgactcttaaagaaccgtctcagagtggccttatacttctccacctcttctaccacctctgctgaaagctccaccactgactggtagtgtccaataggcaggatgaggacatggtcatcagataagcctcctttggccagggcaaggtagcaatgtgtgccgatgttgaccaccaaatgtttttccacttcagggctagcaaggcaaaaccagcagggtcctggaggctgaggaggtttgcgaggctgctttggatgaggagaagatttgctagctctctc

SEQ ID NO: 54063 - DNA, 340 bp, Homo sapiens
gtccactgtcttgggccagacctgcttcagatcaataacaacccatgttactggggagtgatggataaatacgcagccgaagcactactggaaggaaaaccagagggtacctttttacttcgagactcagcacaggaagactatttattctctgttagttttagacgctatagtcgttctcttcatgctagaattgaacagtggaatcacaactttagctttgatgcacatgacccctgtgtcttccattctcctgacattactgggctcctagaacattataaggacccaagcgcctgtatgttctttgaaccacttctatccactcccttaattcgga

SEQ ID NO: 54064 - DNA, 1363 bp, Homo sapiens
  misc_feature (1)...(1363): n = a,t,c or g
tctcaaaaaaaaaaaaaaaaaaaaagctgctgaaatcaggcagcgcctttcagattcccggcccaggtgatttcgtaactcctgggcaccctggctactgcccttcctaggccctgccattaccctcttcctccatttagcacttggcccatgtctcttacatctccttacccagtttttacagggccgtgttaggagcctttcacccatgggaacagttacaaggacatgatggctacttcgaggaattacccgacagctccagggaacagcagtccctacttacccagccttttccccccaaccattcgcccctattcagcaagaagcagccagagggacaacgggcgcccctcttctattacctattaaaaggctggaatgttaggaacaagttgcaccagaacccctccccctccccccccggcccccggcccccccctccccaccccaatgcagctgtcccttaccctgaatactctgcagctgcattcctggacccttatctaggcgctacagcaaggtcaccagacttgctttacagccctacgggcagcatgggggaggtcacgagaaacgtggataaacctaagttacaccctcttgtaaattcctatattgtaacctggtcacgagatgatatgtggtaaggttaaccaacaaacaaccccagggtctctctcccccatataaaaccctcattttgtaagctcagggctgcctcctttgactgtggtgaagcagcctggcaggttagtaaacttactctcctgaccttgggtctctctctcatcctttctcttggctaaccttcattttggtgccaaaacccaggaaggggataggctctggctgggcgtccttagaggattctctctctctctctcctatcatcccttacccagccaacctccccttcccgaacctgctaaagaccctaaggatctcccaaaattctcccattgttgggccacctcatccaccattcaaagcctctggagagggttttttacagggccgtgttaggagcctttcacccatgggaacagttacaaggacatggatgctactccgaggaataccgacagctccagggaacaggcagttccctaattacccagccttttccccccaaccatcgcccctattcagcaagaagcagccagagggacaacgggcgcccctcttctattacctattaaaaggctgggaatgttagggaacaagttgcaccagaacccttccccaccccaatggcaggtgttccctttaccctggaatacttttgcaggtggatttctggggnctttattttggggggttacagnaagggtcancagatttgntttacagncttaggggg

SEQ ID NO: 54065 - DNA, 1499 bp, Homo sapiens
tttttttttttttctccgtacaagtattttatttccattacaatagtgccacgccaaaactacagtagctcaaaacataatacaaaaaatagattcccagctcccaaccccacgtccacgcacccacagagaagccagccctatggctccccaggcctaaggggaggggtctcacttcattttccttaaagctctggagcgggtagtggcagtggcaggggcttccacccctgctgggcctgagccctcttcttccccaaccccctgccggccccggcagacctgagccatgagtgtggtctccattccctcgggctgcacccccagccctaggacacctgcctgtgtccagggagggggtccaagcccatggtgctggtgctgacactacaggaccaccaccctccacgcggaaggcaggagggtcgggggaggggaggcagaggggacaccatggctgggagaagcccgcctctatgtggcaaggggactgcggctggcttctgcttcagctacttctcgggttcctgtctcctctgcagagctaccaggactgctgcgtgctgggaccaggacctccatctggaatccactctcgataccctgcaccagcttggaggcagatcccaaggtggcaggggtgtccctgtgccgtctgcttcctctcgggcaggaggattccagcttcccgggtgaagggaaaagcactgtcccaggcagggctgggccaggaggccctgggctgctgaaggcgggaaagcggtggctgtggaggcacgtgctgccccaacctccgtctcggggcctggcttccccactggatggcagaggccgctcccaggtgcttccacttggtggcgcccatgagtctgctactggagaagctgtggtctcagggaggagacagacaccacaggccagactgggtggaggaatcttcccctcacaatgtcccctggctaaaagcatccatctagctgcaagtactatcttgattcaacccaggggccgacaatggactgcagcccagggtaagtccagcagttttgcagtcttccgatgccctgtgccatggacctgccggccagagctcctgggctcccgtggaggttagccctgcaggcaccggggaaatggggctatggcctgtgcttcagtcaggacacctgggggctgcactgcggaggccaagggcatctaggagcaggggctgtctccttggggtggagactggcggctgcagcctcagataaggcactagaggactggactggtcctgggagccaggcccagccatgtggtggatgacggtgctcagagagaggatttgggtcctgcgggaggtgacagctgtttctcttttctttttttttggtgaggcccagggtggggagcgagtgctcagccccgttcttcttcacccagttctggtaagcccgataggccgccttgagacccccgttgtcggcgatgttctcccccagggtgtgccgcccgtc

SEQ ID NO: 54066 - DNA, 450 bp, Homo sapiens
ctttggagaaggagagaatctccctgaggctctgcaaaacattcaggatgagggaacaggggaacagctgtctcctcaagaaaggatttctgagaaacaactaggtcagcatttgcctaatcctcattcaggagaaatgtccaccatgtggcttgaggagaagagagagacctcccagaaggggcagccaagagcccccatggcccagaagctccccacctgcagggagtgtgggaagaccttttataggaattctcagcttatttttcaccaaagaactcacaccggagagacatactttcagtgcaccatctgcaaaaagcctttctgcggagttcagactttgtgaagcatcagagaactcacacgggagagaagccctgtaaatgtgattactgtgggaaaggctttagtgacttctcaggattgcgccccacgagaaaatccacc

SEQ ID NO: 54067 - DNA, 1054 bp, Homo sapiens
acatgattacgaatttaatacgactcactatagggaatttggccctcgaggccaagaattcggcacgagatcgaaagcgttggagaggtgttaccggaacggcggcgacaagggtcgttcccgaactagagtggggcatacataatcttgctgctatgccttcgaagctgtagtctgaatcaacctaagttttaaacagaaggtgaacctctgagaaaatccagtatattttaaaagaagggatgtgggatcaaggaggacagccttggcagcagtggcccttgaaccagcaacaatggatgcagtcattccagcaccaacaggatccaagccagattgattgggctgcattggcccaagcttggattgcccaaagagaagcttcaggacagcaaagcatggtagaacaaccaccaggaatgatgccaaatggacaagatatgtctacaatggaatctggtccaaacaatcatgggaatttccaaggggattcaaacttcaacagaatgtggcaaccagaatggggaatgcatcagcaacccccacacccccctccagatcagccatggatgccaccaacaccaggcccaatggacattgttcctccttctgaagacagcaacagtcaggacagtggggaatttgcccctgacaacaggcatatatttaaccagaacaatcacaactttggtggaccacccgataattttgcagtggggccagtgaaccagtttgactatcagcatggggctgcttttggtccaccgcaaggtggatttcatcctccttattggcaaccaggacctccaggacctccagcacctccccagaatcgaagagaaaggccatcatcattcagggatcgtcagcgttcacctattgcacttcctgtgaagcaggagcctccacaaattgacgcagtaaaacgcaggactcttcccgcttggattcgcgaaggtcttgaaaaaatggaacgtgaaaagcagaagaaattggagaaagaaagaatggaacaacaacgttcacaattgtccaaaaaaaaaaaaagtcgagc

SEQ ID NO: 54068 - DNA, 379 bp, Homo sapiens
gaaaaatgttatcttgtaaaaggaaatatttatccggtcccagatagccggtttcctttcctaggagttcacttcacaccaaggatggatggcagtatttggctagggcctaatgcagttcttgcctttaaacgagagggttacagaccctttgacttcagtgccacagatgttatggatataattatcaatagtggcttgattaaactggcatcccagaatttttcctatggagttactgaaatgtataaagcatgttttcttggtgcaacagtgaagtatcttcaaaaattcatccctgaaattactatcagtgatatacttaggggcccagcctggagtaagagcccaggccctggatagagatggaaatctggta

SEQ ID NO: 54069 - DNA, 353 bp, Homo sapiens
attgtgaatagtgctgctatgaacaacagtgtacatgtatttgaatagctgttttcagttcttttgggtatatactaggattagaatggctattaatgtacatttaagttgcttccagtatttgcagttacaatactgaaattgatattttatatacataattttatacatgtgtgaatatatctgttggatgaatagctaaaagtgcgattgctgggccaaagcattgtacatttaacaatgcatttgaattttgaaatatgttacagaattgcccactatggaggctgtactatttatattcccacttacaaagtatgagagtgcttcatctttccttagcttttaggaat

SEQ ID NO: 54070 - DNA, 374 bp, Homo sapiens
cggacgcgtggggcgtcaccctagttctgcccctttttagctgtgtagacttggacgagacatttgacttccctttctccttgtctataaaatgtggacagtggacgtctgtcacccaagagagttgtgggagacaagatcacagctatgagcacctcgcacggtgtccaggatgcacagcacaatccatgatgcgttttctccccttacgcactttgaaacccatgctagaaaagtgaatacatctgactgtgctccactccaacctccagcctggatgtccctgtctgggccctttttctgttttttattctatgttcagcaccactggcaccaaatacattttaattcaccgaaagcaaaaaaaaaaaaaa

SEQ ID NO: 54071 - DNA, 370 bp, Homo sapiens
ggacagttaaagtcaacaataaattttccaaagaaatgtgtacaagtttcacagttttttaaagttttacagcagaacttgctccaggttatgcttcaagaaaggatgacaaaaaacagaaaacaaactgaagtagccaaattagaattggaatgaaaatgatatatttgtattgtgggaaaaagacaacttttgataaatagaagaacatttacatcagattacctcccagtttttgcttagacttagaattaagaactatttataaaggaactatttgattttaaagtaatattgtaatgatacagaatagtacggcagctcactttccgaacttgagggagataaacataatttccattaagaaaat

SEQ ID NO: 54072 - DNA, 382 bp, Homo sapiens
catgaggtgggaggtggtgtgcgtgggggtctgaatatagttctgaaccggaaatggctggcccttgccagcctggtgtgtgatgtgatgagtttgggaaggacagtttccatgagaagcagtggcagggatggggatggatgccttcgttgttccaggcctgtcagggggcccaggtccctagcagtccctgccctctgccctggactggaagctgactaggagagctacgaatcagaacaactggccattttctagctggagatgccagctccgatggcatggagggccctggggccaccccaggtgtctttacctcatcctggtgtgtaataaatcactgaccatggagccatcatggctgaaataaaaaaaaaaaaaa

SEQ ID NO: 54073 - DNA, 1694 bp, Homo sapiens
cggagaaacccctggtgctgtccacctcgccttttcacccggccactcactggaaacaggcgctcctctacctgaacgagccggtgcaagtggagcaagacacggacgtttcaggagagatcacgctgctgccctcccgggacaacccccgtcgcctgcgcgtgctgctgcgctacaaagtgggagaccaggaggagaagaccaaagactttgccatggaggactgagcgttgccttttctcccagctacctcccaaagcagcctgacctgcgtgggagaggcgtagcgaggtcggaggggaaagggagatcccacgtgcaagtagggggaatatctcccccttttccctcatagcctctagggagggagagtgacttcattctccatttgaagagattcttctggtgatgtttacttaaaaagtgatccccctcaacaacggatacagcgtgcttattattgggcatttagcctcaaaagcatgtagtaccaagcacttgtatttccgtatattttgtttcgcgggggagtgagggggaagaacacggatgaaaatgtcagtttttgaagggtccatgcacatccctgacacctcacaccttatctaagtctgaagctggggagaaaggggttcatttagacttcatacatttccagtacgactttagtatctctccagagccatattttctcagtccgaattaattccccctccctaggtgcctgtaggctatggtacttcttcctcattgttttctaggtaaacttcactactggtaattaaggggaaggatatgaggaagcagtttaaatagccctgttctcattactctgaccacatacatcatagggtgctaaagttgatgaacacattaatccgttaagtaaaatggactttgtaattgtacagcatacctaagaaactcagaaggtgcatttaagagagagacctgaaagaaatagtatggatttttaaaaattcttgtctctactattataaccaaaaaatatttcttgtatgtcccataaaaatatttgtgtaattcttatgaaacaggctggtagaggaggtttctgagcctagcccaagggcttattcatcaccatgggtaaattatttaaactcacttaattaaggaaaatattttcccagctagaaaagtatactcattctcatttaaactctctcatttggagggatcatgtgagttggcctacttacaagtagtgaaagttcccttttcagttttgttttgttttgttttgtttttctctttcactcagccaaatgtgaaagttgtgaatttaggaaaatcacttgtaatgaagtgtgaatcttgttatcaaatttatttctctgatgtttccttccttatccttgtagccaataaaacattgacattctcacgttttatagatgaggtaaaaagtcttgtgtgctgtgagttataatgcttttgcctttttaatattattagttcttaagtgttacagccccttcagaatataacttcaggacaattcaaactatgcttaatgtatgattttcgagcttctgtatgctaagaaaataggtgtgaaaaactggtgttctgaaatagcctaacatttattgtaattctgaattttctgcccttttattcattgcatattaaagtattagagtataaaaactaaaaaaaaaaaaaaaaaa

SEQ ID NO: 54074 - DNA, 972 bp, Homo sapiens
  misc_feature (1)...(972): n = a,t,c or g
ggatgggatacttgaattaatcatgacagcgttacagattgcttcctttattttgttacgtctgttcgcggaagattaaacttaatgaaaatctgtttgtattttctgcatattctctggcaaccttgccccatacttacttatttagcatagtcgagtgctctagtttctgtctctcaggcactcgtaactaaggaccaccattggccattggtagatgtttgattgacttaacaagagagggacaaattttcaatttgtgaaactccaaagcagaaagtattggtgcttgctaccttgtgaattcttccttagacatgcagagaaaatgtatgcaagagaccaaaaagatggctccaagctatgtcatgttacctgtaataaaatcttttcttctagattctttctatgttggcagataatctccccttgtagcttccactcacttattcttgcattcagagtcacaatgatcatcttacccatgtggtttttgagaaagaaagatcaattctttgtttgcagtaggtaatcttagagatggagatgattgtagaattattcctagatgagtgtcaatttatttaattccattgtcatataaggagtcaaattgtttcttatcatttgttcattgaagaacagagacctgtctggaaaatcgatctctacaaattcaattaaataatgatccccaaatgctgaaaaagtgaaatacagcaattcaacagataatagagcaatgtttagtatattcagctgtatctgtagaaactctttgacgaacctcaatttaaccaatttgatgaatacccagttctcttcttttctagagaaagatagttgcaacctcacctccctcactcaacactttgaatacttattgtttggcaggtcatccacacacttctgcccccactgcattgaattttttgcttatgttgtttataataaaanatnntatttatctca

SEQ ID NO: 54075 - DNA, 2559 bp, Homo sapiens
tttttttttttttttttgaccagtgtaaataacaaacatttattggtgtcacttatggtagaaaaaacttcctacaccagatgcacatgacccagttgttaaatagaacattttgaaggtgaacacacaccctaacccaggttttttacccgctttttaagatggccaattcttcttctcccccccacccaaagacatgtgagcaactgctaatgaaaagcagtaaacagccgcttaggctatagcagtttcaactccactctgaggtgaagattccaattacattcgagacttaagttctttcaattttttcctaacaaaagttcctgagtccagtatttacaatattacagcactagcagatcagtgtctacaactcatctttttctgctgtatcctcttcaccagttgggggagggcctgcacttccatagagtttgctgataattggttgaacaatttcttccagttccttcttcttagctttgaagtcttcaatgtcagcatcttggtggctttccagccattcaatcttttcttctacagctttttccatggtctccttatcttcagaggaaagtttacctcccagcttttctttatctccaatctgattctttagagaataggcatagctttccaactcatttctagtatcaatgcgctccttgagctttttgtcttcctcagcaaacttctcagcatcattaaccatcctttcgatttcttcaggtgtcaggcgattctggtcattggtgattgtgatcttatttttgttccctgtacccttgtcttcagctgtcactcgaagaataccattcacatctatctcaaaggtgacttcaatctgtggggaccccacgaggagcaggaggaattccagtcagatcaaatgtacccagaagatgattgtcttttgtcaggggtctttcaccttcatagaccttgattgtaacagttggttgattatcagaagctgtagaaaagatctgagagttcttggtaggcaccactgtattacttggaatcagtttggtcatgacacctcctacagtttcaataccaagtgtaaggggacatacatgaagcagtaccaggtcacctgtatcttgatcaccagagagcacaccagcctggacagcagcaccatacgctacagcttcatctgggtttatgccacgggatggttccttgccattgaagaactctttaaccagttgctgaatctttggaattcgagtcgagccaccaacaagaacaatttcatcaatatcagacttcttcaaatcagaatcttccaacactttctggacgggcttcatagtagaccggaacagatccatgttgagctcttcaaatttggcccgagtcagggtctcagaaaagtcttctccttcatagaaggactcaatttcaattcttgcttgatgctgagaagacagggcccgtttggccttttctacctcgcgccggagtttctgcacagctctattgtctttcctgacatctttgcccgtcttctttttgtacagtttgatgaagtgttccatgacacgctggtcaaagtcttctccacccagatgagtatctccattagtggccacaacttcgaagacaccattgtcaatggtgagaagagacacatcgaaggttccgccacccaggtcaaacaccaggatgttcttctccccctccctcttatccaggccataagcaatagcagctgccgtaggctcgttgatgatcctcataacatttaggccagcaatagttccagcgtctttggttgcttggcgttgggcatcattaaaataggctggtacagtaacaactgcatgggtaaccttctttcccaaataagcctcagcggtttctttcattttagtgagaaccatggcagaaatttcttcaggagcaaatgtctttgtttgcccacctccaatatcaacttgaatgtatggtttagttttcttttcaaccaccttgaacggcaagaacttgatgtcctgctgcacagacgggtcattccacgtgcggccgatgagccgcttggcgtcaaagaccgtgttctcggggttggaggtgagctggttcttggcggcatcgccaatcagacgttccccttcaggagtgaaggcgacataggacggcgtgatgcggttgcccctgatcgttggcgatgatctccacgcggccgttcttgaacacgccgacgcaggagtaggtggtccccaggtcgatgccgaccaccgtgcccacgtcctccttcttgtcctcctcctcggcccgcgccgcgctgagcagcagcagcatcgcggccaccagggagagcttcatcttgccagccagttgggcagcagcaggcagtccagccacaggccgtagcacaggagcacagcgcaatttccgacttgcaggcggcaggggcccggggtcacaaggcgccacgaaccaggcgaagggcaggtctagaaatacaggccgcggcgcttccctctcacactcgcgaaacaccccaataggtcaatctgtctgtgctgtcttggccggcgtcgacct

SEQ ID NO: 54076 - DNA, 752 bp, Homo sapiens
  misc_feature (1)...(752): n = a,t,c or g
tacgaatttaatacgactcactatagggaatttggccctcgaggccaagaattcggcacgagcttaaactaactccagtgcatgaagtgtgaaaatattttaaaatgacatttttactaatatgagcaagtcatgtaaacattgaagaacttggtaacatattagtaaatggatattaccaaatgttttcatcgttaattactttgcgttccaccaaaatatctttactaaaatgtgcttggtgtagtttgtttattgtctaaattagtaccagtcatcttatttctgcaaaatgagtatcaatgtgaaaaagacacgtgaagattaagcatgtttgaaaataaaatggtcaattacatttcaatttacataggccaacaactgttccatactttgtttgtaaacatttaatttctctactggacaaaattaatatttggctttacattgaattttgagctgtgaagaataaattatgtatcattttagcatattaaacagtagtaagtctagcacatagtctcagccacttaaaacaaaagtttttttgtttgtttgtttgtttgtttttttgagatggagtctcactctgttgcccaggctgggagtggcagtggcgtgatctcggcttactgcaacctccgcctcccggggtttcaaggcggatttctncccggcctcaggcctcccangttaacnggggacaacagggggcgtcccaccacanccggttatttttttattantttagt

SEQ ID NO: 54077 - DNA, 735 bp, Homo sapiens
  misc_feature (1)...(735): n = a,t,c or g
cctttttaagctaaactaagccttatctgcttaaggatgttgaactgaatcactccctttactcatcctgtgcatatgtgtacaaatggtcatgtggatcatgtgatgatcatccatcttatttgattgtattaatgcatcatgctaaacatgtagtacaggttaacaataccagatttatgtcctgttcaacaactcagtactctaaatgttgttatgcttttaataagaccttcccagataataatcttggagctcttttcccagctgtctaccatgcatttgcaacaggaggaagatgtaatgaatatgcagtattaagttgatttatgaacagtgctttgatatgccaaagggaaaactgtcccacttaaattagattaagtagggtggctaaaaataaataaaaacactggaaattctttctctcactttctcttgatgcaatgaagggaatatgacactacagtatacagagttgttgttatatgatgcacaaaatattttgatgatttgaataaatgttaacttttaatctgcgccttaataatgactggttatctgtaaatatagaacagatacagattgtatttttctgtgggtttttgtccttttagtgatttttttccaaaaacgagagatggaattaacattgaaaatgggaaatttttctaactgaatcaattgttacatgaaaaataaatttatataacccctttgtaatantcttgctat

SEQ ID NO: 54078 - DNA, 2213 bp, Homo sapiens
ctggcctccaaaggcattcaggggatcatcaaagatgttggacaccttgtgttcaaatcttggttcaggtgcggcctgtgcagatcggctttttggtttggttgtcttagcctggataccagaggagaagatgtcatccatatcatcatcaaatatagactcatgaagtataatctctcaccttctttctctttcccctgcccaggccctaagttagggttcccatccatataacaaagacttctggtcaggtggcatttgctatctctgggattccctgcccatgaaagccacaaagagatttcttcttttacacaccctgaagcatattatggccccagcaaggctaacttaaatcaaactgtggtttaaaaacaaaacaaaccaaccactgtgaaatatttatttttgttttgtagtattaagcatgattaaaccagtgcagaaaaataccaagtacattgggtgaacgatgagctagctgttctagtatttgctttttgtaatccagttaagaccatcagcatatacaacatcatcactaactcaacaatgtaggctgcagggtaacatgtggataccctgtgtgctctactggcctccaaaggcattcaggggatcatcaaagatgttggacaccttgtgttcaaatcttggttcaggtgcggcctgtgcagatcggctttttggtttggttgtcttagcctggataccagaggagaagatgtcatccatatcatcatcaaatatagacttggcttccactttctttttggacttttcttttggttttacagttaagtcagcaaagatatcaatgttatcatcaaataaattagattccaatgttttctccttctctctggttttctgagagggtttaattgcttccgtagcaaatatatcatcctcaaaaatatcttgtgttgttaatatgacatcctgctgactactggattttgtctcattcttcttgactttctgatctgtaaagaggtcatcctcatcttccaggagaggaaagggatttgttttctttgctggttttggtttagcagactgaaagagatcatcatcactgctggcctcgcctagagcaggaaacatggggctctttgctttaccacccactggtgggttggcaggattctctgctatctttgccttgggttttgttctctccacggactgagatccagtgcccgtggaaaaaatgtccccagaatcaaaaaggtcagcctcccctctggaatgacccagagactttgcaaaggggcttgtgtccactccaggaacagaacacccccccaaggagcagcggcagctgccaggggctcctcagtgctgtcttctcaactggctgctctgagctgtggccgatggccatttggggaaatggcgccatcagcccactgtgcaatgggtcctctggggacgctcatgtcctcagtctcgctggactcctgagcagccagccgcctagctgcacgggtcctgcggtctacgcttccctctcatcttgacacggctcttgtttgcactgtgtaaggtgtctgcctgagctggaagatcaaaactcacaccggcctccccactcccgggaaggacaggcacactttccagaccgtggctccttctgtgttcagatgaaggaaaagccaattctggcaaaacaggctttacttcagagatctgggaagccgctgtgggcagcaaggccgctgggttgatcgctaaatttgcttgtatcttcccgatccgagtggatggttctttggttttaaatggagcgagacctgatgagtcctgaggtgtttccggcttccatatgcctttttctttactaccttgaatggattcaggatgtttctggtttttgaaagagtcaacagagtggtcttttttcactactctctttttctcttgtaccaaaggctgggacttggcagagctgaaaagatcatcatcttcatcatccccaaacaggctcccaacacttggctctaacagcttggtttttttggtgccagcaaaaaggtcaacatctgggtcattgtccttttggagcttgtggctgaaaagcagctcttcatcctggaagacacctgtgctcttggggtgggcatcaggatcgcggccctttcctacttctttctgtggagcctggataatgttttgatcttccattttatcctcttcctcatcaaacaagc

SEQ ID NO: 54079 - DNA, 510 bp, Homo sapiens
aagcatgtgttacagaaagaggttctggtgggagagaaaggtgcgtgtgagacaggagaattgtcttaagcatataaaacatgtatgattccagaattttagtatgttttgtataaaactatttttcattacggagactagaagtgaacagagaattacacaagtgtgactatacaaattgtaaaacagatactataatatttccttttattttagtgttatttagctttattacagatttctatttttgtcaaaacttcatggttcctttcaagatcttttttgccaaaacattttgatactatagcattgtacatttgaaagtagtgttctagactataaaaccaatgaacttctacatgagccctacagacaggcatgtgtagaaggcaatttatcaaacctattgcactgccatgaaaagtgtgtataataatttgctagcccaagcaagctagttttctttgcttgcttcttttctttcttttttccttcctttttttttttttt

SEQ ID NO: 54080 - DNA, 916 bp, Homo sapiens
atatccaagaaagacaccttgacattttttgctttattaaacatcattcactgagaatttccaaagcactgtgtggtgcctagacctgtgtaccagcgctctgggggtcgggagaagtctaaggcacgggccctgcctgtgcgcacggctccttctccctgggaaggcagctccactggtgaaaggccactgaccaagtccagaccctgaggacgacgaaggcctcggggcagaagcctgagagaatcgtgccccactggcagtgggaggcggtgcaggctgggagccctgcccagggccccaggctgagctgtggggaaagctatgacccagtttgctgagagctgcaatgacgaacattggctctgtgcccagaggcccaagaaggccatggactgggctggcctttcctgggaatagcggaaggaggaagaactggggcctagcagggccgtctataccctggagaggcagggcctgaacttctccctttagagcttgcatcaagaggaggctcaggagagagagacttgcatcagaacactccagacagccgatctcccactcagtattcctctcctgggagacccacccagaccctgcaggcccctggcagccacgaggagcagaggccctggagtaatttggcttggggacggtccccaccccaggcccaggccagtcagtcacccaggctacagcttagggtaggggaaggggaggatcccggtcactccttcttactatgcgaacagaggcagaggagggatagaggcccagccccagtttgggtctgtgctggggctggcagaacccgtgggcatgaagctttcctgccccatgtgacacctcgctacggccccacatgtcttgcttcatccttggggctgggcatctggttggcaaggcatccccc

SEQ ID NO: 54081 - DNA, 351 bp, Homo sapiens
ggcaacctacaaccagctctcctatgcccagaaggccaagtaccacctgtgctcagcaggctggctggagaccgggcgggttgcctaccccacagccttcgcctcccagaactgtggctctggtgtggttgggatagtggactatggacctagacccaacaagagtgaaatgtgggatgtcttctgctatcggatgaaaggaagtgctggcctattccaacagctcagctcgaggccgtgcatttctagaacacctgactgacctgtccatccgcggcaccctctttgtgccacagaacaagtgggctgggggagaatgagaccttgtctggcgggacatcgagcaccacc

SEQ ID NO: 54082 - DNA, 88 bp, Homo sapiens
cacatattaactatatgataacgtgtgtttttcatcctttgatcagacaaacaaaagcaaacaaaacaatcttcaccaagttttaaac

SEQ ID NO: 54083 - DNA, 398 bp, Homo sapiens
gttaccactggcagagcaaatatgactcagaaaccggctcctcagggttgtaacattagatgatacaggcttgggtcgttacacatgacaccagtgcctttgtttcattgggctgggctctctggaaggtgtgctgctgcctgagctgctggaaaagcactgacaggtgtttgctagaaaagcactcctggagcttgccaccagcttggacttctagggactttcctctcagccaggaaggattttgatattcatcagaaatacctccagaagattcaaggagctgtagaggtgaagtaagcctgtgaaggaccagcatgggaatcctatactctgagcccatctgccaagcagcctatcagaatgactttggacaagtgtggcggtgggtgaaagaa

SEQ ID NO: 54084 - DNA, 895 bp, Homo sapiens
gcaacaacaacaaaaaggaattaaggaggaagccacctggcttcctaagatagactttatggttaatgggatttattttagctggttaagtccaggacccctaccaggaagaactgaggtccatatttgaggttggtctcacccttttgcatgtggtcctactaataataattttgctgtaaagaagcctcaataaggagatggactgtgtgaaaagagatgagaaagcaggcctgtttgcaaggctggcccttggctggcatctgaaagcttggatttcaggagggttctcattactccctaaatgataagagtggctcactgtgcctaaactgttcgtacaaacaatgtgggttatgcccaacatctgctttccttctgggagtcagattttcatatgtgttaggcagaggatgaggtgagcagctcccaatgagaaccctgaacactgagtctgtaatgagcttcccttgtatacaacattgcacatgggttgtcacaactgattgctggaggaattgtgtcctatgtgactctgctgggagaggactgtgggaggcttacacctggtttccctggactttgtccatgcgcttttttcctttgctgattttgcttcctagcctttcgctgtagtaaaacatagccatgagtatgactacaggctgagtctgtgaatctcctagtacatcatcagactaggaggtggtggtgttggcaccccccagcacagggcacaagggagacttgcagggtgtttgtcatgttccctttctcaatctgggtgtggtttacagatttgttcagtttgtgaaaattcactgagctctatgaacaattataatatgtacatttttttctgtaagtgtattaaatttcaataaaaagaattcac

SEQ ID NO: 54085 - DNA, 1304 bp, Homo sapiens
tttttttttttgctttgtacttgagtttatttcacaaaaccacggagaaagatactgaaatggagctcttgccagcctccaagcaaggaggccccagcagccagtctccagccccttgagccctttttgttaggcccacacccaaaagaggagaaccagtgtgtgcgcgaaggtacatggcaaggcacttttgaaaacatcccagtttaccgtggtgaaattgaacttactctgaaacagatgaaaagggacatgcaaatttgctgagcacatggaggtgtttgttagtaggtgaaaatcatgtccctgggtataacccagcttctccaggttagggtgagccgccgtctggatcagtgggtggcggggccacacacccaggatgagcgtggacttcgctggaggaggaaggtgctccttgatcatgtcggcagtaacgaagcctgagctgtacttccagccaatgggaggcctgtccagggtgtaccacaggtcgaactggtctgggtgagtcctggcaatttcttcaagctcttttctgaccaagatatcctcctctgtctggttggcaaagatgagggacatcctggtcctgtcactggggtccttggtgatgtggcgaatgagctgcaacatgggtgtgatgcctgtgcccccagcaatcattcccaggtgatcggccagtgtttttttaggctcactcgtctggtctggtctgattccaagattccctggcccatggtaaaacaagcgtccccttggccctcgaaaaaagatggtctccccgattttcatgttctccaaatactgagtcatcttcccaccttcaggatattgggggtgtacatttttgaagtagatctttataattaggtccacaaagcctctgtcatcatcactggagacaggggtgtaagccctgaccaccaattcattatcgatttttgccaagagctggacatagttacctacaggaagccctaagacatggtccggcgaaggcagtccaaagcggaacctccgggtgttgtggctgattttctctttctcaatcaagggcagcgggtacttggcttcagggtcctgtaaggtgattggctctctcctcctggagttcatgctcttcaggaccaacacgagcacagtgaccccagtgacggtgatggtcaggagcagggacgggtcttaagctcggcaaggctggagaaggccgtctgggtgcccgggcggagggggatgctggggaaggaagaattcaggcagctgcaaagagcgcgcgaatatattcattccccacgcgtccg

SEQ ID NO: 54086 - DNA, 924 bp, Homo sapiens
caggaagtgatctataacacccagagcctcctcagcctcctggttcactgctgcagtgccccagggggcatgaatgtggggaatgctggggggcacctatcttgagtccagaggcagccaaagcagtggcagtgaccttggtggagagtgtgtgtcccgatgcagctggtgcagagctggcctggccccccgaggaacacgcccgggccaccgtggagcgtgatctccgcattggccggcgcttccgcgaacagcccctgctctttgagctgttaaagctggtagcagctgcacccccagccctgtgctactgttccgtgctgcttcgggggctgctggccgccctcttgggcattgggaagcctctcgccaccctgacacgacccactccccctggcacctggaggcatcctgcaccttagtggctgtcatggctgagggaagcctcctgcctccgcgccatgggtaatatgcatgaagtatttagccaactggcacctttcgaggtgccgtctgctgctgctcagtgtctggggttttctccgggagcatgggcccttgcctcagaagttcatcttccaatcagagcggggtcgcttcattcgggacttctccagggagggtggaggtgagggtggaccccatctggctgtgctgcacagtgtcctccaccgcaacatcgaccgcctaggtcttttctctggccgtttccaggcaccttcaccgtccactctccttcgacaggggacgtagccttttcttgctctggaagcccagggaggttgagcagtgagagagggaagggactaacgtgctccggaagggtggaggtttctcttctaagtccttggtctaaagagcgctgtcacttttttctctcccacttttttttttctaaataaaatttgccaacttgagaaaacc

SEQ ID NO: 54087 - DNA, 424 bp, Homo sapiens
cacgcgtcaatctatagttgtggatgacagtgttcgggagagcccaggaactgtcaaaacttggttctctgcagtcctgaaggcactctgtctctttcggtcactccatctgacgattggtgcctgaaatacacctacggtttctggtcagcgtttatcagtggttggaagaacagaacccctaggaaccctgctgtcagcacgcagagtgtaaagtctcagatcaaggattcggagaaaggtctctacaggtccctcctcgttagtatagtggttggttgggatgagtcgggttggacccgtgcggatccaggaaaacagcgatcgaggtaaaagtaatggctgccgtcgtctgccagcgcgcaattgtgagtgaccttcaccgctagcgcgcgccacccaccccacatgaacctgtagggtt

SEQ ID NO: 54088 - DNA, 2838 bp, Homo sapiens
  misc_feature (1)...(2838): n = a,t,c or g
acccctatgacatgattacgaatttaatacgactcactatagggaatttggccctcgaggccaagaattcggcacgaggcgtatcaaaatatgggatgtatatacaggaaaactcctccttaacttggtagatcatactgaagtggtcagagatttaacttttgctccagatggaagcttgatcctggtgtcagcttcaagagacaaaactctcagagtatgggacctgaaagatgatggaaacatgatgaaagtattgagggggcatcagaattgggtgtacagctgtgcattctctcctgactcttctatgctgtgttcagtcggagccagtaaagcagtggtggcagcaatattggtgtgattgaggttatgctggcaccactcgcacacaggcgcacaatggtgttagctgggcagaaagagtggcatctctggctaccgggctgggggcgacctttaccataggatgaagtaaccttgcattcggctgcaaggtgtactgtacgtacacaggtgctggtcgatgtccactttctgcttttctttctttctttttttcttttttaaagtaatttcccccacagtaaaatacactgactcctgagtaaattgattttccagttttatggaattgggagtctgacaagtgaaaccaatttaatgtaaagtatttggctttcaaatggtttctctgtgctattttttggaattctttcagattccagagatatcttacgtctttgattcaatttaaaatttgtacttattttcttttagaaataatgtattgtgtctgtgcagaaaaaaaaaaaaccaaaaaggattgctttactccaagaggagagattgtcttaggataaacctccaagctcacatttaatataacagactgaagtaaacattagaatcctgttttagagctattctgcacagttaactactggtctttagaatctaaaattgtatatgaacttattcttaaataattgaaccgttttatattcaaatgacttatgatcgtggttagtttgggaaaaataagatggttaaattttgatttattgaaatgtaattgtattattttcataaaatagcattttcattttgtaatgtggtttaacatccttgttgtttgccaaagaaatttcatttggctgtgaatattctatttgcttgcagtatctgtttctcttcctaggctcaagttggtgacccaagcctattgtaaacaagtgattatctcaaagggagatgccaatggagtaacaatttgttaaccttacgttttctgtctgtatatttttttaaaaatctggtagtttctggaaaaaaaagagaagggggtttgtagtacttaaccctatttatttccgtatattttagttaattagtttttggaataaatggatttcagtatagctttgtggttaaattgcattgcctttattttatgtttaggcttatttttaaattaacatttaacagaaacatttgaaatagaatttgcatgtctgccttaattaacttaaagactgattttaatctgactatgacactgagcatattctttaaattactcataatttataatgcttaatataatcttaattaaatttagcagttttagtataagatgtgccattttgtcctctgtatgtctgaatgaagctataacatttgcctttttattgcaggttttcctttggaatatggataaatacaccatgatacggaaactagaaggacatcaccatgatgtggtagcttgtgacttttctcctgatggagcattactggctactgcatcttatgatactcgagtatatatctgggatccacataatggagacattctgatggaatttgggcacctggtttcccccacctactccaatatttgctggaggagcaaatgaccggcgggtacgatctgtatcttttaagccatgatgggactgcatgttgcaagccttgctgatggataaaatggtgaggttctggagaattgatgaggattatccagtgcaagttgcacctttggagcaatggtctttgctgtgccttctctactgatggcagtgttttagctgctgggacacatgacggaagtgtgtatttttgggccactccacggcaggtccctagcctgcaacatttatgtcgcatgtcaatccgaagagtgatgcccacccaagaagttcaggagctgccgattccttccaagcttttggagtttctctcgtatcgtatttagaagattctgccttccctagtagtagggactgacagaatacacttaacacaaacctcaagctttactgacttcaattatctgtttttaaagacgtagaagatttatttaatttgatatgttcttgtactgcattttgatcagttgagcttttaaaatattatttatagacaatagaagtatttctgaacatatcaaatataaatttttttaaagatctaactgtgaaaacatacatacctgtacatatttagatataagctgctatatgttgaatggacccttttgcttttctgatttttagttctgacatgtatatattgcttcagtagagccacaatatgtatctttgctgtaaagtgcaaggaaattttaaattctgggacactgagttagatggtaaatactgacttacgaaagttgaattgggtgaggcgggcaaatcacctgaggtcagcagtttgagactagcctggcggacatgatgaaaccctgtctctctcgtgccgaattcttggcctcgagggccaaattccctatagtgagtcggtattaaattcgtaatcatgtcataggntntccaa

SEQ ID NO: 54089 - DNA, 669 bp, Homo sapiens
gaacgccagatcagaaaagggagctcaggtaccttccagagagtgagacccagcgcccttgtctcgcacccagtaggctttcatccccgccatggcggagctgatccagaagaagctacagggagaagtggagaaatatcaacagctacagaaggacttaagtaaatccatgtcggggaggcagaaacttgaagcacaactaacagaaaataatatcgtgaaagaggtgagggactgggatttgtggggcgaggagggacctgtactagccatggttctgatcacatatgtcccatccctccatcaggaactggccctgctggatgggtccaacgtggtctttaaacttctgggtccggtgctagtcaaacaggagctgggggaggctcgggccacagtagggaagaggctggactatatcacagctgaaattaagcgatacgaatcccagcttcgggatcttgagcggcagtcagagcaacagagggagacccttgctcagctgcagcaggagttccagcgggcccaggcagcaaaggcaggggctcctggcaaggcctgaccccatggtggggggagggcaacggaggggagggaatgaggcagctctaggatctatactgtagctaataaaatgtaaaaacacctgaaaaaaaaaaaaaaaaaaaa

SEQ ID NO: 54090 - DNA, 385 bp, Homo sapiens
ggaaaatgtgactcatagttggagaggaaacaggagagtgggtacaagtgacagcaccaggaacaaccccctcccccagatgccaaagcattgctctgtatctaaagatgcatccaagtttgcaaaaaattatgggtaaatctggccatgtgaccaaagaggcagtcaaatcaattgcttccaaagtcagagctgtttgaaggtgatcagctcttaattgaactagtcatgatgaatcagtccaactgactgcatccagtctgacctcggtggtttccataaagggttgttgatgtcctgagctggacagggtgggcaggaggttgaagaaaaccagttggtgagtatagaaaagaaattgcatgtagaagttgtttgttctcaa

SEQ ID NO: 54091 - DNA, 1497 bp, Homo sapiens
ggaaaacatatatatgttagcatcaaagggggcagaagcaaagaagatacagatctgcactgaagacattagactggccatagaaaagtaagcttgaactcccaattgatgtgaccacactcttcttaattttgttcacagtaaaaacacttttttgagttattaggcttacccctagcttttgacctttgcatttcatatatgttagatgtctcagcaagaatatctggtctcccctaatttttattcccagtgccgatgttcaaaataaactttctccagtctgggaaccttttttacttccccatatttgttattatttagaatggttcatacgtctgctttgtttgcatactggtcttcagattatgagactcgatgataacagtatgggtactgcttctgtgacaaatatcgtgccttaacaatgtgggctgtccttttccactgaagaaggaaagacgttttgatctagaaatagcgttgtgatttccttgctgttggttttacactgccttccacattgcaacagcaagttgatttcttgtgatcccagaattttctaagaggatgagttgaatctatagcagcattgtcagtacagaccagtggttctcaaactttaaaatgcctcagcatcacttgggagcttattgaaatgcagatcccagagtcagtaaatctgcctgtgaagtatgatagtctgcatttgtaatgagcattcaagtgattctgatgcaggtgagctgggggcatacagggaggaacactgccctggactatccattgcatttttgcctctaaacaactacagaattttctagggttttaaattatgtaaaatgtttacttattctgagcttagagagaatggggagggtatttttaaattttattgttttatttctttaagtttttctttgctttaagattataggtattaggtttgtttttgtttttccacttatcttgagttcactttgatgttaaatctattgctacttcagttgtaaaaccagccaaaagtttctggatgaaggtcaagtttgaccttttaggagttattgtacataaaggcttcatccacgaaccatccagcgcacagaagcaagtgcaaaaatgacacaagcacaactctccagacgtggctccttctcctttctcagtgcagactctcactgaaagctgctattttcatcctccttgtggttgcttttcttgtttctcttccattgtacatgtgggttatataccatatgttaaatatgcaataaagtgtttacaggatgtccttctgaagggtagtcctttgtaaagctgtacagactttgcagtttaagcacaatgtgcacatgttagttttatatacagcaaaacttgattttttgcagatggaaaggtattttgtttctatacaaagtaaatggattgtttgtgcttaatgtaaagccgctttataaaactgtaaaataaagtttttttcttaaaaagaaaaaa

SEQ ID NO: 54092 - DNA, 380 bp, Homo sapiens
ccaaaacttctttttagggggccaggttttcctgtgccacaaactctggtctgagaccagtctggggcacgtctccacagtaagttttgcaaggcagagtgcaaacggacgtggggcagtcctccaatgtacgcactctcaaaacactgctcaggcgggcttcccccgactggaagtgactctcatctacttgtgaagacatgaacttgaactctgcttggaaacacggacaggtattgcgcacactatcctgtgaaagggtcttatttagcaaaataagtgacatttagaacttttacatgaaaaccaaataggaaaaaaaaaatcccgattttcctcaaatcctcaggccttgaatctaggcaaagcacacaaacacc

SEQ ID NO: 54093 - DNA, 316 bp, Homo sapiens
  misc_feature (1)...(316): n = a,t,c or g
ggagctgtgagaatatacacttacattctgaagccgttttatgcacggtccccaatgacctgctgaaattgaacagcgagctaaatatagagtggaagcaagcaatttcttcaaccgtccttggaaaagtaatagttcaaccagatcagaatttcacaggattgattgctggtgttgtctcaatatcaacagcactgttattactacttgggtttttcctgtggctganaaagagaaagcaaattanngatctgggcantgaattagttcgntacgatgcaagagtacacactcctcatttggataggcttgtaag

SEQ ID NO: 54094 - DNA, 458 bp, Homo sapiens
agctatgacatgattacgaatttaatacgactcactatagggaatttggccctcgaggccaagaattcggcacgaggaattagtagcaatcttactgaaactattccaaaatataattaaagagggaatcctctctgactcattctatgaagccagtatgaccgtgatatcaaaacctagcaaggacacaatgagaaaagtaaattacagtccaatatccctgatgaacatagatgcaaaaatcctcaacaaaatactagcaaaccaaattcaacagcacatcaaaaagataattcgtcacgatcaagtaggctttattccagggatgcaaggatgtttccgtacatgcaaatcaataaatgtgattcatcacattgacagaattaaaaacaaaaaccatatgatcatctcaatagacaaagaaaaagcttttgataaaatccaacatctcttcatgc

SEQ ID NO: 54095 - DNA, 618 bp, Homo sapiens
gatcagccactgcagctccctgagcactctctacagagacgcggaccccagacatgaggaggctcctcctggtcaccagcctggtggttgtgctgctgtgggaggcaggtgcagtcccagcacccaaggtccctatcaagatgcaagtcaaacactggccctcagagcaggacccagagaaggcctggggcgcccgtgtggtggagcctccggagaaggacgaccagctggtggtgctgttccctgtccagaagccgaaactcttgaccaccgaggagaagccacgaggtcagggcaggggccccatccttccaggcaccaaggcctggatggagaccgaggacaccctgggccgtgtcctgagtcccgagcccgaccatgacagcctgtaccaccctccgcctgaggaggaccagggcgaggagaggccccggttgtgggtgatgccaaatcaccaggtgctcctgggaccggaggaagaccaagaccacatctaccacccccagtagggctccaggggccatcactgcccccgccctgtcccaaggcccaggctgttgggactgggaccctccctaccctgccccagctagacaaataaaccccagcaggccggga

SEQ ID NO: 54096 - DNA, 378 bp, Homo sapiens
gcaggagtgcagtggccgtgatctcggctcacttcagcttccacctccagggttcaagcgattctcctgcttcagcctcccgagtagctgggattacaagtgcgtgccaccgcacccggctaatttttttgtattcttagtacagatggggtttcactgtgttggccaggctggtctctatctcctgacctgaagtgatctgcccgccttggtctcccaaagtgccgggattacaggtgtgagccaccatgcccagcccatatattcttaatttcttgagtaagcccttgatttctcatgtgaccttttttctgatcccttaaattaaaaaatttttttgagatgcattaatgtaaattttatccatttatttatttg

SEQ ID NO: 54097 - DNA, 599 bp, Homo sapiens
ccctatttgaaatcacaccccatctccagcccctgcactcccaattcccctctccttgctctgttttttcccataggagctggtaccttcgcttatacaaatgtacttacttattacatttcattgctgtcagctccacgcaagcagggatatttgcctgttgtacacttggacggagagaatgaatagtgccactctgttgacatcattgcctctagcctacgtctctttccagggctttagatcctgtttctagagacccactggtgtctcacaggcaactcagctcctagatggaaacagcctcctccgccccccacaagtccactcctcctgtgctcttggctcagtcaggggtccccttctcttcagttgctcaagccagaagtcaaggtcatgtccttgatacttccctcttccccatgcctcacatccagtcccaggctgcttctctctggtggtgttgccattacccatctcttctattaaacagagtgacccaagagtggagagtgggttttgactttgtatccctggtgcttgactcataagtaggtgctcaacaaaaattttttctttttttgagatggagtcttgtc

SEQ ID NO: 54098 - DNA, 1619 bp, Homo sapiens
ttttttttttttgagtattcaatgaatggaatttaatgtaactatgacataaacacacacagggtggggaggacgggtgaccaagcgcagacgtgggtgacacgtggccccgctctctggaccctcagtgggaaaaagtctgaggctggcgtctctcaccaaaccccacctcccctggtgggtcaatactgatctggctgagtgacagcatctcgtgacccaggctggccctgggaaggcgccacaggcgaggcctgcgagtccagggagcaggcagacgctacagtggcccccgagcgcgccaggtgccagcctcgacgtgtaaatggcccgctgcgggcgctgccgggaaggaagacaagaagggtgagggctcgtcctcaccaagtgcttcctgagtgccgtaggacgtgggtgggacatggggacagtgagggtaacacaaacagcaacgaatgcacaaagacaagttccaggaacacccataaacccataacgttcaacaaaatggcaacaaaacgacgcccctgctggcctggcgaagctggcgcttccttcgtggcagatgccacctgcagctgggctggctggcaagcgttggcccaagctttttggtaccctgggagctcaacagcataaaaggctgtaacctctacacggaaaaatttcacatccttcccctgaaactgacttcaggggcaaagaaacgagacttcttgaagaccagcctcttctgggaaaggggcttctgagacgagtgtcgacggcagagcagatggcctggggaaggcaggggtccctgggcagaggctgggagggtggccagagaccagggagggcccctccatctggtgggtttggcaggtgtgtcccctggtgctgccaccaggagccccgaggccggggtgttggctgcgacagcccctcactgggtccggagctggtaatctccattctgcgtgatataacgcacccagggcagggcctggtacccactcttctcaatgatcttcaggtagcgcacctggatgccggaggtagtgaagtaagggatctcgaacttgacactgatcgggggcttgccctccttgtcttcggcctccacactaggcaggccgaagtgggcccgcatcaggtactccttgccgcccgggaaggacttgatggaccacacgatctcgctgttctcggggacccacttaacgctccccaccgtcgtcttgaacttgggtgagtcggcatcattgggcacgggaatgtggatctccacgttgttggctgttgaccgccgcttgaactggcttttggccttgatcatgtactcgatgcggctgtgggagtgcttctcgatcaccgactcgatccatatcaaaggcttgacgtgggtgttgagacggtaggacatgagctcgaactcgccgtcgggtgggatgaaggagatggtgcggtcattctcgaagcgtgatagccgcacacactggtggaacttcacatcctccagctccacggatttgcttttgccgcggcccgtgttgtcaaagaggaccttgtccgttgaggcccaggcgcagctcgggcatgcccgagaggaagactcgcatcttgatggagcccacgat

SEQ ID NO: 54099 - DNA, 1811 bp, Homo sapiens
tgaatataaacatttagtatattagaatgtgaaattacataggaaaataatctcttcaattagctaaaatcacttgcgaaagattatttattgcacaatttatcagtgggtactaagaataacacagatcctattattctcaacctctaaattcagtacatagtaaaattcattttctcaaactaaggttctatacataatcggagtaaaccctctgttactcgagttaggatagggaaaacaaattccttagagttcatggaaaccacttcacaaatcctaggaagggcacacattatatttcctattcataggtaaggtacatttaagtacttcatatttaaaaaagacaaagctgtacagaatacaaaaagtgtacatttcatccattaaacaaatttacaacttttacgattagttattacagtaggaactgacctaacattcacatctaaataattatcacccagttcaatagagcgaacaaagagctgtgctcatttatttatttgataaggctaataacattttatattcacagtagatcagtaagtgtcttggagctcatattgtaaaataaaaaggtttggggccccctattgagtcactgggctcattgttaaataactccttgaaaggtgaaggattctgggggataaaatcattggctatccctggaaagatccaaaactctgtaaggtaactctgttcacttttcagaaacattttaaaattaggtaatctgaattaaactcagcaagtctaatctaaaaggacaatttaaaatcttagagctggaaaagatttcagtggatcatctatcccaaggttttcaaaatatgttccatggaatactaagaatctatggaggagatacagggttctgcaaatttgacttgaatttaattaaaaaatttttttaaaaaaaacgactcccactatatgtgtgttactcaccaaattcaaacatgctggatatcaccaatgcattaatgtttttattcattgacttaatcacatttatagtatataaagtttatataataaggaaatttataataatatgacttttatatagtggggtatagggtatgtgtgtatgcacacgtgtttaaaggttctgtaagattttccttgaaaaagtttttgctgctgaaatagtgtgaaaaccacaaataaagtctcagtttctaaagtaagaacacataaacaagagtaagagactttctcaaggtcacacaaccaccaagtgcattgccaggttgatatgatggaacccctggtactctgcttgcataaacctccatagggagtagttagctatttggtacttagctgtcccattatgaatgtcaatggattagtcttcagtatttttgggggcgaaatcaagctacccctggccagatgtttttccttgaaattgatttgaattttatttgctcgcctattaaaatcctactatccagaaattctgtcatcaataagtggcaacttaaattgtgtaccctggtttaggaaaatagtaatatttgcaacttatgaatgataagtcagaaaagttacatggaatgttaaattttaaaggagataggcccttgttttattacatgccgaaatgttaatgttagaaattttagttcataagcaaaaaaaatggttgaggtgcaactgaagatcacaattccattattactatattgtttcagaatattttaatggaaagataatttggcattcctactgtttcactgtacttccattgaaatactctttccattaaaatattctgaaacaatatagtaataatg

SEQ ID NO: 54100 - DNA, 312 bp, Homo sapiens
cttccctgtcttgttcctgggcgcagagggctcctccggcgccgccgagctgcgcccgctgccttcacaccccggacatccgcgccacacgtgagtgtccccgcacccctcccccaggaccgtggaagtcccagattcgggcctgctctggggcttctggggtccccagcctcggtcactctgacgggtgaagggaagaagaaatgatggagaaaacggtgctccttcatggagggaccaaaaaaggacatacaatctatgtcaatagatgagggttttccctccataagtttaactttaaaagtgtattta

SEQ ID NO: 54101 - DNA, 269 bp, Homo sapiens
ggagtctgtcctctggaaactgagagccctaagcaaacgacacagctgtttctatctaatttgtatgaaatggagctgcctcatgtcccccgtgtcagcacagtgtcattcccaaagaagcacacattggttttcaaaaataatttaaaagcaacgtatatctttattacagtctttcagaaaatgctaaaggaagagttccatccacagcttacggcagattttctgaaaaatctctttatctatctatctcctcaaaattccaccta

SEQ ID NO: 54102 - DNA, 665 bp, Homo sapiens
attcccttactttcttaataaactcgctttcactttatggattcaactgtaattctttcttgtgtgagatccaagaaccttcttgtagggtctggattgggacccttttctggtaacatcttcctggtgaccatgaagggacaatactgaagagacccctgaccctaaggaaatagactgcagcaccaatgggccaactttggggcgatcatcttgcccagaaacatcatgttgaaactcttggtcagaggttggatgaaagctgacagggtccatccaggagcaagtttgagccttgccagttccattttgggtgctgagtggagtggcgactatagcaaacctgtgatctctggctgctgctcagaagaaacaagagggagggatgaataatgtaaaactctggatcaatattctaattctgagcctctattggaatcagctagcaaccacatatcagcttggtttcaacagtttcccagttcatgctgctgagaagttcagagtcaaacctgaatctcacctctgcaaagagcacaggactccatggcaaacgttgtatatacgcaagtcatccctggcaccacattgatttactgcaccaggctttcttcattgtgatgatgttctctctcttttctaaaaaaaaaataaaaataaaattt

SEQ ID NO: 54103 - DNA, 601 bp, Homo sapiens
ggcacagcattgagccggaccctcgcatcggcccgtgcccctgtcgagtcccgactactacgagaggctgggccaactccagcacgggctgcgggacagtgaaaagaagagattggacctggaaaagaaactttatgaatataatcagtctgatacatgcagagttaagctgaaatatgtaaaactaaagaattatctgaaggaaatatgtgaatctgaaaagaaggctcatactcgaaaccaagaatatttaaagcgatttgagcgtgtccaagctcatgttgtacacttcaccacaaatacagagaagcttcaaaaactgaagctcgaatatgagactcaaattaagaagatgctatgctcaaaagatagcctgggactaaaagaggaactgacagatgaagacagagaaaaggttgcagtgcaggaggggattaactcaggaacagccatgtcaagaggattgtatcaaccagcaacaatctttatgggccgccaaatgtcagccatcttaagcatgagagatttcagtacagagcacaaatctccccagcccacaaagaacttttcaattcctgacccacattcacaccgacagaca

SEQ ID NO: 54104 - DNA, 197 bp, Homo sapiens
caaaataattgaaatcagaatttcaagaaaatatttacactcccatgttcattgtggcactcttcacaatcactgtttccaaagttatggaaacaacccaaatttccattgaaaaataaatggacaaagaaaatgtgcatatacgtacaatgggatattattcagcctaaaaaaagggggaatcctgttatttatga

SEQ ID NO: 54105 - DNA, 1121 bp, Homo sapiens
  misc_feature (1)...(1121): n = a,t,c or g
gggttttttttttttattttttttattttaggaaacttcttttaaaaaatgttttctgttttgtatgtgtatgtgtatccagaaatgtccatcctccaagctggccaccactgttccctgaatttggcagtgcctgttgcttgcagctgtcagcatcctgaaaaccatgaggtgccttcaaagtagactctgtggcccagccgcgcgagtggcctccaggaccctgccgcacgatgtcattctctccttattctgaatcctgtctggctctgatgctgagaaaaaggacaaagtcggtgtgtctgtctgcgtgtgtgtgcatctgtgcctgtgtgtgtgtactgagttttggttttttttggaacctttttttctttttttaagaaaaaaatgacccttggattactaatacagagttcagccctcctttagtcactataaaacggactccatgttttcacaccactcatggtcttccaggttatagataaactttgtcctatgtgtctggtttgcgggcacagggtccctccccaggttgtctagggtcagagtagaggcaaagaactcactggtgctcagcccgccctcgtggtttttgatgtagcgtttatagtttttcctcaggcactgccacgtggtggtgtacaggatgaaggcgaaggatttgagcgcgatggcgatgctgacatacaggtatcggtagaccacattgtcgtagaggacgcaggcgccttgctccccacagaacgtgctccagaacaggcaggtggagtcgatgccagccccgaagatgaggggtggagggatgaagcctgttaccgggaaaagaatgttaaggttctggatctggtggccagtgctcccctgttcctgtctctgcctagcttttcttatagcactgctaggcaaatatgtctgactccgtggctcaaagacatgctcaggaggcaaagcgcatgagtttgtgtcccagttctgcctttttattatggtacaaatctgagcaagttatttaagccctccnnnnnnnnnnnnnnnnnnnnnnnnnnnnnnnnnnnnnnnnnnntacagtcttcaccagatggctgtgaagactaactttacacatagaaagcatc

SEQ ID NO: 54106 - DNA, 379 bp, Homo sapiens; identical to SEQ ID NO: 41043

SEQ ID NO: 54107 - DNA, 229 bp, Homo sapiens
  misc_feature (1)...(229): n = a,t,c or g
ggaaggtacagtgtatatatgcaaagggacagagctgtgatatatagcccagtggttcttaaagtgtggtcctagcaccatggtgtcagcattacttagaaacttgttagacatgcagattcttggccttcaccataggcctgccaactcagaaattctggggatgagcaatctgtgtttttacaggtcttcaggtgattctgatgnnngctgaannttngaattattg

SEQ ID NO: 54108 - DNA, 434 bp, Homo sapiens
gacctcccttcaaacgtggcgtcgtgggttgtttgcgcctcgcctggggtcagcgagcaaggacgggcgcgggcggggatactcaaagccaacagctggagtcagccctcgtgtcccgggctcacagtggcacgactgaatcctcagagtcggctggcttttgagctctcacgattggggaggagggggcgtttctggttcgcagctccagaggattgcgttccttcccccatacctgtcccccacagtcacgctctgccctgacgtgcagcatttgacaagttaccccctcgccacatactacttccacccacgtccgagttaactttgttcttaaccttcttgagactaccctcggcctccaggtctttttttcccagttcatttttgcccataagattgagtttcgagtttcagatatcatgcagaaagtt

SEQ ID NO: 54109 - DNA, 647 bp, Homo sapiens
aggaggctgtccagcctcgtggctccatttcaacatctccccccaggcgatgttctcccccaagacgaccagaaaattgtttattggggaatgctgtggtttgcattttcatattcttcgcttggcagtgtgtattcttttcacaagtttgcctagtgtcttggtttacacaatatgacaactgtaactgtactttagctattgtttgcctgcacatacatgttgtaatatgcacagtgattacaacctttaaagcaagaggaggcgagttaatttggatgagtgtgattttgctgattgaatgtgagttttcaaataggaggctttttctgcaatttgttttgcattttttagaaagtgcaaacagtaagtaaataaaagccttcggtaataatcatgacaatacaagaggctgagctaggctacaggggaaaactattgtgttgtaaagttgcatcgctattttatattaacaatataatgatcagcatcatgaacattgagctcttagtgtttatttatctgaaaacatgtaagtaaaagcagttttagtgagaggtgcaaagatttattctaacagccacctgaaagtatctgtaagcaatactagtaggtagatttcactgtgtgtacacatccacattgag

SEQ ID NO: 54110 - DNA, 1194 bp, Homo sapiens
agcggatggagctgctacagtcagcgcttggggctggcctcagcttgtagacccgagccctgcagaacaaccccccgtggcgcaggagagcagaagaaagggggcctttatgcccttttgagggaagcacacattctgcaaggccgtggaaacaaagggaggaactgtttgtagccctcgtccagacgccccaaacaaacagagccaagttacaccctgtttaaccctgccttcaaagggacgactctgtaagattctctgctacttattcaagttgacacgatgcccttcacactccacctgaggtcccgccttccctctgccataaggagtttgattctacaaaagaaaccaaacatcagaaatacatccagcatggctggagagctccgaccagccagcctggtggtcctgcccaggtcccttgctccagcttttgaaagattctgccaggtcaacactggtcctctacccctgctgggccagagtgagccagaaaagtggatgctgccccctcaaggtgctatctcagagaccaggatgggccatccccagttctggaaatacgagttcggtgcctgcaccggcagcctggcttcgctggagcagtactcggagcagctgaaggacatggtggccttcttcctgggctgcagcttctccctggaggaggccttgggagaaagcggggctccccagaagagacccagcaggtcacagccaaggcgggtgcatacaagacaacagtgccttgtgttacccatgctggcttctgctgccctctggtggtcacgatgaggcccattcccaaggacaagctggaagggctggtgcgggcctgctgctccctcggaggtgagcaggggcaacctgttcacatgggcgacccagaactgttgggaatcaaagagctttccaaacctgcctacggggatgccatggtgtgtcccccaggggaggttccagtgttctggccttctccgctgaccagtctcggagctgtcagcagctgtgagaccccactggcttttgccagcatcccaggctgcacagttatgactgacctgaaggatgcaaaggctccacctggttgtctcaccccagagagaattccagaggtccatcacatttcccaagatcctctgcactacagcatcgcgtcagtctctgcttctcagaagatcagagaactaa

SEQ ID NO: 54111 - DNA, 423 bp, Homo sapiens
tgactgacacgaatttaatacgactcctatagggaatttggccctcgaggccaagaattcggcacgagattgaaacaagtattttgttaaattttaaattagtttctttatggtactcttttatattaccagtaagaaatcattttttaaaatggtgtgttggtagattatgactatcctttgatgttgatgaagaggtatcacaaaatatttgtcataagaaagaggtactgggtttgatatggttgagaactactggtccgtgttctatactgtggtacccagaagtttggaagtgatggtagtataatcatgtatcagattgagtggtagatattgctaatgatgtgtgaaattagaaaaagtaaagattgttctggacttgggtagccatgaaatcttcagtgggaggagaggattgtt

SEQ ID NO: 54112 - DNA, 1042 bp, Homo sapiens
ggggaatacttccaagttgtagtgttgttgttttcagcctgctgctgctgctgctgttgcggctaggggaaccgtcgtggggaaggatggtgtgcgaaaaatgtgaaaagaaacttggtactgttatcactccagatacatggaaagatggtgctaggaataccacagaaagtggtggaagaaagctgaatgaaaataaagctttgacttcaaaaaaagcaagatttgatccatatggaaagaataagttctccacttgtagaatttgtaaaagttctgtgcaccaaccaggttctcattactgccagggctgtgcctacaaaaaaggcatctgtgcgatgtgtggaaaaaaggttttggataccaaaaactacaagcaaacatctgtctagatgtattgatggaatttctggctttctaaatgattttactttctgccttgaattttcaaggcatagatgtcaacttacagaataacatgttttaagataattaagtttaaaccagagaatttgattgttactcattttgctctcatgttctaaacagcaacagtgtaactagtcttttgttgtaaatggttattttccttataagaattttaagaactaagtggcaaattccatgaaaatatttctcagttctgtatgcacttttatttaacattattcatataattctccccccaccactttatttatagatactgcaaaagtgagaaggagataatagatactttgctctgaatttggcatccagagttaacatttctcccctcactcccttgctggtgtcatagttattagaatcagcagcctcttaactaattgcggtttcataggatatataaatgtttcaagccattattgctgaatggttctttagttattaacctagacccaaatcaaagaccagttggatttatgatattttttatttgttcttgcagccaaagtgccagtttctttaatatgtgaccaagaacacaaggagcatccatatggccaaataaatacactgaattttagaaaaacataaaaaa

SEQ ID NO: 54113 - DNA, 1392 bp, Homo sapiens
  misc_feature (1)...(1392): n = a,t,c or g
agacattcttgcctgaaacacgaataatgacatcggtcacattcactaaatgtctatatgcacaattggtgcaacaaaggtttgtgccagaccggcggagtggatacaggctgcctcctccatctgatccccagtaccgagcccatgaattgggcatgaaattggctcatggatttgagatcttatgctccaaatgtagcccacatttttctgactgcaagaaatcccttgtgactgccttcaccacttctgggcccagtttccttgaaagtctgaaaaagaatgattactttaaggggacttgattagaaaggtttcttgcttccagttaccccggggaaaagggcttaggaaaattggccaggaggaatttactttcccaggcttcttcaggttaggacttggcccagaaaaggttcttctttgctatgagccccttggtgaagaaatcttaaccttattacagacaataccatttgatatagaagaccttaagaaagaagcagctaatcttcccccagaggatgatgaccagtggttagatctctcaccagatcagctggaccagctgctgcaggaagctgttggcaaaaaagaatccgagtctgtttccaaggaggagaaggagcagaactatgacttaactgaagtctcagagagcatgaaagctttcatatccaaagtctcaacccacaagggagcagagctgcctcgagaaccttctgaggctccaatcacttttgatgcagattcttttcttaattattttgataagattttagggccaaggcctaaatgagtcagattctgatgatctggatgatgaagactttgaatgtttagatagtgatgatgacttggactttgaaacacacgaacctggcgaagaggcttccctgaaaggaacacttgataatctcaagtcatacatggcccagatggaccaggaactagcacacacctgcatcagcaaaagtttcaccactaggaaccaagtggaacctgtatcccagactaccgataacaattcagatgaggaagattctggtacgggagaatctgttatggcaccagtagatgtagacctgaacctggtttcaaatatattggaatcctatagctcccaagctggactggcaggacctgcttccaatcttttacaaagcatgggagtgcagctgcctgacaacaccgatcacagaccaacaagtaagccaacaaaaaattaaccagcacatttagcttctcttttttctttttaaataaatattgaatatgattctgttcatttctagtttaggttactcatttaggtaaaaatggtttccttccattacaaggtttttcaganttgacttctccatcgnggccccaaatgtgggccnccttggg

SEQ ID NO: 54114 - DNA, 415 bp, Homo sapiens
gccatggacagttctgagcgcaggagagtcaggactgactcaggtgctcacaggctccctagccgtggtgggagaagagacatgggagagcgggtgggagccagaccttggctaggttaggtccctctccagcttggcctcttaagatccaccccatgacttggttggtgcagctgcttagctgtgagattgggaagcaggtgtgcccccacaatcccaaattctcactcggggactcttctgcctctgaccttttggcttttggcctgtaagggaccttgaggcactggaacagctggaccagagcaggtgacagggacacctgggtagctcatactgcagacagtgccatgcatgaggcacttcccacagggacaccaggaggacaccgctcctctggccatcacagccctgg

SEQ ID NO: 54115 - DNA, 2511 bp, Homo sapiens
gaattcgggcgcgaagcggccggcctgggcgccgactgcagagccgggaggctggtggtcatgccggggttcctggttcgcatcctccttctgctgctggttctgctgcttctgggccctacgcgcggcttgcgcaatgccacccagaggatgtttgaaattgactatagccgggactccttcctcaaggatggccagccatttcgctacatctcaggaagcattcactactcccgtgtgccccgcttctactggaaggaccggctgctgaagatgaagatggctgggctgaacgccatccagacgtatgtgccctggaactttcatgagccctggccaggacagtaccagttttctgaggaccatgatgtggaatattttcttcggctggctcatgagctgggactgctggttatcctgaggcccgggccctacatctgtgcagagtgggaaatgggaggattacctgcttggctgctagagaaagagtctattcttctccgctcctccgacccagattacctggcagctgtggacaagtggttgggagtccttctgcccaagatgaagcctctcctctatcagaatggagggccagttataacagtgcaggttgaaaatgaatatggcagctactttgcctgtgattttgactacctgcgcttcctgcagaagcgctttcgccaccatctgggggatgatgtggttctgtttaccactgatggagcacataaaacattcctgaaatgtggggccctgcagggcctctacaccacggtggactttggaacaggcagcaacatcacagatgctttcctaagccagaggaagtgtgagcccaaaggacccttgatcaattctgaattctatactggctggctagatcactggggccaacctcactccacaatcaagaccgaagcagtggcttcctccctctatgatatacttgcccgtggggcgagtgtgaacttgtacatgtttataggtgggaccaattttgcctattggaatggggccaactcaccctatgcagcacagcccaccagctacgactatgatgccccactgagtgaggctggggacctcactgagaagtattttgctctgcgaaacatcatccagaagtttgaaaaagtaccagaaggtcctatccctccatctacaccaaagtttgcatatggaaaggtcactttggaaaagttaaagacagtgggagcagctctggacattctgtgtccctctgggcccatcaaaagcctttatcccttgacatttatccaggtgaaacagcattatgggtttgtgctgtaccggacaacacttcctcaagattgcagcaacccagcacctctctcttcacccctcaatggagtccacgatcgagcatatgttgctgtggatgggatcccccagggagtccttgagcgaaacaatgtgatcactctgaacataacagggaaagctggagccactctggaccttctggtagagaacatgggacgtgtgaactatggtgcatatatcaacgattttaagggtttggtttctaacctgactctcagttccaatatcctcacggactggacgatctttccactggacactgaggatgcagtgcgcagccacctggggggctggggacaccgtgacagtggccaccatgatgaagcctgggcccacaactcatccaactacacgctcccggccttttatatggggaacttctccattcccagtggggttcccagacttgccccagggacacctttatccaagtttcctggatggaccaagggccaggtctggattaatggctttaaccttggccgctattggccagccccggggccctcagttgaccttgtttgtgccccagcacatcctgatgacctcggccccaaacaccatcaccgtgctggaactggagtgggcaccctgcagcagtgatgatccagaactatgtgctgtgacgttcgtggacaggccagttattggctcatctgtgacctacgatcatccctccaaacctgttgaaaaaagactcatgcccccacccccgcaaaaaaacaaagattcatggctggaccatgtatgatgatgaaagcctgtgtctttgagggattctaccctgaacatacctcacagatcctccctgtcatgccacatttcactgattggaatgtggaaatggaaaaggaatttaggatgtgcattttcacctgaggtttccctgcatccctgcagtgccaaagccccaccttcagggaccacctggaatgtgtgaggggctgacagcacagtaacgtgcatacatatctgcagggctggaatggaagctttaaaggtggtagtgatttttattttggaagaatcatgttacctttttgttaaataaaatttgtactcaaatgatgatgtcactgtttttaatgtgcaggtattgaattatatggtctgacttaaatcataactagacttgagtgggctgaataaaccacttcactaact

SEQ ID NO: 54116 - DNA, 1150 bp, Homo sapiens
ttttttttttttttgggaagaagaagcttgtttattgtgttacatacacagcacggggctctggcctgccagccatggggacctactcaaactcaggaacaggccggtctcctgaacctcagtttcacttgggggctcagcccagtcgccagggccttctgctcgttgttcctccctccaaggtcctgccctggaggctccaggagaaatccaaggagtgggagggtggagtcaggatgaggagtggacactggtcagctgccccttctgctggaagtagaactggaaccgagactgggcatagtccaagtaaccaaattctatggtggacatggatgcctggaggatggaccacagaccccagaagaaatgggatgccagagcataccgactgacttctaccagcaaatcttcttccagttttctctgctcctcttgggagagggtctcacctttctttgcctctgccaggtaatgacgaataaaatgcaactgctgttcttgagtggggtagtctgtgggccttgctttgtagaaaggccattcctcgtgagtataatcataaacccactcacaaaaatggttcccaatgtcaaagcccctatagttataactgctgtactcgaagtccaccagcatgaggctgtcagcattttctggctctgagagcagcaagatgttcccttcctggatgtcattgtggcagaagacgactggcgatggggtagactctagtaacttcctgaggttgcccatctcatccttcaggctgtacatctccagcaggttcatctcagggaggccagttgggggcaggtcctggatctgttttaggtaccgctccatggtcccaaacagccagtggggctccttggtgaaaggcatctccatgccatgaaattgcgccatcttcgtggcaatggctgctgacaacactggctctcgaagctcttgagttttcaatggccgactctgcacccaggaagctatcagggtggtgatggggctggggcaggagtgggaagggctggggcaatgaggggaagtcagggttttgggggaaattccctacttggggtgagggatgtggaggcagacattgggcactggggtagggttagggggtggaggtgccttgggctcgtgccgc

SEQ ID NO: 54117 - DNA, 620 bp, Homo sapiens
gcgtggagagttggtcgcccatctgctctaagctgctgtgtattcccctgtaatgtaaacatcgtgaaggtggagacccagttaaccttttaggtggaaggccagatgacagagggcggcatctgacccggaaggccctctgcaaccaggccaaatacatctacagggaaccaatgggaaacatctggggaggacaacccaaataagtatcatgcgagcaagggatggtttgagaactttaaaaatcgctgctgttttgcaacatacgaagttgatggggaggaaggacccttaaatcctgagtgggtatcgagtattccaagcaactggagagaggctttgtgcctcaacaggtcttcaacgccaaggagatgacccatcttttgcagtgcatgccttcctacttttggggcaaaagacaaaaatctggaaagcttagaggaagctaaggacaggatttccctcatttttttgtggcagtgcctcaggtgacaaaatgataaaaccactgctgctttacaaagactctaacaccccacttgtcttttagagataaacgccttcctgttttcttgtaatcacacccagaatcaccactgccactttttggattagtttta

SEQ ID NO: 54118 - DNA, 2251 bp, Homo sapiens
  misc_feature (1)...(2251): n = a,t,c or g
cgttgttcccgtctgagtaccagctccccactgccctgagggcgggccggcctgccggaagggaaaaaggaagaggagaaggaaattgtcccgaatccctgcagtgggtccaagcctctcccgggtggccagtctttctgtaggttgcggcacaacgccaggcaaaagaagaggaaggaatttaatcctaatcggtggaggtcgatttgagggtctgctgtagcaggtggctccgcttgaagcgagggaggaagtttcctccgatcagtagagattggaaagattgttgggagtggcacaccactagggaaaagaagaaggggcgaactgcttgtcttgaggaggtcaacccccagaatcagctcttgtggccttgaagtggctgaagacgatcaccctccacaggcttgagcccagtcccacagccttcctcccccagcctgagtgactactctattccttggtccctgctattgtcggggacgattgcatgggctacgccaggaaagtaggctgggtgaccgcaggcctggtgattggggctggcgcctgctattgcatttatagactgactaggggaagaaaacagaacaaggaaaaaatggctgagggtggatctggggatgtggatgatgctggggactgttctggggccaggtataatgactggtctgatgatgatgatgacagcaatgagagcaagagtatagtatggtacccaccttgggctcggattgggactgaagctggaaccagagctagggccagggcaagggccagggctacccgggcacgtcgggctgtccagaaacgggcttcccccaattcagatgataccgttttgtcccctcaagagctacaaaaggttctttgcttggttgagatgtctgaaaagccttatattcttgaagcagctttaattgctctgggtaacaatgctgcttatgcatttaacagagatattattcgtgatctgggtggtctcccaattgtcgcaaagattctcaatacttcgggatcccatagttaaggaaaaggctttaattgtcctgaataacttgagtgtgaatgctgaaaatcagcgcaggcttaaagtatacatgaatcaagtgtgtgatgacacaatcacttctcgcttgaactcatctgtgcagcttgctggactgagattgcttacaaatatgactgttactaatgagtatcagcacatgcttgctaattccatttctgacttttttcgtttattttcagcgggaaatgaagaaaccaaacttcaggttctgaaactccttttgaatttggctgaaaatccagccatgactagggaactgctcagggcccaagtaccatcttcactggggctccctctttaataagaaggagaacaaagaagttattcttaaacttctggtcatatttgagaacataaatgataatttcaaatgggaagaaaatgaacctactcagaatcaattcggtgaaggttcactttttttctttttaaaagaatttcaagtgtgtgctgataaggttctgggaatagaaagtcaccatgattttttggtgaaagtaaaagttggaaaattcatggccaaacttgctgaacatatgttcccaaagagccaggaataacaccttgattttgtaatttagaagcaacacacattgtaaactattcattttctccaccttgtttatatggtaaaggaatcctttcagctgccagttttgaataatgaatatcatattgtatcatcaatgctgatatttaactgagttggtctttaggtttaagatggataaatgaatatcactacttgttctgaaaacatgtttgttgctttttatctcgctgcctagattgaaatattttgctatttcttctgcataagtgacagtgaaccaattcatcatgagtaagctcccttctgtcattttcattgatttaatttgtgtatcatcaataaaattgtatgttaatgctggaaagaaaaaaagaagaaagaaagaaaccatccctgtccttcagtttataatctagttgggagagataaggaaacgtacaaaccaaacggtcaacagaatatctggaaggcatgtactcattgttcaggatgttccctctgaggaggcacagagggagggcaaaagctttctgtggggntgtgctagttnggctaaagctttcacagngggggtgggccattggaaaatggagtccnggatgggggtaggggtggttggggattcc

SEQ ID NO: 54119 - DNA, 372 bp, Homo sapiens
ccgaactatacttcctgttcttgttggccagcagtttaacaaatgacagtaggtgacacagaaatcaaatattaagaatggatgatcaaaatcaccaatgcacatgtagtaatcaaatgtttggggctagatattatggtatacaaaaaacattaaaatcatgtggtttgtaagcaaagcaaacatttttggaaatgtttgcaaattggacacaaccacaaattcaagaaattttttaaaaaagacaaaagccagcttacaaagatttgaccaataaaacccaaaggcctcctctgattaagaatttattttaaatactagtaagcaaaaatgtatttaggccaaaatgtaattgtcaatctgttgcacacc

SEQ ID NO: 54120 - DNA, 1351 bp, Homo sapiens
  misc_feature (1)...(1351): n = a,t,c or g
cggagagcagagagggagcgcgccttggctcgctggccttggcggcggctcctcaggagagctggggcgcccacgagaggatccctcacccgggtctctcctcagggatgacatcatccgtccacctccttgtcttcaaggaccacctcctctccatgctgagctgctgccaaggggcctgctgcccatctacacctcacgagggcactaggagcacggtttcctggatcccaccaacatacaaagcagccactcactgacccccaggaccaggatggcaaaggatgaagaggaccggaacttgaccagccagctgtccctcttacctaaagacttaaaccaatgccctagtgagggggcattggggcattaagccctgacctttgctatggttcatactttgactctatgagtactttcctataagtctttgcttgtgttcacctgctaggcaaactggagtgtttccctccccaagggggtgtcagtctttgtcgactgactctgtcatcacccttatgatgtcctgaatgggaagggttccctttgggaaattctcaggagggggacctggggccaagggtttggccaggcatcctgctggcaactccaaggccctgggtgggcttctggaatgagcatgctactgaatcaccaaaggcacgccccacctctctgaagatcttcctatccttttctgggggaatggggtcgatgagagcaacctcctagggttgttgtgagaattaaatgagataaaagaggcctcaggcaggatctggcatagaggaggtgatcagcaaatgtttgttgaaaaggtttgacaggtcagtcccttcccacccctcttgcttgtcttacttgtcttatttattctccaacagcactccaggcagcccttgtccacgggctctccttgcatcagggctaatctcgggccttgtcgaaggaagaggctgcagacgttaatgaggttagctgctggattccagtattcgtcgcataaggatccttctttgtctgcgaaggaaaaacacactgattatcataatgaggcacgtgggccgtggccggctgggtcggctgaagaactgcggatggaagctgcggaagaggccctgatgggcccaccatcccggacccaagtcttcttcctggcgggcctctcgtctccttcctggtttgggcggaacaattcaacctggatgcctacgtgggaagggacctcgaatgtgggaccccagcccctctccaagctcgaaatccctccacaagccacggggacaacctgcacctattcccacgggacaggctggacccaganactctggacncggggcctccccttgag

SEQ ID NO: 54121 - DNA, 602 bp, Homo sapiens
gaaaaataaaaaaactagctgggtatggtgacgcacatctgtagtcccagctccttgggggactgagacagaaggatagcttgaacctgagaggttgaagaggcttcagtgcaccgagatcgcccactgcacttcagcctgggtgacaaagtgagacgctgtctcaaatagtgaagccccgtctttactaaaaatatgaaaataaaaaatatgaaaattagctgggcatgatggcaggtgcctgtagtcccagctacttgggaggctgaggcaggagaattgcttgaacccaggaggcagaggttgcagtgagccgagatcacaccactgcactccagcctgagtgacagagcaagactctgtctccaaaaagaaagaaaagaaaacacaatggtaaagaaaaaaactaaggcaaagatctactggttgataacaaaatgtccacagtggtgcctgaaactgaatccaaatacgtaaagttaaagtccagtgccctatttacaatgggcaaccactcttgcctctctaaagccaaatatttacagcacagtttttagaacagcatcataatttcttttttttttcttttggttacaaaggaa

SEQ ID NO: 54122 - DNA, 243 bp, Homo sapiens
ggcccttgggatttcttgaccggtaagtatcttttatgataatgagatgactggggtctgagggcccctggatagcttcaggctggggtctgttaaccagaaagaccaaggaataattagagaattggaactttcaagtctgctctctaacctccagggaggggcaaggggctgaaaattgagctaatcacaagtggccagagatgcatttactaaacgcagacgaaaatggaaagattaatt

SEQ ID NO: 54123 - DNA, 407 bp, Homo sapiens
ctctcctttcccagtgtccccactgtgccagatccaagagaagcccgctctcctttcactgctgtggcaaacccagaaaccaggggcagcgatgagggaccatcgtttctctcccgggcctggccagcatccccagcctaggagaaggagaccctccccatcctgagtcagcccctcggtgctggcctctcctgcctgctgggagcctccccggtacggctgctgggtcctggggagatgcaggctctgttcagatgctgtctccatgctgcacctttgcatgtgtgccctcttggtcttgcttggagaagttgtgacagctcttgtccacgtgcgttctcactgtttcttttcccttcagttcctctcctgttcctttggtccatatggagttgttgccctgctct

SEQ ID NO: 54124 - DNA, 1071 bp, Homo sapiens
cgttttcaagatggcgactccctatgttactgacgagaccggcggcaagtatatcgcgtcaacacagcgacctgacgggacctggcgcaagcagcggagggtgaaagaaggatatgtgccccaggaggaggtcccagtatatgaaaacaagtatgtgaagtttttcaagagtaaaccagagttgcccccagggctaagccctgaggccactgctcctgtcaccccatccaggcctgaaggtggtgaaccaggcctctccaagacagccaaacgtaacctgaagcgaaaggagaagaggcggcagcagcaagagaaaggagaggcagaggccttgagcaggactcttgataaggtgtccctggaagagacagcccaactccccagtgctccacagggctctcgggcagcccccacagctgcatctgaccagcctgactcagctgccaccactgagaaagccaagaagataaagaacctaaagaagaaactccggcaggtggaagagctgcagcagcggatccaggctggggaagtcagccagcccagcaaagagcagctagaaaagctagcaaggaggagggcgctagaagaggagttagaggacttggagttaggcctctgaggcctttggggaatagggaatggactgcagaacaaaccgtggggctctctggggtctgggggaatacgggcaacagcagtcaggaggggtaccccccatactggcttccacctcctgcggcccagctctgtcctccagagcctagcgtctccctcaatccttcccttttcttcccaacttctactttttggactttccccctcccattcccagtgttcaaaatctcagtgactaccccaggtacctttgctgctgatttgggtgtcttgtttaaaagaaaatcaggtgggtgggaatctcttggagaactgaggctgagggtagagggagtatgcccaagtcttggagtcttggttcctgttcgcggtgtttatgggttatttccctctccatccctcattttttttttttttttaaaaaaagcaaaaatgagaataaacacaagtaga

SEQ ID NO: 54125 - DNA, 513 bp, Homo sapiens
  misc_feature (1)...(513): n = a,t,c or g
ttttagagccttagagacgttgtgctggaagaatctaagaggcttctagtcctacttcccatctgacattcagtttatcctaaaacattcctgctgagtggattgtccagcctgtgctttttcatctccagtgatgggaaacacttccattgagtacctcattccacatttatataggcgtgtgctcaaagtgtggctcaataaacatctactgattgagacacttccctcagtcactcatttttttgttaacactgatggaaaatgggtaaggaacaatcaaattcaattcgggaagaatatagaggtggtaataattggtaaaagtctgcagggttttttttaaccaaaggaaactggtttgagaaaattgtganatcagcattgaaatttgttacctactccaatcaagatttgcaaactacaaaaaaatcattctggaagcttttcacctntaaatatntaccaaggttaatttcagataaggaatgtccngcaagggaggtggaaggc

SEQ ID NO: 54126 - DNA, 1099 bp, Homo sapiens
  misc_feature (1)...(1099): n = a,t,c or g
tctcgatctcctgacctcgtgatccgccctcctcggcctcccaaagtgctgggattacaggtgtgagccaccgcgcctggccaaccctgctcttgaaatgtctaaatcttttcctcactagcatacacaattcaaatgcacaggcctccatgacttctttggaatttaaaagaagccttcatttcaaggatagaaatatgtaaaaatttaccaaccatggctaagtttgttatgggagtagtggaaggacagtggaaaaaaaaataggtttttccatgatacttttatttttccttttttaaaannnnnnnnnnnnnnnnnnnnnnnnnnnnnnnnnnnnnnnnnnnnnnnnnnnnnnnnnnnnnnnnnnnnnnnnnnnnnnnnnnnnnnnnnnntacttgtatttttctaattacagttctaccaaacatttgccaccataaaatacatgtatttttattctttatttaaattatggtgagtgatatttcttcctatatagccattaagatctctggaagttttgatctactttattcaaaccactttaataaataagacttttcacctaaatgaaatacctttgaattttataaacaacttccatgaaacatatattaaaaccacctttaatttggtatgaagacactttggcaatgccagcggaataaatgatcttgggcaagacccagcaagtacagtaaatgctcatgagctctatgaaaaatataggctacagaatacttcatttttcttttattgaactacagtacaaatgtgactgcttcaatatgaacatctatcttccaccaaatagcaaacaggcatcttatgtaattaaaaactaattatttcaattccaccaatggaaaagcaaaacaagttgcaaatatcaacaatacagagcctgctggtaaagacagagatgagtaatttataagctaataaagctgcagcctgaggatgccagatcaacattataaatatgaagaaaaagaaactaaatatttactcatcacaaataactcggcataagcaccagctatgttcaggtgcggccagcacataggccaagtataaatgtacaatcacagtgaac

SEQ ID NO: 54127 - DNA, 397 bp, Homo sapiens
gtgaaaatggcaatgttattgtcttcctataattatgaatatttttggatggattattagaatacatgaactcactaatgaaaggcatttgtaataagtcagaaagggacatacgattcacatatcagactgttagggggagagtaatttatcagttctttggtctttctatttgtcattcatactatgtgatgaagatgtaagtgcaagggcatttataacactatactgcattcattaagataataggatcatgatttttcattaactcatttgattgatattatctccatgcattttttatttcttttagaaatgtaattatttgctctagcaatcattgctaacctctagtttgtagaaaatcaacactttataaatacataattatgatatt

SEQ ID NO: 54128 - DNA, 1593 bp, Homo sapiens
gaattcgggccgagacttggaaaacccaaagtgtcggcgaccctgcaaggcagcttcccttccagcttcatgggcaaagtgtggaaacagcagatgtaccctcagtacgccacctactattacccccagtatctgcaagccaagcagtctctggtcccagcccaccccatggcccctcccagtcccagcaccaccagcagtaataacaacagtagcagcagtagcaactcaggatgggatcagctcagcaaaacgaacctctatatccgaggactgcctccccacaccaccgaccaggacctggtgaagctctgtcaaccatatgggaaaatagtctccacaaaggcaattttggataagacaacgaacaaatgcaaaggttatggttttgtcgacttttgacagccctgcagcagctcaaaaagctgtgtctgccctgaaggccagtggggttcaagctcaaatgggcaaagcaacaggaacaagatcctaccaacctctacatttctaatttgccactctccatggatgagcaagaactagaaaatatgctcaaaccatttggacaagttatttctacaagggatactacgtgattccagtggtacaagtcgtggtgttggctttgctaggatggaatcaacagaaaaatgtgaagctgttattggtcattttaatggaaaatttattaagacaccaccaggagtttctgcccccacagaacctttattgtgtaagtttgctgatggaggacagaaaaagagacagaacccaaacaaatacatccctaatggaagaccatggcatagagaaggagaggtgagacttgctggaatgacacttacttacgacccaactacagctgctatacagaacggattttatccttcaccatacagtattgctacaaaccgaatgatcactcaaacttctattacaccctatattgcatctcctgtatctgcctaccaggtgcaaagtccttcgtggatgcaacctcaaccatatattctacagcaccctggtgccgtgttaactccctcaatggagcacaccatgtcactacagcccgcatcaatgatcagccctctggcccagcagatgagtcatctgtcactaggcagcaccggaacatacatgcctgcaacgtcagctatgcaaggagcctacttgccacagtatgcacatatggcagacgacagcggttcctgttgaggaggcaagtggtcaacagcaggtggctgtcgagacgtctaatgaccattctccatatacctttcaacctaataagtaactgtgagatgtacagaaaggtgttcttacatgaagaagggtgtgaaggctgaacaatcatggatttttctgatcaattgtgctttaggaaattattgacagttttgcacaggttcttgaaaacgttatttataatgaaatcaactaaaactatttttgctataagttctataaggtgcataaaacccttaaattcatctagtagctgttcccccgaacaggtttattttagtaaaaaaaaaaaaacaaaaaacaaaaacaaaagatttttatcaaatgttatgatgcaaaaaaaaaaaa

SEQ ID NO: 54129 - DNA, 305 bp, Homo sapiens
cccacctcgccgcagagctagcccgggaagcccacactggcggccacggagcagagtccctcacccccaccagctgtagctgaacgtctggatggtggagaagagcagaagaagaagagaagacggattgaccggaccatgattggggaaccaatgaattttgttcacctgactcacattggctcaggggagatgggggccggagatggacttgccatgacaggtgcagttcaggagcagatgagatccaagggaaaccgagataggccatggagcaattctaggggcttatagctccaataatg

SEQ ID NO: 54130 - DNA, 5623 bp, Homo sapiens
  misc_feature (1)...(5623): n = a,t,c or g
ttttttttttttttccgttcccccagtcacacaacctttatttctctaccaaacagcaggtcagcaggtgggtacagggcccgctcctgctaagacctccccacctccccccaggaaagaagcagagaatctctgcaggcaccagactccctgcctcccccactgcgtttctctcactggccgcccagaacctgtgagagggaggaggggtgaggcgtaggggagggggctacagaacatggagcccattggtctgcaaggcaggctgaggggctttggatgtgggggactaggaaagggatgtgagtcttgatttacatataaaatcatcagtctgcacacgctctaggaggggccaagacatagggacaatccttggtgcaggtttctgctacccctcgctagtttttgccaaagtagcaaaagctgagttaagagaaaaattctgtccatcagaggccatcttcctctcatctgatatgacgtgttcctccagcagggagggagggagagcgggtgcccttggggaatcagccatccttagtgacatcctttcggctcatgggtgtcgtggggagggggcaaggagtgaggccaagagtccaggaagcccaccaggctcagaggcccccagctgtgcagacagcgcggcggccgcacactgggctgggtagaagggcgccacggtcaggaacctgaggatgtcggtggtctcaggtaccagggacgcgggtggcaagttggacctctgcgtggcagaccgggcggcagtgtgactctgaacatctcccgagctcaggacggggaaccctgagtccaggagggaaccctgagtccaggaggcgcgcggggctgaggcagtccagccaggctttcccgacttgtctcccgggaaaggacatcctcgctccgccctcctgccggctccttgtgtccgtctctctgacccttcaccggcccgggccctgcacatataaacagaagcagcctcgagctctcgggagccgactttgtggaagcagagtggagtggagggggctgcccaccctcgctgtacacagctgggcccagatggccccttctgatcccccagggctgacccagtcccagaccaggcacgaagagagaggtcagagccggtaagaaggacccccagagtcctccgtcagtgcagaggcaccagtcaccaagtgaaacgtccagcttccgaacaagggggagcaagctccagctgcactcgtgatttgggggtgggggggccccggatctctgggtatgctgccagctccggcttcttggctgccccctcccagcctgcagctcctgggccagagctgcagagcagggaacttcccaggagagtccaggagacaggaattacagacctcccaggccagaaggaagtggggacagagaccccaggacggggcccggggatggccattctgacctcgggcctgtcatttatccggcgggacccggtgggcaagtgggcgagtgtggtggcaagggtggggggcggaggcgaacacatgggcaccatcagtctgaggtacacaccggagactccaccctgttcccagcgctcacttctggctcatttcttctggaagaaaaacccaagagcgcgttaagatgtatgtgtaagggcacacatccagacagcttccttccagccccttccatcctccacttctcccaggacagccccaggctcccaaggcctcccttagtccagacctcagtctaccccagccccaccggaccccccaagctgcatccaggatccatccccgcaacgtcccccacgcctccttcactccactgttccatcagcacccccaaaccctccagtacatactctcctggttttcattttggggaatcaccacccattatcgtaaggttcagacaccaggctcatccttgcttctcttgcccatcacacacacccaggcctgatttcacccaaattgcgagagctcatctctcccactgccttccccaaccaggcctcaaggcctcaaggcctgccgccctgcccccagccccagtcttaccgtcccatcatacttctgcccctagcatcaagcaaaagccgaaatccagtcccaacacccatttcatggttcctcactgtcctcagagtaaagtctaagcccgcctgtaacctcccagatctgtccccaatacaaccaccacagcccagcccccacgcctcccctgacaactgctcagccacacctgggcagagccaggaggtggggtgagaggaccgcccccagcccccaggactgacccaggatccagaattctccccaggacacatccctcgtaaatgacataaatcacggggaagccacaagcatcaggcttcagaaaaacttccctaaaaggccacccagctggcttgggagcgcaaagggtccctctctcacccccgccccgtctggctttaggaggccccagggactgcagtagcgctgggcagggctgtctgggcttccagtgagcacattcctcggggtgcctccaccccacccctcagatggagccgcaggtacccagcctgtgtctgtcctccagcagccaggcaccacctttccaagccaaacttcacagggaccaccgtcaacatctcaaggaggtggaggtggaggtgctttctggggccagctccccagatctgttcaatgccgctcgcccacctcctggtgttagtctcaccctctctttttgggggagagtgggggnnnnnnnnnnnnnnnnnnnnnnnnnnnnnnnnnnnnnnnnnnnnnnnnnnnnnnnnnnnnnnnnnnnnnnnnnnnnnnnnnnnnnnnnnnnnnnnnnnnnnnnnnnnnnnnnnnnnnnnnnnnnnnnnnnnnnnnnnnnnnnnnnnnnnnnnnnnnnnnnnnnnnnnnnnnnnnnnnnnnnnnnnnnnnnnnnnnnnnnnnnnnnnnnnnnnnnnnnnnnnnnnnnnnnnnnnnnnnnnnnnnnnnnnnnnnnnnnnnnnnnnnnnnnnnnnnnnnnnnnnnnagtctcaccccctcttgcctgtcctccatggttgacacagtccgcaccgtgcttacactcctcccgtgcttccccactgccctgaggacaatgtccagggtctctaccttggcactcaaggcccttgccctgccgggcctcacccctctgccctgcatgctgagtgtcaacatctgtgctcacccagccctgttccaccaggttcaatcctgttctttccaaccactgctttaacctcaaagcctggagaaactccccctcactcctggcccagcaggaatctctccctcccagccctcctagcctgtcccctcccgctaggaccctcccgctctttaggcctggggaatcctccaccatccagcagccaatgctgaaaggcatctgagacacaggcttttccgtgctggctgagacattttagccatgggcataattttctcacttttaagttttctcaagaaaatctgctgagctcctaggcagttgtggccatttgggaactctcccgaggaagacaagccacctgagctgtcatgtccccagaggcctggctctgcaggtgagtgagtgtggtcaaggacggcccagaggcctggctgtgcaggtgagtgagtgtggtcaagggcggctggaggatttcctggtggaccggcccggtgctccggccagtgcagggatgccttgggcccccatggatgggagtttccagtgtctccccagggctgtcacagagcattggccagaaagaaccagacagggggcagaatggccttgctcagctccccccacccccacccattggccccagcaggcttgccttggctgagtgcccacctgcaccctcgagtgagcccctacatgtgtctggccactccctggacaggccagctcccttgctcagcccctagggaatgacagacgcgtgatctatttatagtccctccacccactcccctggggcacattcctgccagaggtggcccccaacgacccagctgccccagtgcaggcctcagccactgcccagcccaacctaggcccctgcacagcagtccagccatacggccactgcctctgcgcaaattcccaggaaccggagctcacccctgcttcctccctctctgagcagctctgacagcgagacgatgctgtgtccctggcccttggaagttcagaatcacccactctcagagcccacctggcagaggcaggtggatggaccccatgtcccagcccacttctctccagcccgacacctgccatcctgtcctctccactccggggttaaggcagacccagagctgtgagctcagaaacaaccctccccttgacccacccacaaggtgataccaaagaggccaacccggtgtggtctggggtccaagaggtggtcagcggctgcctactccaggcctgcgagactgtcctgagaaggcctggataaagacaggctgggtgcagaggggtcagaggctgaggcccagaagagcacacagtgccctggccatgtagggggtggcaggtgaagacagtgaggcagtgtggcccaagaggtgctcccgttgctggcccagtgagcccaggtcccctgcagtgcaagacctgcggacaccttgggacccagccaccagagccccttcacaccctccacttggtgatccgagaacgcctccccgatgtgcagacagagaggctctgcgctccacacccacagcgtccactgcagcccaggagcagaggcgggcggggaggcaggctggaggcgggacggggcctcccactcaccgtgcatgtggttccgggacaggtacttgagggcctcatccagcaggatgacaggcagagatatctggagcaccaccacccactggcgcccgctcagtggggtcacctggaaaatgagctggcggggaggggaagggaggtttggttaaaggaaggactggctgtcccgtgccccagccatctgctggccttatccacctgggctctgatggactcttcatgagcactcctaagaaccccctggatgcacccccgatctttgtccactcagctgcaccccccgatctttgtctgttcagctgcaccccccaatctttgtccgctcagcttcctctgcctcaagggcccacctctgcccttgcccactgggtcaactcccatccatcctgttgggaggcgggaggattctgccctgggaaagctcgtccttcctcccaccccagcctgggcacagtcccctcagcaaggggtttccccctcttccgtcccccaggtctgggagctcctgaaggtggggccacagctggaggtggtggctggccagacctctcacctccctctcctccaggtagtttccattgcaggggggccagagaggtccagtgaccagcccagggcctgtgatgtccagggaccagggcagtggggcaggcggggtgactcacaggcaggggcggcacgagcaggatgaggaagtgcagggccatggacatggccacagccaccagcagccaggggttcatccagggcggcatccgcagcagcgactggttctccgagacgctgccagggcacaggg

SEQ ID NO: 54131 - DNA, 2160 bp, Homo sapiens
  misc_feature (1)...(2160): n = a,t,c or g
gaattcgaaccaggtggccacccggtgtcggtttcattttcctttggaatttctgctttacagacagaacaatggcagcccgagtacttataattggcagtggaggaagggaacatacgctggcctggaaacttgcacagtctcatcatgtcaaacaagtgttggttgccccaggaaacgcaggcactgcctgctctgaaaagatttcaaataccgccatctcaatcagtgaccacactgcccttgctcaattctgcaaagagaagaaaattgaatttgtagttgttggaccagaagcacctctggctgctgggattgttgggaacctgaggtctgcaggagtgcaatgctttggcccaacagcagaagcggctcagttagagtccagcaaaaggtttgccaaagagtttatggacagacatggaatcccaaccgcacaatggaaggctttcaccaaacctgaagaagcctgcagcttcattttgagtgcagacttccctgctttggttgtgaaggccagtggtcttgcagctggaaaaggggtgattgttgcaaagagcaaagaagaggcctgcaaagctgtacaagagatcatgcaggagaaagcctttggggcagctggagaaacaattgtcattgaagaacttcttgacggagaagaggtgtcgtgtctgtgtttcactgatggcaagactgtggcccccatgcccccagcacaggaccataagcgattactggagggagatggtggccctaacacagggggaatgggagcctattgtccagcccctcaggtttctaatgatctattactaaaaattaaagatactgttcttcagaggacagtggatggcatgcagcaagagggtactccatatacaggtattctctatgctggaataatgctgaccaagaatggcccaaaagttctagagtttaattgccgttttggtgatccagagtgccaagtaatcctcccacttcttaaaagtgatctttatgaagtgattcagtccaccttagatggactgctctgcacatctctgcctgtttggctagaaaaccacaccgccctaactgttgtcatggcaagtaaaggttatcctggagactacaccaagggtgtagagataacagggtttcctgaggctcaagctctaggactggaggtgttccatgcaggcactgccctcaaaaatggcaaagtagtaactcatgggggtagagttcttgcagtcacagccatccgggaaaatctcatatcagcccttgaggaagccaagaaaggactagctgctataaagtttgagggagcaatttataggaaagacatcggctttcgtgccatagctttcctccagcagcccaggtaaaactctaagcaagttagctgtagtgccatttcagaaactggcctaaatggctatgtagaacatttcattaaccctataagtcattcagtattcttttctctctgtgggactgatacagtcttggtttgtattttgtttgaatcaaaactggttatagcaatactcaaattaaatggaaaaaacttcatgatagcgtaagtttggaaagtttagcaaaatcacagtggtactgatttttatttgttttctattttttttattttatatttttaatttttttaacagggtcttcctctctcgcccaagttctcatgcctcagcctccccaaatagctgggactacagggcacaggcccaccacacctggctaattttttttgttattttttgtgggagntgggggtttcaccctgttgccaaggcccagtctgaaacccccgggctcaagtgatccctcccgccttggccctccccaaaatgcctggggattaataggcatgaagccgctgcacttggcctgatactgatttttattccttgcgttatcacatagtgttgtatttgaaacatagttcatggttttatcaaagaactgaagatgagaatactggtcatctaactttgtaatttgatttgattatactgtaaagtttgacagtctcattttaacctgcgtttgtatctattactaaaatgtattttttgacctcttactgattcattgttggtatgtacaaactgttgacttgtaaaatcaataaagtcttagttggaaaaaaaaaaaaaa

SEQ ID NO: 54132 - DNA, 3330 bp, Homo sapiens
cggtcccggtgggccgacttccggcgagcgggcaagcgggaaccaggtggccacccggtgtcggtttcattttcctttggaatttctgctttacagacagaacaatggcagcccgagtacttataattggcagtggaggaagggaacatacgctggcctggaaatttgcacagtctcatcatgtcaaacaagtgttggttgccccaggaaacgcaggcactgcctgctctgaaaagatttcaaataccgccatctcaatcagtgaccacactgcccttgctcaattctgcaaagagaagaaaattgaatttgtagttgttggaccagaagcacctctggctgctgggattgttgggaacctgaggtctgcaggagtgcaatgctttggcccaacagcagaagcggctcagttagagtccagcaaaaggtttgccaaagagtttatggacagacatggaatcccaaccgcacaatgggaagggttttcaccaaacctgaagaagcctgcagcttcattttgagtgcagacttccctgctttggttgtgaaggccagtggtcttgcagctggaaaaggggtgattgttgcaaagagcaaagaagaggcctgcaaagctgtacaagagatcatgcaggagaaagcctttggggcagctggagaaacaattgtcattgaagaacttcttgacggagaagaggtgtcgtgtctgtgtttcactgatggcaagactgtggcccccatgcccccagcacaggaccataagcgattactggagggagatggtggccctaacacagggggaatgggagcctattgtccagcccctcaggtttctaatgatctattactaaaaattaaagatactgttcttcagaggacagtggatggcatgcagcaagagggtactccatatacaggtattctctatgctggaataatgctgaccaagaatggcccaaaagttctagagtttaattgccgttttggtgatccagagtgccaagtaatcctcccacttcttaaaagtgatctttatgaagtgattcagtccaccttagatggactgctctgcacatctctgcctgtttggctagaaaaccacaccgccctaactgttgtcatggcaagtaaaggttatcctggagactacaccaagggtgtagagataacagggtttcctgaggctcaagctctaggactggaggtgttccatgcaggcactgccctcaaaaatggcaaagtagtaactcatgggggtagagttcttgcagtcacagccatccgggaaaatctcatatcagcccttgaggaagccaagaaaggactagctgctataaagtttgagggagcaatttataggaaagacatcggctttcgtgccatagctttcctccagcagcccaggagtttgacttacaaggaatctggagtagatatcgcagctggaaatatgctggtcaagaaaattcagcctttaggcaaaagccacttccagatcaggctgtaaagttgatcttggaggttttgctggtctttttgatttaaaagcagctggtttcaaagatccccttctggcctctggaacagatggcgttggaactaaactaaagattgcccagctatgcaataaacatgataccattggtcaagatttggtagcaatgtgtgttaatgatattctggcacaaggagcagagcccctcttcttccttgattacttttcctgtggaaaacttgacctcagtgtaactgaagctgttgttgctggaattgctaaagcttgtggaaaagctggatgtgctctccttggaggtgaaacagcagaaatgcctgacatgtatccccctggagagtatgacctagctgggtttgccgttggtgccatggagcgagatcagaaactccctcacctggaaagaatcactgagggtgatgttgttgttggaatagctttcatctgggtcttcatagcaatggatttagccttgtgaggaaaatcgttgcaaaatcttccctccagtactcctctccagcacctgatggttgtggtgaccagactttaggggacttacttctcacgcctaccagaatctacagccattcactgttacctgtcctacgttcaggacatgtcaaagcctttgcccatattactggtggaggattactagagaacatccccagagtcctccctgagaaacttggggtagatttagatgcccagacctggaggatccccagggtcttctcatggttgcagcaggaaggacacctctctgaggaagagatggccagaacatttaactgtggggttggcgctgtccttgtggtatcaaaggagcagacagagcagattctgaggggtatccagcagcacaaggaagaagcctgggtgattggcagtgtggttgcacgagctgaaggttccccacgtgtgaaagtcaagaatctgattgaaagcatgcaaataaatgggtcagtgttgaagaatggctccctgacaaatcatttctcttttgaaaaaaaaaaggccagagtggctgtcttaatatcctggaacaggatcgaacctgcaagcacttatagacagtactcgggaaccaaatagctctgcacaaattgatattgttatctccaacaaagccgcagtagctgggttagataaagcggaaagagctggtattcccactagagtaattaatcataaactgtataaaaatcgtgtagaatttgacagtgcattgacctagtccttgaagagttctccatagacatagtctgtcttgcaggattcatgagaattctttctggcccctttgtccaaaagtggaatggaaaaatgctcaatatccacccatccttgctcccttcttttaagggttcaaatgcccatgagcaagccctggaaaccggagtcacagttactgggtgcactgtacactttgtagctgaagatgtggatgctggacagattattttgcaagaagctgttcccgtgaagaggggtgatactgtcgcaactctttctgaaagagtaaaattagcagaacataaaatatttcctgcagcccttcagctggtggccagtggaactgtacagcttggagaaaatggcaagatctgttgggttaaagaggaatgaagccttttaattcagaaatggggccagtttagaaagaattatttgctgtttgcatggtggttttttatcatggacttggcccaaaagaaaaactgctaaaagacaaaaaagacctcacccttacttcatctatttttttaataaatagagactcactaaaaacaagactagttagtgcagcatatctg

SEQ ID NO: 54133 - DNA, 444 bp, Homo sapiens
  misc_feature (1)...(444): n = a,t,c or g
gacaagggctggcccgggaagctacgggccatccaaacggtgtcctgcctcctgcagggcccatgtgacgctggcaaccgggccttggagctgagcggtgtcatggagagtgtgattgctctgtgtgcctctgagcaggaggaggagcacctggtggccgtggaggctctgatccatgcagccggcaaggctaagcgggcctcattcatcactgccaatggtgtctcgctgctgaaggacctatataagtgcagcgagaaggacagcatccgcatccgggcgctagtgggactctgtaagctcggttcggctggagggactgacttcagcatgaacagtttgctgaaggctccactctnaaactggctaagcagtgtccaaagtggctgtgcaatgaccagatcgacgcaggcactcngcgctggcaagtggaggcctgcttac

SEQ ID NO: 54134 - DNA, 712 bp, Homo sapiens
aaaaccacaaacttcctttgaaaaccagcttgtagtcagggcccggagcgcatgccatagactcggcgactcaggaatcctgaagactctctgagcgacctggagcaccttggctgtgtccctgcctgccttcaccctcctccagtgcccccagtactgggcgtgagtccggaagtggccacaacccagcctggaccgtcgcttataaagctgtgtaaacctgtataagctcaggcgttgacagctggaaggcagctggcactggcagcccccttcattgcacctatctcccccatctcattgccacggctgaaccctccttctcaatcttggaacagcacccccttctttaaggtgaagctccccccgcagaaggaagtgatcacatcggatgagctcatggcccatcttggaaactgccctcctgtcccatcaagccccaggagaagtcagagggacttcagcttaattttcagcagaatgtggatgatgcaatgacagtgctgcctaaactggccacaggtctggatgtcaatgtgcgattcacaggcgtctctgattttgagtatacacccgagtgcagtgtctttgacctgctaggcatacctctgtaccatggctggcttgttgatccacagagtcctgaggctgtgcgtgcagttgggaaactgagttacaaccagctggtggagaggatcatcacctgcaaaca

SEQ ID NO: 54135 - DNA, 96 bp, Homo sapiens
gctttaaaagcaaacattcccaatttggttcccttttataatttctactttaatgtgtttatgttgcttagtggtcagattaactagggattcaac

SEQ ID NO: 54136 - DNA, 731 bp, Homo sapiens
gcgaccgccaaggacactcatgaggaccatgatacttccactgagaatacagacgagtccaaccatgaccctcagtttgagccaatagtttctcttcctgagcaagaaattaaaacactggaagaagatgaagaggaactttttaaaatgcgggcaaaactgttccgatttgcctctgagaacgatctcccagaatggaaggagcgaggcactggtgacgtcaagctcctgaagcacaaggagaaaggggccatccgcctcctcatgcggagggacaagaccctgaagatctgtgccaaccactacatcacgccgatgatggagctgaagcccaacgcaggtagcgaccgtgcctgggtctggaacacccacgctgacttcgccgacgagtgccccaagccagagctgctggccatccgcttcctgaatgctgagaatgcacagaaattcaaaacaaagtttgaagaatgcaggaaagagatcgaagagagagaaaagaaaggtgacgtggtgccatgggtttggggggcttctttgcagactcactctgcatctgactatacttccaggcgggtgctttttctgtctgccagataaacattccagggtgctgtggccgcctcacgtatccagagtgatgcagctccctggggacacaggtgcttcctggggagcccctgagcactttgcaagtggtgctggcctcagtccaattgggcaagcattggagt

SEQ ID NO: 54137 - DNA, 1062 bp, Homo sapiens
cgaggttcgggtcgtggggcggagggaagagcgggcgggcgggaggcgccggcgccagacgcggagggaaggagctacgagtagccgccgagaggccgcggagccagcgacgaccgacccagccgagccgccgccgccgccgcgcccccatggcggccgcccaaggacactcatgaggaccatgatacttccactgagaatacagacgagtccaaccatgaccctcagtttgagccaatagtttctcttcctgagcaagaaattaaaacactggaagaagatgaagaggaactttttaaaatgcgggcaaaactgttccgatttgcctctgagaacgatctcccagaatggaaggagcgaggcacttggtgacgtcaagctcctgaagcacaaggagaaaggggccatccgcctcctcatgcggagggacaagaccctgaagatctgtgccaaccactacatcacgccgatgatggagctgaagcccaacgcaggtagcgaccgtgcctggggtctgggaacacccacgctgacttcgccgacgagtgccccaagccagagctgctggccatccgcttcctgaatgctgagaatgcacagaaattcaaaacaaagtttgaagaatgcaggaaagagatcgaagagagagaaaagaaagcaggatcaggcaaaaatgatcatgccgaaaaagtggcggaaaagctagaagctctctcggtgaaggaggagaccaaggaggatgctgaggagaagcaataaatcgtcttattttattttcttttcctctctttcctttccttttttttaaaaaattttaccctgcccctctttttcggtttgtttttattctttcatttttacaagggacgttatataaagaactgaactcaacattcaggttgttttttttttttgtttctaagtttttgccctattgaagatgacttcagaaaatccattccccagtcatgaaaatgtactgtgctaactttcttttccatagtggaaacacttatttatagtcatcaaaaatagtgaataaaaaacacatttggaacctgg

SEQ ID NO: 54138 - DNA, 411 bp, Homo sapiens
  misc_feature (1)...(411): n = a,t,c or g
aagcactgtaagtaatgagtattgctttaagttaaaaatccacctgtgttatagaaagatttgctcgttgtctccccccacacaacgttcatatgttaattccctaaaccttaagtcactgtgtttggaaataagatctttagaacgtggataaggttaaatgacatcataagagtgtggccctgatacaaaaggattggtctccttataagaagaggaggacacgagataccctttctctatgcactcacataggaaaggccatgtgaaaacaaagcaagaaggcagnnnnnnnnnnnnnnnnnnnnnnnnnnnnnnnnnnnnnnnnnnnnnnnnnnnnnnnnngtagcctccataaccgctagaaaaaaaaaaattctcttgttaaagcccctagtctgtgatgttttg

SEQ ID NO: 54139 - DNA, 1476 bp, Homo sapiens
ggagatcgatcaatctggacagatactccagctgatagggaaaggaaagctaaggaaacacaagaagcaaggaagtcatccagtaagaaagatgaagaacatatattatcaggaagagataagagactggctgagcaggtatcttcatacaatgaatcaaaaagatcagaatctcttatggacatacatcataaaaagttaaagagtaaggctgctgaagacaaaaataagcctcaagagagaataccatttgaccgtgataaagatctcaaggttaatcggtttgatgaagctcagaaaaaagccctaataaaaaaatctagagaactaaacaccagattttcacacggcaaaggcaatatgtttttataaggggatttccctgtgcaatgaagaaaagttgaagaatactctttgtccatctttatttctttgtttttggcttcttaagattagagattactttaatcttaaaaaacatacaaatttaccttgttctgtatgtccttttaaggtcatgtggaaacataaaacgaatgttttttatgtagaacagaatattctatgtgcctttagcttctgtggaagtatggggaattatgggcttttcttcaaataattattttaagaggcttccattccccctgatttttgtggtgtctcacaagtaccctctaaggtctggtcaggactgaccaccaaatctctaccacagcctggacctccttgtgaaatatacctaacctgccctagagtcagtgtgtcaagtccttcctgtaaatccatgactttgaaatttgttgttttttccctttaaactgcagccagtgaatacaaatttacttgaaaatagagggtatggggttttgcctgttttgtaatcagtttgcttgttttagcactcagggctttttatttgttatttaattttttaattgtttttaagtcagaaagatctctgggttatctcatgtgctaaggaaaaactattttgctttttccaactttaatagttagtatttctaggggaggcaatcaagataagatatgccattaactgttagcattgtgaaatctgtaagactcaatctctgatctcaaccaaagctttctgagtcctggaactttgctttgggacaactttactttacccatttatatgctgtacttaacagtttgtagctaatttatggggtcatatcttttttttagctaatttacgggggtcatatcagtcatgaatagccttttttaaaaatttaataatccctgaatacaaaaatggaaatggaaaatttataatcataacccccctaattgggagtattataagtttgtaatgctttaagcactgcctcttaagatgataaatttataagatgagaaattctatttaaactattaaactattgttaaataaatgccaattctataagttaatatttccttgcagggattaatcccaattgttccact

SEQ ID NO: 54140 - DNA, 74 bp, Homo sapiens
gaaatgactctttattcaataaatagtgctgggataactggctagtcatatgcagaagattgaagttggacact

SEQ ID NO: 54141 - DNA, 442 bp, Homo sapiens
cccgggtctgccctgatgtttcctggaataatgctgaggactgcctttcgggtagccgccctattcagttcacttcatctcggaaatacctgacccctgccttggatccagcggccctcctgagagctgaggaaggaggaaatcctatgtgtctgctcccggagctgccacaacccatcttcccacaactcggaacttggaaaaaggaacccaggacacgactttgcttttcttttggacctagttgaagtcacagcttggaggaaaccagtttgcactatttgatgaggaatttggccaccaaaccactgatactttcccaaaggtttggcagaaattgttttttgagtggctcaccagagtacccagaagaatcagtatggaattagaggacagtggcctaccctaaataaagacatgagtgatgtaaaaaaaaaaaaaa

SEQ ID NO: 54142 - DNA, 790 bp, Homo sapiens
aatgacctaccccaggcatttgtttgggcacacttctgtcctggggtcatcgttcctaggtggcttcggacctgggacttttcctgtatctgcacattgtcgttttatacacaattgccaaggtgggactgctttcaactttactgtgctttgaagctgcaaaggttctgccctgatgtttcctggaataatgctgaggactgcctttcgggtagccgccctattcagttcacttcatctcggaaatacctgacccctgccttggatccagcggccctcctgagagctgaggaaggaggaaatcctatgtgtctgctcccggagctgccacaacccatcttcccacaactcggaacttggaaaaaggaacccaggacacgactttgcttttcttttggacctagttggtgattatactctgtctcccatggagaccacgtcttgcatccttccttctatatgggatttaggatagaaattaaaaagaaaacatattattttgagtcttgatttggagaaaggtagtattcaggaggaagtaggctatgatacacatagaaaatttgaggacagtgttacttaacaaggacatttctgtctctgcagaagtcacagcttggaggaaaccagtttgcactatttgatgaggaatttggccaccaaaccactgatactttcccaaaggtttggcagaaattgttttttgagtggctcaccagagtacccagaagaatcagtatggaattagaggacagtggcctaccctaaataaagacatgagtgatgtata

SEQ ID NO: 54143 - DNA, 561 bp, Homo sapiens
ggaaaaagtaaagttcctcgtgactggagagaacatgtacttttacatattgaagccaaaaagttaaaaaagattcgagtgagggttgaaaaggatccagaacttggatttagcatatcaggtggtgtcgggggtagaggaaacccattcagacctgatgatgatggtatatttgtaacaagggtacaacctgaaggaccagcatcaaaattactgcagccaggtgataaaattattcaggctaatggctacagttttataaatattgaacatggacaagcagtgtccttgctaaaaactttccagaatacagttgaactcatcattgtacgagaagtttcctcataagcactgtggacaaaaaaagcggggaagacagcaagatttattggaagatacttacaggggaaattaatattttgactatttttatatataaagaagaactcaaaaaattatgttcaaatttgtacattaatgaaataatggaacttgtggttagagggaaagaaccactgtacagaatattaaagggagactgttgaattcataccatataaa

SEQ ID NO: 54144 - DNA, 696 bp, Homo sapiens
ttttttttagtttctaaaaatattgttttattaaataactgttaaataggatttttacaaaataaatggcatagaaaagggtaaaaatgtttatgttcccagaactttctatgccttttcaacagaaaggaaaaggcacagaaagttgtcagctgctattacttctggagagctgccacaactggacggtgttggagtatcaccagttctctctctcatgggaaagaaggggatcaacactttgtagagaggtagcacgtcttcaggtaacagctgctacacacagctggcttcaactttagctcccctgttgatgactgtcagcttcaaggtgtagcatcccatggcactcaggaagaattaaggagctgcacgaggttttcaagacatttcaaataataggcatttagagggtttgcttctgagtttgggaaagttttctttgctaaggagtatgcttcatccactcttctttttactgatgggcttttcaaagctgtttttgccttctgataattgtaaatcagagccccaaagggcagctgctccaatcctctgagcattttgattctcactttccagacaggcagcaagcacagtaatgactttttcattagccaggatcttgggtttatttgcaggactgaagcaaacattatgaaagataagaagaggcaataaagggctgctcttgtg

SEQ ID NO: 54145 - DNA, 911 bp, Homo sapiens
aggcacagggtgccatggtggaggctgggaaggggaaggcaaccagagtgggcaaaacgagggccctggagcagacacggcagcaaggggagcctgcagcgctcccagcggactccgccacgtcctgctggtggagcaaaggcgggctgccatgttgtgagtggccaagggtcgctcactgggcaggaacattgtcaaggccattcatgcttggaatagggtctctcttcagctctgaggcaaatctgttctctaattttcagatgacttcaaggggaacgtgtaccaccacccctctggtgcgtcacattgcttaggaagcctgctgtgtttatcactgggtggctgtcagggctgagatggagagggccagggcctggcgaggtggagcagtcggcccagggtgtcccagcaattgttgcttggaacagggtctggaacccacaggagaggcctgaaggacccaggggccctctggctggatgcgtttgcctatcaggacccagaattacttacagacctgtttagggctaggcttggcctctttcttgagctcatctggaggggtgtggcaacactcattcttcatccttattctccctggctgtgggcaacactggtcctcagtgtcaccagatggtcctcctctgtgcccatgacccctcagcagccaaggctggccctgccagataaatgtgtgtgcccatgatcacacccaggggcacaggccacatacgtttccctgaaaccttgggctccagcctccatcccgtccatgtgggagggaacttgggtcccagcagtgtgtctttcagcaccaagtcatgtttaaaagaccagagagacaagcattttgccaagatcttccagggaagatgcatgtgtgacacattaacattcaaatcaggcca

SEQ ID NO: 54146 - DNA, 108 bp, Homo sapiens
gatttgggtattattctttagagaactagagattacctagctgcaacctaagtttcctgaattagaatcatttgagcagcaccatcttaattggctcattaacatatt

SEQ ID NO: 54147 - DNA, 173 bp, Homo sapiens
  misc_feature (1)...(173): n = a,t,c or g
ttgggattaagcaaggcattttggagaagggagcattcaaagtgagtctcttgaactgaatcagacattcaggagactgggtgaaaagtgtattctgaggcatagtatctggattttcttttttttttttcctccttttngctttnnacanggatngnaaaagtggccgccca

SEQ ID NO: 54148 - DNA, 339 bp, Homo sapiens
atttattgcagcatctggatcttctttgcctcaaaacttagaatatttttaaatacaggacaagctagtaaagaattcctatgtaataaagatagtccacagctgcagaggctaaacaaaaatgagatgataacatgtgacctttcttaggcagatggctggttggggaaagtagatgaatgaaaagaggaaaagatctccagaagagcgggaaggtataaagtttctctaggacagtttcccaaatcgtgcttcattggacattgacacaggagaaggctgtgggggaaaagaaaattcatgatcagataggtatggcaaatgcctcattctatggtt

SEQ ID NO: 54149 - DNA, 253 bp, Homo sapiens
  misc_feature (1)...(253): n = a,t,c or g
ctttctccaattctgactaaccctcccaagaattgaaatgttctaaaaccctgaaaaatgaaaacccttccaaccgaacaccaataattatcatttttgtatttttctcctcaaaataggcaattaaacatgtaaaaataaataaagacttcaaaaaaaaaaananctntnctntaaaatnatgngtnaaatgtagtttcaaaancaanatntgccggcagtttttacacgtnaacncggccgnaanttccaa

SEQ ID NO: 54150 - DNA, 352 bp, Homo sapiens
ataaagtaagcgaagtctgttttttgcatcctctcaccttgcctctgtagacaccttttccccttctgttctttctccagatgtcccccacctagggtgactaatcatctcagattgtccggaactatctagatttcatgactaaaatcctgggaaacccttcacactcaggcaaactgggagggtttatcacctttctcctgtgtgtagtcctgactctcagctgctgttaaccaatgtcaacttagagccattcagtaagcaaataattattgagctcctactacatgctaagcactgtgctaggtgagcaaagcagacatggtccactgctctcaacagctaacagtct

SEQ ID NO: 54151 - DNA, 903 bp, Homo sapiens
gtagttctgcttcccttcggaggaaaatttcaggctgaaggtttagcgggtgccgcctctaaagagagcaatcactacacttatggctgggattttgcgcttagtagttcaatggcccccaggcagactacagaccgtgacaaaaggtgtggagtctcttatttgtacagattggattcgtcacaaattcaccagatcaagaattccagaaaaagtgtttcaggcctcacctgaagatcatgaaaaatacggtggggatccacagaaccctcataaactgcatattgttaccagaataaaaagtacaagaagacgtccatattgggaaaaagatataataaagatgcttggattagaaaaagcacatacccctcaagttcacaagaatatcccttcagtgaatgcaaaattgaaagtagttaagcatttgataagaatcaagcccttgaagttgccacaaggacttccaacagaggagaacatgtctaacacgtgcctcaaaagcactggggagttagtagtgcagtggcatctgaaacctgtggagcagaaagcacatgagtcctaatgccccagcagcttccgattggaaaatgcaaattgtttttatttaaagatgatacctggaggggtggggagaagtaagaattgtaagggaggttcagtagtggggaattctgtgacagctgattgaagatgatgatgaagaacctctgcattctagttaccctttgcttcccttcacctcttgtaaaatttggcttggcaacaatgacattgtcatgcttattgtcccaatatccatcctgtcgtagatcttaatgtttttgatcgttgcgttaaagtggaagtgccacccacagtgaaaccagatcccattaataaataagcttaaaggcaaaa

SEQ ID NO: 54152 - DNA, 410 bp, Homo sapiens
  misc_feature (1)...(410): n = a,t,c or g
ccaagatataagtctggccagatatgctattaacagtgaatcttccattctcattaaattatttgagatctgtacaatttgaagattgttacaaatggtgaccaattttaagcatattttaattaggggtggtataatagtcttttggctaaaacttaattagaatgaaaaaatacttttgccttttttatttgatagattccagtgcctcaggaatgaacctccagtaatgggagagctttttttgatttggtttgannnnnnnnnnnnnnnnnnnnnnnnnnnnnnnnnnnnnnnnnnnnnnnnnnnnnnnnnnnnnnnnnnnnnnnnnnnnnnnnnnnnnnnnnnnnnnnctgctcacctcccgagtagctgggattacaggtgcctgcaccagcccggatagttta

SEQ ID NO: 54153 - DNA, 1819 bp, Homo sapiens
tacatgcttcctgctgtggctgtctcggaacccgtggtcctccgcttcatgattttctgccgtctcttggcaaaaatggcaaataatgatgctgttctgaagagactggagcagaagggtgcagaggcagatcaaatcattgaatatcttaagcagcaagtttctctacttaaggagaaagcaattttgcaggcaactttgagggaagagaagaaacttcgagttgaaaatgctaaactgaagaaagaaattgaagaactgaaacaagagctaattcaggcagaaattcaaaatggagtgaagcaaataccatttccatctggtactccactgcacgctaattctatggtttctgaaaatgtgatacagtctacagcagtaacaaccgtatcttctggtaccaaagaacagataaaaggaggaacaggagacgaaaagaaagcgaaagagaaaattgaaaagaaaggagagaagaaggagaaaaaacagcaatcaatagctggaagtgccgactctaagccaatagatgtttcccgtctggatcttcgaattggttgcatcataactgctagaaaacaccctgatgcagattctttgtatgtggaagaagtagatgtcggagaaatagccccaaggacagttgtcagtggcctggtgaatcatgttcctcttgaacagatgcaaaatcggatggtgattttactttgtaacctgaaacctgcaaagatgaggggagtattatctcaagcaatggtcatgtgtgctagttcaccagagaaaattgaaatcttggctcctccaaatgggtctgttcctggagacagaattacttttgatgctttcccaggagagcctgacaaggagctgaatcctaagaagaagatttgggagcagatccagcctgatcttcacactaatgatgagtgtgtggctacatacaaaggagttccctttgaggtgaaagggaagggagtatgtagggctcaaaccatgagcaacagtggaatcaaataaaatgcttccactaccaaaagacattagagaaaaccttaaaagtaataaagagaaatatatttgtcacttatacctaaaatatgagtggctcatttttgcattactctcttctagacttgactagtcatttacttggtatatattgttttcattgattggggaaacactagatttttacctcggtttttgatcatttataatggagagaggaagttgcctatgttttgtaataatttattttttagcaggaatattgattagcagcttttttttctttatacacatagataactaactagattaatgtttagtttcttatttgtaggcacaggatgcatgaaatttcaagctctgggattttttgtatattgtgtatctgtatcaaaaatatcctctccttttcaaaaatgacaggttggaaaatgtttgtcagacttattaactggtcatattataataatactgataatgaccaactgctcattctgaaagccaaacataaaagctaggagaagtggcatctgaacatttttgctttgctgccagagtaaccctgactaataatacaataacagcaatttttttaaaaaactgagatttcctactggcttgaagtttttctatttagcaaaataattagtaataagttttgactaggtctaaagaatgaacacattgtaaacagttgccacagtagtttctaataaattgatcataaaagcagctatcctttttttttttaattctagcttctttttaaagattatttgggtacctaataaaggataatttatatcttattaca

SEQ ID NO: 54154 - DNA, 566 bp, Homo sapiens
aactaaagttataaataaagagaaaaactcattcagaaatcatggattttaaaaatattttactgcagccaagttttcatttcaaaatgtaatttcagtttggagcttttaggcattatgtatatttaaaaaatatattcttcaaaaatgccattttggcatggtgggatggatgttgcaaaagatatccggagcctccagtctgtcattaactgatatggtaaatcacctctcttctttgggtctcaattttttatttatctatatggtaaactcagagatcactccttaggggtgagtcctattgcaatatgaccgacaaagaagacaaaatagcattgaaactaacccatacaaaatatccaactctggattctgtgaataagtatcttgaccataaaaagtcattgctgttcttgtttctaatgtaaatagtgtccattagtaaaagtgaaattcagtcttaagtagggtgaattggatcaccatttacacaagagatggctttttcctttgcttgaataaacattttggatcacctccaaagaatgaaaaccagtagtcgt

SEQ ID NO: 54155 - DNA, 409 bp, Homo sapiens
aataatttgaataatatgaaatgatagacatgctaggtactgctctgtagtggttagcatagttgctgccccctttttgccatagtctagtgtgatatttcgttgggtaatgatgaatacctggtgccatggaagagaaaagtgggacatatactccagactttggaaatccaggtagcattgctgtcagctaaattaacacctgaagtttaaatagaaatgagccagatgagggcaagagtggaagagatggggataaagcaagggtggtccaagaggaagaagtaacccacacacaggcttgaaggcaaaaggtaacataaccttctcaagacagtaagtatagagtgatggtgcacactggaagagatggtagaattaggcaggatattgtaagccttgaaaaaga

SEQ ID NO: 54156 - DNA, 244 bp, Homo sapiens
  misc_feature (1)...(244): n = a,t,c or g
tcatttttagccctggcctagacaaccttgaggcaggaacgtctggaagcggagaggctataattaaggctgtaaaactgagtcatctcaggaaagagaaatgaccagtgactcagtgcaacatagtaaaatttataatcactcttcactaaatgagctggtcattccagggtgattttatacttctgataacctggggctgatataagaggcgatttcattaataaggnaaaataatgagttg

SEQ ID NO: 54157 - DNA, 1253 bp, Homo sapiens
tcagaggcttcaagccctagaataactgttttgtaaactaaaggatgtttctgtattttcacacggacagatctccgtgatcccaatcacccacgtataatgagctaaacgtcaaggaaaagaaaaaagatgcctgcttgatttggccaaagatgatatttttctttattcccatgtatttttttttcaaatatgactgagagatttattcaaaagaacatgacgttagaattgacccccacacaccaagaacaacgtctagactactactaattataactaagtcattttaagtggcaggtgggtatcttaaaggtggtctgttctcatcgtttcacaacacaaagttctgagtacattcttctatggacaaacatgaatttgctggtttctctttttttaaatgagcatgttatgatacacataattgcattatgatgcaggatgacataatacataagacgatgttttcaagctggttttataagtacttatctcacatccacagagagttggtttgccatgtgatgcaatgtgtcccacatagacatgaacaaaacaatacagtcactaccccacagggggaccagtgatttttcaaaatgaagctttaaacacaacaaatcgtggacagacacgttgataggaaagagccttgaatataggcaccagtgccccagttcaacaatatccatccaatgtaataaagtttgaggaacaaaatatacactatattctggatgtaattacaaaattctgccatgggaaaactagaacacaagtagggcaaaagcactttttatgatttttttttttgccatatctttggagcatgaaattagcagaaagggaagatgttggtatgtccctaaaatatcttactttttgattgcttggacacttttatcactagatttggatccaaattctatcctcctattaacccttacttctcaacaaaaatgaatctctgtgaaagtcttgatgaacctgctttggaagaagatgcaataattcacacaaggagtccattcattggttctcgccttgcacaaagggtggactctgtctcaaacacttcaaatttctagagatgaaatccagaaagaaaaagtactgaggcgactgtttccactattgatctcttttcaactcacttcaagttgtggtttttgttgtggagaaattattgcttgtgaaacccaattaactgaggaaggggccccagtctgcagcaggttgttgcacatgga

SEQ ID NO: 54158 - DNA, 694 bp, Homo sapiens
aaaaacaagtgtctgaattgtatagtgtctttacatgaaagaactttaaacagtggccttatggtagaaaattttataccagatttttctttttctgatgacattttggcttataactcgaagttttcttaagtttctgaagatcaaggcctatataattcatacatttcatattataagaaggcaagagacaaggtgcttcaaatattccatcaggtagttgtgagtgcactgaatttttagtaatatgttcattcagtttttttccacaactatttgctcttttccaatttcaaaatgctattgtggaaaatatgtaaagattttgtaatctatagtccatcttatttttccctcagggcaagcttgtgcatatcatatttttaaaggctttttaaaaatctgacaaacaaaatcctcatatttgaaaattgtactttacctacctacagcattacacattttgcaagcacatcttatagagtgtttacttttagttcagttgatatgtattgcatacctactatgtgtaagagcaaatggatgggatttttaaatgaaatttttaggccccaataccttatttctttatgttttctgtgttctgcttaacagtacatatacattcccaattacatttttgtgaaatgtttatttgtaataaaataaaatgttgttgctctttctgcttaaa

SEQ ID NO: 54159 - DNA, 369 bp, Homo sapiens
gagagaaaagactgaggtcccccgaggagaaaagaattcgtctctagaccaccttaggatttaaggccacaacataaacttctgctagaatttccagcctcctggcctgccctgaagatttcagacttgcctgaccagatcatcgcatgagccgattccttaaagtctctcctgctgtttttctggaaaacctgactactacagtgcctgaggtgggacccgattaccccattctgccttccagctgctggcggtgctgtgtatttgcccggaagggtgatccagggcttcatcaggcaaagcattggggatggaagttccggcgactctcatggcctcgcctggtgaggggcacccctggggcaaacc

SEQ ID NO: 54160 - DNA, 412 bp, Homo sapiens
ctgaggtggtggagtgagagcatcccatcagatatatatacgattcatcagtcggcacttaaaaagatcgataacaggcagtgggaggctgggagatggtaccttcaatggatttactgaaggctttatttttcctttgccttgaaaggcttaattggttaaagcagattccagacattctgatgcccctatgtcagaacaaactgcactttgatataaactgtgtttatttgggaaacttgtttatttgagaatcgagattgcaatacattccactctgtgtgtctcatatgtaggattttatgtagcagtggccctgcaatccataataagctccttaaataaatccgacagtttgatttcactttttgaaagagggaaaaaagagaagaaagagagtcaatagtatgtg

SEQ ID NO: 54161 - DNA, 422 bp, Homo sapiens
gctctgcataagcaacccgatatgtgcttcatgccaacctctataccagcattctctttctcacttttatcagcatagatcgatacttgataattaagtatcctttccgagaacaccttctgcaaaagaaagagtttgctattttaatctccttggccatttgggttttagtaaccttagagttactacccatacttccccttataaatcctgttataactgacaatggcaccacctgtaatgattttgcaagttctggagaccccaactacaacctcatttacagcatgtgtctaacactgttggggttccttattcctctttttgtgatgtgtttcttttattacaagattgctctcttcctaaagcagaggaataggcaggttgctactgctctgcccttgaaaagcctctcaacttgg

SEQ ID NO: 54162 - DNA, 435 bp, Homo sapiens
aagaaaagtgaacacgtttgtagaactttcataagcacacagttgctgtgttgagttctctttaaaaacaaggacaaaaccaaccagcgttcaaaggaacctcccatcagagtcccctaaagtattttaggttcagtgagcatttgcctgaataaaacctaaaagagtagtcttaacacattactaactttttctaagagaaattgattcctgttttgtcatctgatgcaatttgctcttataaagagacattttcataggttcagagtaactcacctccatgggctgaccaaaggcttttctaatttttgttactgatgagatgaaacctatttgtaaggagatcttccccaggagcatttctgttgccttcttgacatcaatgaaaagtagcatattctcttatgaaatagcatgagaaaacacagggcattt

SEQ ID NO: 54163 - DNA, 406 bp, Homo sapiens
gggtgaaagtacgggtcgcgagaggttgttcgcgccttgagagttaagcgaagtgtggtggcttccaaggaatacaaacataaaggccttcgaccgttgcaaatagactaaagtgaaaacaaatctgaatgaagatgaagttatttcagaccatttgcaggcagctcaggagttcaaagttttctgtggaatcagctgcccttgtggctttctctacttcctcttactcatgtggccggaagaaaaaagtgaacccatatgaagaagtggaccaagaaaaatactctaatttagttcagtctgtcttgtcatccagaggcgtcgcccagaccccgggatcggtggaggaagatgctttgctctgtggacccgtgagcaagcttaagctgcaaaccaaggtgaggag

SEQ ID NO: 54164 - DNA, 428 bp, Homo sapiens
taggactatggcatcctatggagaacgttaatgttcaatcacagtatcaagagatcctggtttcacagctttgaaatgacctattaaatgtactttctaatcaacaaatgtatatatcaggcatacaaatattcactaacattgccttatgataatatagtatttccaatagtgtttttgcatattttcaaatatttgattcaactactctctttaggcaaaagaagggtgtaataatcaaagagttcttgagcttccctctaactttataattctttaacatttgtgcatccctagaggatgtaggtagcagtgatgacagtcaatatatttttaggttagaaagatacttatataatgataaagataaaattttggggaaaaaactcacacctggttttatagtctgacacatcaaccatttgatt

SEQ ID NO: 54165 - DNA, 356 bp, Homo sapiens
agctatttaatgatcctttgatcattaaatatgcagttatatatctcattgggatgaatgggaatggctaggattgttactgattcttgcccctaaaaagagaagttgaattcagaatctcttagaaggcataaaaatttaccatcaccatggcattgaggaaggcaacacaggcataaagtgatctcattgttcaacctcgtcaccatttaaccagctgtttccttacatatggtggcaccctttctgagagcctgtaagtattttttatagccctaatcatgtgctgccctcttaatcctgggcatttaccctgctgttccctctgctgaacctcacacatgtgtccctctcta

SEQ ID NO: 54166 - DNA, 115 bp, Homo sapiens
cccccccaaaattccatttaatttaatgccatcatttatgcattcagcaatatttttgagggcctactatgtgccaggcactagttggagttgctgagggtataagatgaggttc

SEQ ID NO: 54167 - DNA, 118 bp, Homo sapiens
gagattatgacacaaatgtatacatttgtcaaaactcactgaaatgtacattggtaaattttattatatgtaaattatactttaataaagctgatttttaaaacaaaaaaaaaaaaaa

SEQ ID NO: 54168 - DNA, 422 bp, Homo sapiens
ggggaccgcggcgaaggtggtgagtgctcttgggcgccttctcccaacgtccctgccagactcgcctccgggctgattctccagttggtttcctggactccagagtagctgtccggcctggccccggaggtgcaaagtaagaaaattgaagtcaaagaccatgggagatacagcaaaaccttatttcgtgaagcgcactaaagaccgggggactatggatgatgatgacttcagaaggggtcacccccaacaagattatttaataatagatgaccatgctaaaggccatggcagtaaaatggaaaagggccttcaaaaaaagaagataacaccagggaactatgggaatacccccagaaaaggaccatgtgctgtttccagcaatccatatgcatttaaaaacccaatctacagtcaacccg

SEQ ID NO: 54169 - DNA, 1449 bp, Homo sapiens
atggctgcggcgatagccagctccttgatccggcagaagcggcaggcgagggagtccaacagcgaccgagtgtcggcctccaagcgccgctccagccccagcaaagacgggcgctccctgtgcgagaggcacgtcctcggggtgttcagcaaagtgcgcttctgcagcggccgcaagaggccggtgaggcggagaccagaaccccagctcaaagggattgtgacaaggttattcagccagcagggatacttcctgcagatgcacccagatggtaccattgatgggaccaaggacgaaaacagcgactacactctcttcaatctaattcccgtgggcctgcgtgtagtggccatccaaggagtgaaggctagcctctatgtggccatgaatggtgaaggctatctctacagttcagatgttttcactccagaatgcaaattcaaggaatctgtgtttgaaaactactatgtgatctattcttccacactgtaccgccagcaagaatcaggccgagcttggtttctgggactcaataaagaaggtcaaattatgaaggggaacagagtgaagaaaaccaagccctcatcacattttgtaccgaaacctattgaagtgtgtatgtacagagaaccatcgctacatgaaattggagaaaaacaagggcgttcaaggaaaagttctggaacaccaaccatgaatggaggcaaagttgtgaatcaagattcaacatagctgagaactctccccttcttccctctctcatcccttccccttcccttccttcccatttacccatttccttccagtaaatccacccaaggagaggaaaataaaatgacaacgcaagacctagtggctaagattctgcactcaaaatcttcctttgtgtaggacaagaaaattgaaccaaagcttgcttgttgcaatgtggtagaaaattcacgtgcacaaagattagcacacttaaaagcaaaggaaaaaataaatcagaactccataaatattaaactaaactgtattgttattagtagaaggctaattgtaatgaagacattaataaagatgaaataaacttattactttaaaggaaaggatttggagaattgaactcacaaactgatgttatatactcaatagcttaaactcatgataatgctgcgatgtgtggttttgcttgattttgtattttatttgggcatctggaattgacacaccattacattctgtttgcaggattttttttgtaaccatgaaattgaacatttccaaattataaactatgttaatacctataaaatatatagccaggaaccatttatcatcaagaaaagtgtaagaaattatttttgagatgtaatttaagattgttttatgtaaaaggaaaatcttgtatggcatcgaatagccttaatgaatttaattctttcacaaaaatgatttcaaattatc

SEQ ID NO: 54170 - DNA, 288 bp, Homo sapiens
  misc_feature (1)...(288): n = a,t,c or g
gtgacggggaggtaccaggtatttgagagcaatcgccaccgctttcctggaacttgagtaaatacaatcaagtggcatcttaaatttttgctggaagtggagtcatgagactaaagatatctcttttaaaagaaccaaagcatatccttttaatgcttagaattttttaanggacnannaataatgcccnttttttttttgnacctnanttnttnatgaggnnnantntcccggnttatttncatnctttnnacttnttngnnnattttttnntcnccgnnagcccct

SEQ ID NO: 54171 - DNA, 189 bp, Homo sapiens
ggaaagcagtattggaaaaccatataactcaggctgctaacattttctacctcatgaaaaaagggaatgaatggagttggtgaaaagatattctcttaatatacctccacgtgttatttttaaaaaataagcatgcattacttgcacaatcaaaatacaaaatataaaaatggcgaaaaaaaaaaaaaa

SEQ ID NO: 54172 - DNA, 492 bp, Homo sapiens
caagaaggactgtaaagatgtcatagcacagccccgccgccgccactgtcacagatgcagcttgcgcacgcgttccgaggctgggaggaggctcggggctcggaagatgaacctcagaacaaaggacttgtctattcccccatatctcagcctccaaggcaacgcacaatacctttgcgggcaaacactaagaaattttttaatgtcccctccgagcggcacggcaaaacgccagtttttcggttttgttcttaaatcatcgatttccccaccccattatccagtatctagggtgtttcgcatccccccagctccccaaagtagccttcccggggagaaccactcgggctcggatttagggaatgccttcacagggacgcggatgatgaaagggcggggacggaggcaggacggcaggaggaaggaggcaggggccctggggctcaccaaagcgaggcgcacgagtacgagcgaagtctggtctgcgcagtg

SEQ ID NO: 54173 - DNA, 468 bp, Homo sapiens
gctggccctgcccctctaccctccctgcctgagcacttacctccttagatggaggccgagaccccaagtactgaggtgccacctgacccagagcctggtgtacccctgacacccccatcccaacaccaggaggccggtgctggggacctgtgtgcactttgtggggaacacctctatgtcctggaacgcctctgtgtcaacggccatttcttccaccggagctgcttccgctgccatacctgtgaggccacactgtggccaggtggctatgagcagcacccaggagatggacatttctactgcctccagcacctgccccagacagaccacaaaaaggaaggcagcgatagaggccctgagagtccggagctccccacaccaagtgagaatagcatgccaccaggctctcaactcccacagcctcgcaaggaagggggccggtccttgtttccagattccaagccaagc

SEQ ID NO: 54174 - DNA, 1218 bp, Homo sapiens
cgactctcacgtgaccaggagtcgacgtgtgcagaagtccttatagtccagggcctgtttccctgtagcagctccttattgctggagaaggagaaaagtgcccaagatcctttcaggatatttggttttttgggcgcgacacaaatcgaggtgagggaagagagaggaaaatcccctgaatccctgcaggattaatttattcaaaaaggaaataaaaaatactcaatatgcaaaagtcttgtgaagaaaatgagggaaaaccacagaacatgccaaaggccgaggaagatcgccctttggaggatgtaccacaggaggcagaaggaaatcctcaaccttccgaagaaggcgtaagccaggaagcagaaggaaaccccagaggagggccgaatcagcctggccagggatttaaagaggacacacccgttaggcatttggaccctgaagaaatgataagaggagtagatgagcttgaaaggcttagggaagagataagaagagtaagaaacaagtttgtgatgatgcattggaagcaaagacattcacgcagccgtccttatcctgtgtgctttaggccttgaattcatttttgcctaatattaaaatctggccccagctttctttctgttagcattttctgatgtatctttgacctccattttacttttaatcatctgatgaaattttgttttaggtaatttccttggtaccagcatctcattggattttggattttgacccattttccaggtctatttttcaattggaaactttcacacatttgcatgggaatatgttcattccatgttgtaaagtaaaacataacaggttatggcaaagcagcatatttaatatcagctcacatatgtaggataaaattccaaactttgtgtgtgtgcgtgtgtgtatacatacatccatataacatatatcacaaacttaaccaagcttatttctgtgtggtgtgaaattttatttgttttcttctttttgttctttttgcttatatgtactttttaatgaacacgtgtctcacacacaaaaagaattaaggattttttttacaagtaagagtcaaataatttgcaaccagcttatgagggcaatgggggcacctaaactcttgatgaaagaactttaaaaagaaatgtaaacctcaaattacctctggatctcttagccagaggaataaactggcaattattacagataaaaaaa

SEQ ID NO: 54175 - DNA, 415 bp, Homo sapiens
gctgtggggagatttcagtgcattgcctcccctgggtgctcttcatcttggatttgaaagttgagagcagcatgttttgcccactgaaactcatcctgctgccagtgttactggattattccttgggcctgaatgacttgaatgtttccccgcctgagctaacagtccatgtgggtgattcagctctgatgggatgtgttttccagagcacagaagacaaatgtatattcaagatagactggactctgtcaccaggagagcacgccaaggacgaatatgtgctatactattactccaatctcagtgtgcctattgggcgcttccagaaccgcgtacacttgatgggggacatcttatgcaatgatggctctctcctgctccaagatgtgcaagaggctgaccagggaacctatat

SEQ ID NO: 54176 - DNA, 426 bp, Homo sapiens
ggctcctttattatgtaaagaataaagtgggctataaaacatgagaatatgcaggctgacccccaaaagcctgacacccttgaaaacccactcccccatgtctcagatggctttcatgggggcaggagaaaggatagtgaccttaagtcttctcccgtgacggtgacagctcgtttgccagctgttgctggaaccggccctggatttagaggaaggcgtggaagttcaagactcaagatacttcctggatagagaataactggaaaggctcaagtaagtttttccgaagctctcgccttaggaggagttcagcctggaataagagcgtgtgttagttttgtcatcccacctaactacagattgaattaccctgataggtttttaagccattccagtgtgcattatctcaataaagctgttatttaa

SEQ ID NO: 54177 - DNA, 949 bp, Homo sapiens
ctgcctctgaataatcaggaacggtggcttcagagacgtctcttgggccttccctctggccacgtctgcacccacccctcctgggcaccctcctagcctgccatccctcacctgcagccaggctctcagggaaggtccatgctgcttggcctgagttcaaggctttctgcctgtagcctggactcccgtggacccccgtgggcaggtggcttccccgtggcatctccacaccgcctctgcctgcccctgtggactgatgctatcgcgcaccgtcccacgaccccaccccgagctcctgaagccggggtctgagcctgcatcacctctggcctctcatcccccactctcctgagagcagtggtcacagcggccggccgctctggctgagaaggcagagaggcaggctcaggcctcagcgtggacagcagggataaggggcacgaaggacggggactcggccccttcagaattcctcaggactctcaggtgcagctttgccaaaaaggaacttttcatgtcatgcagttgaggggacttagtctcaatcccaggctcctcttgactctgggcagctttaatcaggttgggcagcctctgctacagcgtggagtgggatggctctcttccctcagccacgccgcttgtgaggacagaggtgggggagtgggaagtgggaagtcaccagagaacaggagagggatttgagggcgcgaccccagcgctctccacggaccagccagagggactggagccaggtgtgcatgggttcaaggccctggccctgcccagcctctgtcttgggagctcagccccagggttcggtcgtcagcagtttcccaagaacaagatgtgatggcatctgctgctgaaaccctgatgaggaccaggccccctgcaccgctgtcagcctgaggaattaaagctttggtgctgggaagagcattattca

SEQ ID NO: 54178 - DNA, 2135 bp, Homo sapiens
ggctcttttaaatgaccccaggcgtcgtgtattgaatcctagactcacgtccgtctcgccggcgcccgagccagtccgcgcgcaccgcgtctgcgtccccgaaagccccgcccgcaagggctgccctgcctacctggtctccgacgtgctcgtctggagggcggtgcgaggggccgagccgacgagatgttcttgctgcctcttccggctgcggggcgagtagtcgtccgacgtctggccgtgagacgtttcgggagccggagtctctccaccgcagacatgacgaagggccttgttttaggaatctattccaaagaaaaagaagatgatgtgccacagttcacaagtgcaggagagaattttgataaattgttagctggaaagctgagagagactttgaacatatctggaccacctctgaaggcagggaagactcgaaccttttatggtctgcatcaggacttccccagcgtggtgctagttggcctcggcaaaaaggcagctggaatcgacgaacaggaaaactggcatgaaggcaaagaaaacatcagagctgctgttgcagcggggtgcaggcagattcaagacctggagctctcgtctgtggaggtggatccctgtggagacgctcaggctgctgcggagggagcggtgcttggtctctatgaatacgatgacctaaagcaaaaaaagaagatggctgtgtcggcaaagctctatggaagtggggatcaggaggcctgggcagaaaggagtcctgtttgcttctgggcagaacttggcacgccaattgatggagacgccagccaatgagatgacgccaaccagatttgccgaaattattgagaagaatctcaaaagtgctagtagtaaaaccgaggtccatatcagacccaagtcttggattgaggaacaggcaatgggatcattcctcagtgtggccaaaggatctgacgagcccccagtcttcttggaaattcactacaaaggcagccccaatgcaaacgaaccacccctggtgtttgttgggaaaggaattacctttgacagtggtggtatctccatcaaggcttctgcaaatatggacctcatgagggctgacatgggaggagctgcaactatatgctcagccatcgtgtctgctgcaaagcttaatttgcccattaatattataggtctggcccctctttgtgaaaatatgcccagcggcaaggccaacaagccgggggatgttgttagagccaaaaacgggaagaccatccaggttgataacactgatgctgaggggaggctcatactgggctgatgcgctctgttacgcacacacgtttaacccgaaggtcatcctcaatgccgccaccttaacaggtgccatggatgtagctttgggatcaggtgccactggggtctttaccaattcatcctggctctggaacaaactcttcgaggccagcattgaaacaggggaccgtgtctggaggatgcctctcttcgaacattatacaagacaggttgtagattgccagcttgctgatgttaacaacattggaaaatacagatctgcaggagcatgtacagctgcagcattcctgaaagaattcgtaactcatcctaagtgggcacatttagacatagcaggcgtgatgaccaacaaagatgaagttccctatctacggaaaggcatgactgggaggcccacaaggactctcattgagttcttacttcgtttcagtcaagacaatgcttagttcagatactcaaaaatgtcttcactctgtcttaaattggacagttgaacttaaaaggtttttgaataaatggatgaaaatcttttaacggagacaaaggatggtatttaaaaatgtagaacacaatgaaatttgtatgccttgatttttttttcatttcacacaaagatttataaaggtaaagttaatatcttacttgataaggatttttaagatactctataaatgattaaaatttttagaacttcctaatcacttttcagagtatatgtttttcattgagaagcaaaattgtaactcagatttgtgatgctaggaacatgagcaaactgaaaattactatgcacttgtcagaaacaataaatgcaacttgttgtgctcaaaaaa

SEQ ID NO: 54179 - DNA, 751 bp, Homo sapiens
ccgttatgacatgattacgaatttaataccgactcactatagggaatttggccctcgaggccaagaattcggcacgaggggcacagtggctcacgcctttaatcccagcactttgggaggctgaggcagatggatcgcctgaggttgggagttcgagaccagcctggccagcatggtgaaaccctgtctctactaaaaatacaaaaattagccaggtggtggcgcacacctgtagtcccagctactcgggaggctgaggcaggagaattggttgaacccaggaggcggaggttgcagtgagcagagatcgtgccactgcactccagcctgggtggacagagcaagactccgtctcaaagaaacaaacaaaaaattaaaagggatagaatataatgaaatatattttgaacttaaattatattctatatgtgtatcttcctaggcaaaagctgtaatttccagagagaccattaggaacaggtagtatctatttttctccattatttatttctagaaactcataaaatggattgtatttttctataagaacaaaatattaattaaggtatagatgactgaccaagggcttaatcaaataaaatgactaacagcatctatcataaagccacacaagccttatgttctcatctcaaaaatgctgtgacagctttttggctgctttaaccataagaaaaatgattggtggatgattttattagcccaggcttttaaaaactttcatctaggccac

SEQ ID NO: 54180 - DNA, 420 bp, Homo sapiens
gataaactggcagcagggttagacattactttcaaagcttgaggtagaccgagtcagcatgctagacaggcttctctctctaaccaaaactgtaatcttcaggaccagcaaactcagcccaaggcagctaatccccccaaccccatcctccgcgccccgtgcggctgatcggcagccctgattcgccaatttgtcctctctcattcactgatccaccagcctgactgctaagagctatagtctttttagttgttttgtctttttaagcaagatgaaaacctttctattagggattttggggttgggaggggatgggcagagatataaaccccagcctttaagactttgacaattgtacgtaaatacagatgtgtataaatataggcacatgcatatttttatgtgaaaggtgattttaaa

SEQ ID NO: 54181 - DNA, 76 bp, Homo sapiens
gcgctatgtgtagtgggttcaatggtgcgtacctgcaaaagataggaccatgccctaaccccctggaacctggaac

SEQ ID NO: 54182 - DNA, 487 bp, Homo sapiens
gactccgtctcaaaaaaaaaaaagcataataatttattacatcccaaatatataaaaatttgagtgcctttgcagttgggatggttcctaaaattgcgtatagaattaaggcacagaattgtgtgtaaggtcctgaatctggctaaaatacagtggatgtatgtattggaattatgaggcataagtagccagtatctatagttagaatctacaaggcctcctttttgcacctgtagactagaatataactgttattggtgcctttgagtgttatctctcagtggctagaggtgctgtttcaagcacaatttagactagggttgaaccactcattgttcaaatcattggtgggctccaatgtaaaatatcactacatcagtccacaagcaacattaaggaaatctaaaggaaatggaatttgactttttagagtataatgatgttctagggcataatgaggaaaatttttaaaaaatagattataatg

SEQ ID NO: 54183 - DNA, 467 bp, Homo sapiens
ggatgaacactcaacttgggcaaggaagtgaaattctccaaagcaaggaggagggtgctctgaatagatggaccctgattctacttacaaaactgtgggaagaaaccggagcttcctccctctctgagacaacggtgccactgagactgcgtgagatgcgacgtaaattctctgcactgtactgctcatcctccccacactccctgctgaggcctcggcaaggtgtagccttcaaacacacagacacatacaggcagacacataataccagacttatggttttcccacagacagtatcctcagggtatgggaaagagtaggggaagactcagtagtaatagacacctgaattagatgtattggtaagatagtggccatgtaacaatctcctctaattcaaaagaagcccaatcatagaccttattttcttctgatagccccatatcaccatgcctctgccttatcat

SEQ ID NO: 54184 - DNA, 1629 bp, Homo sapiens
cacaagcaccagctgcggggactccaacagcatctgcccggccccctccacgatgtccaaggccgaggaggccaagaagctggcgggccgcgcggctgtggagaaccacgtgaggaataaccaagtgctgggaattggaagtggttctacaattgtccatgctgtgcagcgaatagctgaaagggtgaagcaagagaatctgaacctcgtctgtattcccacttccttccaggcccgccagctcatcctgcagtatggcttgaccctcagtgatctggatcgacacccagagatcgaccttgccatcgatggtgctgatgaagtagatgctgatctcaatctcatcaagggtggcggaggctgcctgacccaggagaagattgtggctggctatgctagtcgcttcatcgtgatcgctgatttcaggaaagattcgaagaatctcggggatcagtggcacaagggaatccccatcgaggtcatcccaatggcctatgtcccagtgagccgagctgtgagccagaagtttgggggcgtggttgaacttcgaatggctgtcaacaaggctggtcctgtggtgacagataatgggaattttatcttggactggaagtttgaccgggtacacaaatggagtgaagtgaatacagctatcaaaatgatcccaggtgtggtggacacaggcctattcatcaacatggctgagagagtctactttgggatgcaggatggctcagtgaacatgagggagaagcctttctgttgaccctgcaaggagcagagtgtgttcaccttgagtctccagcccacagccaaggtggacgtacctctccaggagcctttgccttaatgtatctctgcctggacaacttgtggtggggggtggggggaagagtgggagggggagttaaatccagtcttatgaagtattgttattaaatgtctttttaaaaagagaaatataaacatatatttttactattaaaatattcagttttttaaatgaagtagaacttgagttcatgttttatatgaaatatttaccaaaaaaaaaaaatgaggtaaactgtatttaaaacctttgacttgagtctgctggtaaagcttctgaatattgagtttgctgagaaataaaaatcaaaacttctttaagctggtaaagtgaggggcccaccagcagtgatctcctgatgccttactggaaactttgtttacttgtctgctaccctctgatttgtttttagttagtttttattgtgagcacacatagtacctagttacatcttaagatcaggtttataaaactgtggagtggagcggtatggtatggaatgacttggaatgtaagctgtcagggagaaaatgttgttacacttttgctaagatctgggggtttcttcatattcctgctgttggaagcagttgaccagaaatgcttgccagtactgccaaagcactgctgtgaaatgtgaagtactttgttttttttatttttaatgattttctttttgttattaatatttttctctgttcctttgttattacttgcatggtttggcgtcagaagtccttacctctttatattgtttgcaggtttaaataaaacagtgtggtgccaaaaaaaaaaaa

SEQ ID NO: 54185 - DNA, 1579 bp, Homo sapiens
  misc_feature (1)...(1579): n = a,t,c or g
ttttttggtagtcaattgtataaaaataattttatttactactgtaaataaagtagtgcaaagagtagtttggacccacaatattgcattactgatttattcactaccttagcagcatgtagtatacagacattctgctcttcctcttcctctctannnnnnnnnnnnnnnnnnnnnnnnnnncctgtacagactcacgcaggcatgaggggtagggatgaaactataagctagaagctagaggcttacttgctgcatattcagttgctgccagtctattctaacgtgtaattcatggagaagactacagttaagtactaagaatcttctaaatgtaatttcatggattgcaattgaaatgtaaaagatatccgacaatgccattaaatgattcggaagcactaggaccctagaaaaattcaaggagaaaaatgtaaaccaatttacaaagctattgccctccctgcatttccaggcacaaacaatttatttcaaggtgccttataactgctaggtcttggaagtcaaagagaaatctatcaattcagctttgaggaacagggctgtggcaagccacaggtaccaaaatattatccaccttgtagagtagtcataattttctgttcttcaataaagggatgaagcacgcactgtgattcttaagacacatcttagtgtataagaatccagatctgccgtaggggcatgctatgactcctaatacatacaatcactagaacaaaagtctgtgatggcccagtaaacttccccacatgccctatgatcaagatgttccttgtatgtgtttgatgacctttggtattaccactgcctgatctgggtacttccttgtaatttgactttaaaaaaaatgacaccaattgcaaaatttgcatccagttgacaagacatttaaggtgtttatcaggatcatgccctggccccagcttcccaataccagctgttgaaaagattctctctcatctggagagaactggagtgcacagttcacccacgtggctccgggttattagttactgtgggctggtcttggtcagaggcatctgcagctggagtcacagctggacttgcagtggacgtggcagtgtctggggaggcctgggatggtcttggagggggatcgcttgctgagacagactggaaatactgcacagtccaggcgatcaatatggatagcagaaaggttcccagaaagtagatcagggctgagtgcaggatagcaccccagagaagccgcaagtgcaggtaaagccaggccaaggagcaggggctgaaggactcctcgttactgtggctccagcacctttcgtacagttcctggagaatggagatgttattagaatggagagttgagtcaatttccaagaaatccaagatatggtgtgggattatcgtaccttcctcgattagcagggccaggttaaaaaatccctgggagtctccatccagggcggtttgggcggtacatctgcacagacaactccaggtcttgtgactggttttggtggccatagtagtaaaggtctcccatcttcaaatatgcaaacccacgcgtccg

SEQ ID NO: 54186 - DNA, 1406 bp, Homo sapiens
ttttttttttttttcaatgagaagagctaacatttattcaatcaacaaatgctgagtgtccgccatggccagatactctttgacagtcgtcacagcacacagaacatgtgattagtaaacataatggtgcaggacatcagcctgctaatgttattcccaggtgtcatcaaatgagtgacaatttgtacaatgtttcattaaatgcctatttagaggataaccatagttgatgacacagaaaaaagccaaacccagaatgcaagaatcgtagccagcagagcacgtggaaacaacgtccaagttgcaggtagcagcttgcaggataaccacagttggcgacgctttcaggcagctgggagaattctcagttgtccattttatggttaaatggttttactaaggtctaaaaaattcatttctaactcctagacttatgtttccattactatataaagaatgagccaaacaaataaataacaaaatattcactatggaccccaaaatttcaaggcatgaagagagccccaaattctctgtgaactgcaaagagaaaccattagtacaggaatagatgaagaaattgtttttgagtataatataaacataaacaaatctcttaacagcacgagtgtcaacaaatgcttttgttgttgcaaaaacagtctcaaaaagagtggtgacaaggagactgacaaggagaaatgagctattttttcatctccaaaattgcacttcctggtccacggttcttagcactgcagatgttgcagaactgtgcagcagagttcatgctgggcatgggcaggcactccttgtggaacatgtgccggcaatggaagaccaccacgctgaagggcttagctgcatcctagagcttgagaacctcagctctaagcaatggcagcaccagcattccactgagcaggatggaagccacaacacttctctccactgggttattctgatggaagaataggggaaaggcacgactcacagatgttctcctcatcaacaagaacacctttcatttgagttcggtgcattttcttcagtaaggacaaagagtcagctacgagaatcttcttgcagccttcacgaagcagaatttgcaaattgtagtcttgcagaattttaaccaaggaatctctcaaattggggatctccattccttccttaatacggtgaatcagtagaattgggtcaacatgtgtgccaatgttgtttaacaagccagtaataaatggtggtttgtcaatggaatataaaatcaaatcttcccacagctctccatcatcttgctccttggcaaattcgattgctttatcaacatcatgtaattcctccataatcatcttcagggcacttcggctattacccattcggctcagaagataaactgtctcttc

SEQ ID NO: 54187 - DNA, 414 bp, Homo sapiens
ctgctttacgctgacattttagcatgcagctttaagtttacactcttggactttggcaaacatttgcaaatagattttgttaggactactaacaacagctgttcagcggagtggtggaggcaaaaagcactctgacatgaaagtaacaatgagaggagaggaactggagagggaaagtaaaggctactccaggagtgttgctgtaaagtggtatatagaggaatgagataagctataaggagaagtgggtcaaagaaaattttatctctttttttcttttacattcatcacaatttgagtatttcattttaagatcagaaaaataataagtttacacgttgatggaaataactcaatagaggaaaagttggtgaaaaaggaatgtgggcagggcgccgtggctcacgcctgtat

SEQ ID NO: 54188 - DNA, 399 bp, Homo sapiens
gaactgaccactaactaacaaactataaattcacccattgtgggttgacctggtaagttcccccagggctgtgtccttggcccctcctttgatattagtgacagatgactttttttatgccttacccattccacaaaagaatttgaagccatttacacaagagatagtactagtaaattaggagtgctgatcaaatttttagataataagaaacccttaggaaggatgacaatttagaatccaaatttaggatccaaacaaataccattacaaactataaaaatgagcagaatctaaatgtaacatttcaataaatgcagattgataataacatctgtgcagagttgaggactatagagtactgtgctgtcactaacagtattgtgtgctactaagagt

SEQ ID NO: 54189 - DNA, 909 bp, Homo sapiens
aaaccttgggctgcccccaggtgtgtttagcccagaggagaggactttcttgccctttctttccatcttttagctccttatcatatactggttcagttgtacccttttaccttacccatttctactatcatggaggttcagaattcacatctgaattcaaaagataattgggagccagggcatggtggtgtgtgcttaataatcccagttacccaggagccactgtgcctggctgagttttcttaaagtgagcttaatttctgaactcttagtgattcatatatgtacataaatctgtgatcccatttcttattgcaccattcaggaacactttatataaatgagtggctttttatttcatattattagtagtatcatggttccattacaggcctattaacatcatacattgtcattagtctttgaagaaaaaatatgtaaatatatatgtgtaacatgagaatttctctctaaagcagggcttaaaattttttggaaaagtttgacaaagcataccacatgaattcagatttacctcaatgctaagaattatgtttagttaggaaaaaggaaagtcattttgacctcaggtaggaaaaatagattgctttgagttttatgtagctttagactttaaaaagttagaatttattctgtaactaaaaattatttgaaaaaattatgcctctggtttaattattggtgattacacactctttctcttacccttgtgtattgaactatgtccataatcaagttgatgtggatcctgaaaagtgttatgaacatctgattggtatttgtcacatttattttaaaattagcatctgaacacttcaaagctgtcagtgtgtattggtttcaccaataaccactgcttgatccttacaattaaattttttaactaac

SEQ ID NO: 54190 - DNA, 218 bp, Homo sapiens
aaaaaagtaaaacatgtaacttttgtacattaaccttgtatcctgcaaccttgccataactgctagtctgacaattccaacatccctgttgtatctgaatttagttgtaatgcttgctctgtctcttcacttttttttgtctgttagtgtgcattgtaatattttattaaaagccagacatgatatactaggaaaagaaactccaaaaaaaaaaaaaa

SEQ ID NO: 54191 - DNA, 349 bp, Homo sapiens
ggctgatgggagaactggagtaataaataattgataaaaagaagacaagaatggagaaaaagagacaaagaatagatggaatatatagaaaactaataataaaatggtctacttaaatccaaatcatcagtaactatattatatttacttaattttttcaattaaagacaaaagcctaggcacagtggctcatttctgtaatcctggcactttgggaggctgatgggggaggattgcttaaggccaggcattggagaccagcctgggcaacatagcgagacccccatctctacagaaaaattttaaaattagcaggcataggctgggtgcggtggctcacacctgtaat

SEQ ID NO: 54192 - DNA, 168 bp, Homo sapiens
acccatcacaaaagatattgatggactcctaagccaggctctcctgcttggggaactgggtccggccgtggagctgtgtctgaaggaggagcgctttgctgatgccattatcctggcccaggctgggggtacagatctgctgaagcatacacaggagctagtgatttt

SEQ ID NO: 54193 - DNA, 614 bp, Homo sapiens
taagggcaaggcggctctggctcttccgcaggctcagttatgggttcctgtgtgcttagtcatcgggtccgacacaggctggactgatctggggagccgcgaagggcctggccttcacaaagggacgtaacgcaagtactgcgggcagtgtttgaatatggccctgaacaatgtgtccctgtcctccggtgatcagaggagcagggtggcctaccgctcttcccatggcgacctcagaccgcgggcgtcagcgttggcgatggtctccggagacggcttcctcgtttccaggcctgaagcgattcatctaggacctcggcaggcggtgcgaccaagcgttcgggccgagagccgtcgagtggatggtggcggccggagcccaagggaaccagatggccggggccggagccgccaagccagattctcaccttacccaatccctgccgttgaacccgatctcctaagaagtgtgctgcaacagcgtttgattgcattaggaggtgttatcgcagctcgaatttcagtttaaacgaacacctttcctctggccctcacttagcttgtgaacaggcctttttaaaatcctttcttggtgtagcaaaaaaaaaaaaaaa

SEQ ID NO: 54194 - DNA, 596 bp, Homo sapiens
cctccccatacctaggtatgctctgtaataagctcccatttaatggagagatgtgtggaggcactgagaagttaatgaagaaaaatcaaccctaagaattccttattgtcacatagtgtcttttaaaaaataactgtagagactgtgttaattcgagtgcctttcttacttttttgggagcaagattatatttaatgtttaagaaaacaggatggaagttttatcaaacagttgattgtggcccattgttttatttattcccatcgctaggcatggccccgtagggtattttatccttcagtgagagactgatataagcaggcaggatgctttgattattccattagttatcattttaagcaccctaccaagatttagttctttctttctggcaactaacgttttgggggttggaggcatcccatttagaggatggtgtgtgcacaaatagattagcctgaaacctgcgtccaaagggaaacagtggcactctgccctaaaataaaggccagaacgttgtcctaaatgaatcctttgccttactttaggaccttccttccctctcaaattcaggcataatgtaatatagttgaaag

SEQ ID NO: 54195 - DNA, 395 bp, Homo sapiens
agaattacagccctcctcccaccaaacattacacctcccatcccacctccggaaagcctgaacagccagccaccctcaaggcgtcccagcctgaagcagcgtccttgggcccagagatgaccgtcctatttgcccaccgaagtggctgccactccggacagcagacagacctccggagaaagtcagctcttggcaaggccacaaccctggtgtccactgcctcaggcacgcagaccgtgtttcccagcaaatgaacctacgggtggcttttcctagaccccaaagaggtgaattgcatttaaatacagtctgcctccactgagggcatcctgccattctttggggacttgagcatgggtccttgttcttcctatttcacctccaggaaagcaaaa

SEQ ID NO: 54196 - DNA, 386 bp, Homo sapiens
  misc_feature (1)...(386): n = a,t,c or g
agtagctgtcggcagaggaggaaccagaatctctccaaagaaattcctcaaacagaatttcacacagggtattccatggagaatgagcctggaattgtctcgccatttaaacgagtattcctaaaaggtgaaaagagtagagataagaaagcccatgagaaggtgacagagaggcgccctctgcacactgtggtgttgtcattgcctgagcgcgtcgagccagacagactgctgagcgactatattgagaaggaggtaaagagagcccaccagcttcgggacacttgactcaggagccgatgctgtgctcagcctgtctgcgtacaacgtcaagctggcctggagggacggngaggatatcatctcagggtgcccatccatgacat

SEQ ID NO: 54197 - DNA, 487 bp, Homo sapiens
aagcatgcaaagtcattgttacaacagggatctacagaactatttcaccaccagatatgacctagttttatatttctgggaggaaatgaattcatatctagaagtctggagtgagcaaacaagagcaagaaacaaaaagaagccaaaagcagaaggctccaatatgaacaagataaatctatcttcaaagacatattagaagttgggaaaataattcatgtgaactagacaagtgtgttaagagtgataagtaaaatgcacgtggagacaagtgcatccccagatctcagggacctccccctgcctgtcacctggggagtgagaggacaggatagtgcatgttctttgtctctgaatttttagttatatgtgctgtaatgttgctctgaggaagcccctggaaagtctatcccaacatatccacatcttatattccacaaattaagctgtagtatgtaccctaagacgctgctaattgactgccact

SEQ ID NO: 54198 - DNA, 1707 bp, Homo sapiens
gcctttagaaaaagtcagagaagtcaaactggggagaaactctacaaatgtactgaatgtggaaaagtgtttatcccagaaagcaaacttagttgtacatcaaagaactcacaccggagagaaaccttatgaatgctgcgaatgtgcaaaagccttcagccagaagtcaaccctcatagcacaccagagaactcacacaggggagaagccctatgaatgcagtgaatgtggaaaaacctttatccagaagtcaactctgattaaacataagaaaattcatatggagagagaccctataaatgcagtgtctgtgagaaagccttcagtaggaagtcaactctcattaaacatcagataattcatatgggagaaaccttatgaatgtaataaatgtggcaaatctttctcacagaaatcatatctcattatacatcaaagaactcatacagaagaaaaaccctataaatgtaatgaatgtggaaaaggcttcatccagaaaggaaatctcattgtacaccagcgaattcatacaggagagaaaccttatatatgtcctgtgtgtggaaaaggcttcattcagaagacgtgtctcatagcacatcagagatttcacacaggaaagacgccctttgtgtgcagtgaatgtggaaaatcctgttctcagaaatcaggtctcattaaacatcaaagaattcacacaggagagaaaccctttgaatgtagtgaatgtgggaaagcctttagcacaaagcaaaagctcattgtccatcaaaggactcatacaggagagagaccctatggctgtaacgagtgtgggaaagcgtttgcgtatatgtcgtgtctggttaagcataagagaatacacacaagggagaaacaagaggcagccaaggtggaaaatcctcctgcagagaggcacagctcattacacaccagtgatgtcatgcaggagaaaaactctgctaacggggcgactacacaagtgccttctgtggcccctcagacatcattaaacatcagcggcctcctcgcaaacaggaacgtagtccttgtgggacagccagtggtcagatgtgcagcctcaggagataacagtggatttgcacaggacagaaaccttgtgaatgcagtgaatgtggttgtgccttccgtgatcaattatgtcttattttatgttacagaaaacccataggaagaaaactcagatctatgtggaaaagggttgagcaaaaatttgtagttcattatgtggccgaaaagcatacactgagagaacatgtataaggctgagatagcctgataaactcatcctattaaaatgtatgctgtgatacacaggcaaatttgatgttaacctaagcacatacacagcaattgctcgactgtgtcaattaaatgagtaaaggaagcccaagtacttttaagtggaggaaatgaagtactgtgaatttttaaaacagatgagataattggtgttgggagtgttgcagtgactgaaaagcttcataaggggcagttggtgggaaagggctaatactgtaatggtggaatgtgggacacatatgtgtcaattcagtttccttagaccagtgccagtgtggaggattaattgaaaaccatggaccataaactttcagaactttgtattatgcagagggatctgtgaaactagtcaatttgtttcattaaacaaatattttaaaatta

SEQ ID NO: 54199 - DNA, 2165 bp, Homo sapiens
  misc_feature (1)...(2165): n = a,t,c or g
tctggggcacgtgttgaggatgtgtccagtttgtgctctacgggtgatgtgattctgcaggtaaaagaccatcaggttgtttttttccacatctgggacacagttgtttgtgtaggaacataacaagggtgtacggcttttcttgagcccattttaaacaacccttgtttccagataagtgtattttaaatgtgacctttcgtaaatttgggctggaacatgtaaaagggtgaaagttagtcgtttttggtcttgttttcatttttgattagaggaacttctgaacttggaaaggggaagttggcagcaactctcctgggccatgtatcaacaatcttcctgacagcaggagcagtgatagttggggaattgtgagatgaatggagaggccccatcgtgaattaaagatgctgacctggggattgttaagtgctgccttagttgctagtttagtagccttactgtgaaggaataattaagattgtttcagacttttgtttgtgtgcttgcgttgatgacttttttaacttcaagataaatcaaagtaataagtttaacgtatattaaacctgttgaaatgataattatgtaaacgataaatattctaggttagtcaagatttctccttaagatttaagtgcataaagaatagtaatttagaagtatccgttgaaaagttgataatgaaagaaatttgatgaaggtgaatattttataaattagaatctccactacttatccaatggtggtttatttcattaaggtagaacctgagaactccagtttaaattgtccccccaccaccttcctcctataaatgcaaacttaaggaggnaaataatgacatgtatagtatactcttgccttcctaaattatgactgctgaatcatcatatctactatatatgactggaagaagtggttcttcaagtcaaccctcttacaggacttagtggaatttgctttatctactttaggccaaatccatcacacattggcttatttgaaactttatcatctttcacttttggttttcctctgtttttaaacatcttaggtataacagcacaatttcaccttgaaaaagcaccaaaattatggtgttcctgaaaagatcctattaaaagacagtagtttatttgaactggttatggaaggtgactttgggatgtaagagtgttcaactgtgagtttcatcatgtgtgtccgttgagcttgcttttaagagcaatgttttgctttgctctctggtccatgaactcatttccatttgagtgagttcccttagtgaattttgtctcctgcttggaaagtctctcttctgaacctggagcctgaatacattttcagagccaaattacaagtgggtgaagacatgctacaactactatttttagcaatgtttttaaatttgtgtctattggggtgggaaggggagtgaggccctaaagataggaattcactgatagctgaaatagatacaagcctaggagccccagcccccttttcttgaccatatcacaagtgattgaagcccagtgaattagtcggttagaattcgttctacaacatgatagaacttttcttactagcttcagaaatgcacattgatttgtgctatgatgggtggtgtttgtaacaatcactgttttataggcttatgatctgaggcaaaatgtgaactcagtatgtttactattgctcttacttgaaaactttttttcaaaaaaagcacaaattaaagtagtaaattcatatccatagatagttcattcattcaacaaatatttaccaagttcctaatataagtgaaggaccacttctcatattagattactaagtcatttgtatgaatatgtgtggcagtgaagagaacaggtctttcaaaaagcatttgattattttttttaaatacactctcttatttttctacttgtttttttgttaatcatagcaggatatgacaactcttatttgaattgattttttcatctaatgtaataatggaagccaaagtattcatatttcttaagatagccctaaatgtactcttgaacttcttactggaacaatgtttgatactctagtatgtaagctgtatttatgtaatatttagaacgacatgttaataaacaaagtaacattaaaacaggcaaaaaaaaaaa

SEQ ID NO: 54200 - DNA, 741 bp, Homo sapiens
agaagaagtggcaaagaaacaactttccaaagactccatcttatctctgtatggcacaggaaccattcaacagcaaagtactcctggtgtatttatgggacccacaaatataccatttacctcacaagcaccagctgcatttcagggctttccatcgatgggcgtgcctgtgcctgcagctcctggccttataggaaatgtgatgggacagagtccaagcatgatggtgggcatgcccatgcccaatgggtttatgggaaatgcacaaactggtgtgatgccacttcctcagaacgttgttggcccccaaggaggaatggtgggacaaatgggtgcaccccagagtaagtttggcctgccgcaagctcagcagccccagtggagcctctcacagatgaatcagcagatggctggcatgagtatcagtagtgcaacccctactgcaggttttggccagccctccagcacaacagcaggatggtctggaagctcatcaggtcagactctcagcacacaactgtggaaatgaaaactgcaatacaagtttcatccagaactaccacctgacattccttgctgaaacgcatctagttcccctgtttattcatatgcatattttttttctttttacccatttgttcatattaagaatgatctgattgaccgtgttggtctgtactgattcaatttgatgtggtgaaaagcaggttgataaatcattttatgtcaagggcagctttg

SEQ ID NO: 54201 - DNA, 555 bp, Homo sapiens
ttttttttttttcaaatgtataaaccttttatttaaaattagacagactcaaatacaaattaaataagtacaatataaaatagtaagccttcataaaacacatcataaccactttaaatcatttactatttctacagcaaaattaaagagaaatctaaatacagtccaaaatcaaattatttttaaactcttattgtcaacattaaaattattacaaaacattcaaagatatttaattagaagatgaacaaggccaggtgtagtggcccgagagttgtcgatatgctcgcaggaagtgtttctgtgttaaaaagttgagaagatggaaactgaatcctctttgtattcagaaggctgtttcggaaggtcactgttggcaggcttctccctacagggattcagcagtgagggagcagagtatttgggggacaactgcttcttctggaggggcgagaatgagatggagttcaccagcagctctttatgtcagacttttagcaggattcagctttataaataagcttgtcgcctctgagtatagggtcttctcatcaa

SEQ ID NO: 54202 - DNA, 2222 bp, Homo sapiens
tgccaggttcttggagctgtgaggaggaacaaccatgtcatcagaatcgagcaaaaaacggaagcccaaagtgatccgaagcgatggagccccagctgaaggaaagcggaatcgatctgacaccgagcaggaaggtaaatactacagtgaggaggccgaggtggatctgcgggaccctggcagagactatgagttatacaagtacacctgccaggagctacagaggctgatggctgagatccaagacctgaagagcaggggtggcaaggatgtggcaatagaaatagaagaacggaggatccagagctgtgtgcatttcatgactctaaagaagcttaaccgattagcccacatcaggttgaagaaaggaagagatcagacccacgaggctaagcagaaagtagatgcctatcatctgcagctccagaacctgttgtatgaggtgatgcacctacagaaggagatcaccaaatgtttggagtttaagtcaaagcatgaagaaattgatctggtcagtttagaggagttttataaggaggctccaccagatatcagcaaggccgaagtcaccatgggagaccctcaccagcaaacactggcacgtctggactgggagctggagcagcggaaaaggctggcagagaagtaccgagagtgcctatctaacaaggagaagattctcaaggagattgaggtgaagaaggagtacctgagcagcctccagccccgcctcaacagcatcatgcaggcttcccttccggtgcaggagtacctgtttatgccattcgaccaggctcacaagcagtatgagacagccagacacctgccgcctcccctctatgtcctctttgttcaggccactgcgtatgggcaggcctgtgataagacgttatctgtggcaatcgaaggcagtgtggatgaagccaaggctctgttcaaacctccagaggactcccaagatgacgaaagtgactcagatgccgaggaggagcagactacgaagcgccggagacccacactgggggttcagttggacgacaaacgcaaggagatgctgaagaggcacccactgtctgtcatgctcgacctgaagtgcaaagatgacagtgtgcttcacctgactttctactacctcatgaacctcaacatcatgacagtaaaagccaaagtgacaactgccatggagctgatcacccccatcagtgcaggtgacttgctgtctcctgactcagtcctgagttgcttgtatcctggggatcatggaaagaaaactccgaatccagccaatcagtatcagtttgataaagttggcatcctgactttgagcgactatgtacttgagctaggtcacccctatttgtgggtgcagaagctgggtggcctccacttccccaaagagcagccccagcaaacagtgattgctgaccactcgctgagcgccagccacatggagaccaccatgaaacttctgaagaccagggtgcagtcccgcctggccctccacaaacagtttgcatccctagaacatggcattgtgccagttaccagtgattgccagtacctcttccctgccaaggttgtctctcgcctggtgaaatgggtgacaattgcccatgaggattacatggagctgcacttcaccaaagacattgtggatgcgggactggctggggacaccaatctctactacatggcgctcatcgaaaggggcacagccaaactgcaggccgctgtggtgttgaaccctggctactcctccatcccacctgttttccagctctgtttgaactggaaaggggagaaaaccaacagcaacgatgacaacattcgggccatggagggcgaagtcaatgtgtgctacaaggagctgctgtggcccttggcccagccaccagctgttgaccaaccagctgcagcggctgtgtgtgctgctggatgtttacctggagaccgagagccatgacgacagtgtggaggggcccaaggaatttccccaggagaagatgtgtctgcggctcttcaggggtcctagcaggatgaagccatttaaatacaaccatcctcagggattcttcagccatcgctgatctcccgcgcagaccgttgtttcccccaaggcctcaccctgagcactgggcttctgctttctgctctggcccacatgtgactcttgatattctccaaagacaccagccaattaaaaagcgtcacctgaaaaaaaa

SEQ ID NO: 54203 - DNA, 258 bp, Homo sapiens
  misc_feature (1)...(258): n = a,t,c or g
tgaggattgggttttctagggaggagggacaaggcagttaagggtttcacaaaggagaggttctgttgatttccccctgagtctaaactgggtaatgagggacataacagagaatgatgggtgtgaggacagggcctggagtcgtgatgtggttgaagaattactggattgaagttaatacagtcaatgagctataaagaaaggctggagagaacagaaaggatccttggaattgaggggttgnttcgttttntgata

SEQ ID NO: 54204 - DNA, 1686 bp, Homo sapiens
tttttttttttaagtgtgatccatttattattgctgccatttgtgggtacattctctcaattctccttaaatcccagtgatgcttttatacttgcaacacgtgtatccacctctagcttccctgtgcagaaatgtttggcattggaatgtgaggtatctctcaggaaacagagtggcaatgggtaggatgaaacctacccattgagagttcatgatattcattgtgaaataccactagatatagtccttcattttatttagagagcttgaagtttctgattttatgtagaacagaaaaagaaacacaaattatacaaaatttaagtgcaatcaaaaataaaaatatatgttaaataaacggttatggtacaaattttgcaaagccttcaggtgagccacaaataatcttggaaattattttaataaagtcattttggttctttttcttcattttccttaaagtcacctctaaaggtatttctctgtttatatcatatgtaatcagcttttggctaaagaacaagtggtagtaaatgaagactgccaaagcctcaaaaatgatattgaagaaatggggataattagaaaaaacagaagttcaaacattaaaattctggcactattagatgacatcaacctaaacctggtaaatcagttttcagaaaactaggtgcttattgcgctttcattttatatccaataactgcatcaaacttaacactgatttttcgttttaaaactgccaggaaacgctcaggaaggatcctttccaatgttgttaaaaaagctatagaagatggaataaaaatcatcttctgctcagtcagaatcccatgcatcagcctgtttaccacttcctcaggttccagagtgggtcccaaacttgtacttggatttttgatgaagccagtgtttacgaaattaggacacagacatgttgttttgactccagttatttgtaaggcagccagttcatctgtcaaagttttatgaaatccaacagcagcaaacttgcttgaacagtaagccagtaagaaggggaccgagacatgtccagctgccgaagccacagtgacaatatggccatggttattcttcgtcattgcaggaagaaatgcctttgtagtccagaaatgtgcaagtacattaacttcaaaagtcttttcaatctgaggatcttgtgtagcaaacaaatctgatgtatagactacaccagcattatttactaaaatactaacatctccaatttctgccttcaccttctttgcagagctgtaaatatcttctcggttgctgcagtctaccacaaaggtatgaaccttggcacccagtcccttgcatttggcagctgtttcctccagtccatgcttatttatatcccagagaaccagcttgcttttaagtttagcaaattcataggcagtcagtctcccaattccatgcccagctcctgtaatcagcacgatttcgccggtgactgattttctcctcttaggaataaaaagcttcacgaaggactctagggagcagacgatcagtaacgggagaagcaggaggatgtccagaagaaatttcatcccttttgtggctgcgagcgtttggtgtgttttttttttttttttttttaccactctaaactgcttttagagggtagctcgatctaacaccagaaagagtaggggcgag

SEQ ID NO: 54205 - DNA, 887 bp, Homo sapiens
caattatacttactgggcatatttatcaatcttggctggcaatagtgcctgaacgtaacatctccatagcacaattacatatgctttctggtcttagtatttatcaccatgattatgcttctgtaactgaagtttaccaccctcagaaacctatctgtaaatagaattagacatggccagaaataatgaatgtacttgtttgggaagattgcattgcagaacaggtagaggtgctgcgcaacgattcctatggaatcattattgattggtcccctaaggggcatttagcttaaattacacctctcaatctgtaagtaatggtcacactatgttcagctggtctaaacaaaataatcagatggtagaaatgataagaagtacagcaagagttcctattatttgggcatgtggcagtatagtggcacctcaacctcaaatgatatggcctgctgtaggggcaaaacataaggatttgtggaaactattaatggctcttaataagatcaaaatttgggaaagaataaaaaagcatctagaaggacactctacaaacttgtctttggatattgcaaagttaaaagaacaaatatttaaagcatcccaggcacatctgaccttaataccaggaactggagtgcttgaaggagctgcagacggattagcagctattaacccattaaaatggataaaaacacttggaagctctgtgatttcaatgatgattgtgttattaatctgtgttgtttgtctttgtgtagtctgcagatgcagatcctgactcctgtgagaagtagctcaccgtgataaagctgcctttgcttttattgccctgcaaaaacaagaagggggatatgctggggaataggcccccaaatctggacataaac

SEQ ID NO: 54206 - DNA, 777 bp, Homo sapiens
gcaggagatctacagcagcgagtgggacggtcatgaggagctgaaggccatcgtatggaataatgatctcctttgggaagactacgaggagaaactggctgaccaggctgtaaggaccatggaaatctatgttgcccagttcagtgaaattaaggagagaattgccaagcggggtcggaaactcgtggactatgacagtgcccgacaccacctggaggcagtgcagaatgccaagaagaaagatgaggccaagactgccaaggcagaggaagagttcaacaaagcccagactgtgtttgaagatctgaaccaagaactactagaggagctgcctattctttataatagtcgtattggctgctatgtgaccatcttccaaaacatttccaacttgagggatgtcttctacagggaaatgagcaagctgaaccacaatctctacgaggtgatgagcaaactggagaagcaacattccaataaagtctttgtggtgaagggactgtcaagcagcagcaggcgctctttagtcatttctcccccagttcgaacagctacagtctccagtcctcttacctcacctactagtccctctacactttccttgaagagtgagagtgaatctgtctcagcaactgaagatctggcacctgatgcagcccaaggggaagacaattctgagatcaaggagctcttagaagaggaggaaatagagaaggaaggatctgaagcaagctcctctgaggaagatgagcctctaccagcctgcaatggccccgc

SEQ ID NO: 54207 - DNA, 950 bp, Homo sapiens
gcgccttgagtcaaggccacttttcagcccatcgagccctgagttctacttggtgtttgttctctggagctgattgcacttgagctctgtggtgggcaggcgcactttagcctaagttgggtgccccagggcaccccctcctctctgctccttgccagcttcattcactcccagcctctcgctgtcctcactttgcaggggctcctcctcaacatttgcatgcacctgcaagaattgggaagaaagagcatttattaggcactgtagcaatttgcattttaaaatgcctgagcatttattaagcttcttggtattcacttgggtttgataattgatctgagctacctcattgaatgtttttggaaaggtgttttttggtatgcaagtcagctttgcctcacagttgaaaatgttcggtcatgattgcttttgaaaccaaaggggaaggtaccgatatcattgagctatttaaagttgccagtttgggctccagtaatgctttctggtgggtaaaattccacattcaggccacgagagcatctacagtttgtactctggggctgcaggcatcctgggacgctgtacgcaattcagtggtctagtcctttataccgactcagattccttaagcatgcagagtcactcgaatgaaaaaacatactcgacctctccctaaaaagatgttgcaacccagtttctctgaattccaccacaaaaagagaccctgaataagaagagcagttttcctgtgcatatagagggtgtgtcaaaggtgagctttttggggaccgggaaaaacaaagttgcctgattccgcgcaggtgcacaggccccggatgtacacccggaaaggggagtgtggctgtagaatcatccatccgtctacagctaaaacaatttgccaataaagtacatgtttttcctaagccaaaaataaatacgttaacaga

SEQ ID NO: 54208 - DNA, 984 bp, Homo sapiens
ctggtctcccgcgtccatcggtccattcctgcgtcgttctgtccttccgaacgcacacttcaggagcagccgcgagggtggcatggcagcgagcacagacatggctgggctggaggagagcttccgcaagtttgccatccatggtgaccccaaggccagtgggcaagagatgaatggcaagaactgggccaagctgtgcaaggactgcaaggtggctgacggaaagtccgtgacagggaccgatgtggacatcgtcttctccaaagtcaaggggaagtctgctcgggtcatcaactatgaggagttcaagaaggccctggaagagctggcgaccaagagattcaaggggaagagcaaggaggaggccttcgatgccatctgccagctggtggcaggcaaagagccagccaatgtgggcgtcactaaagcaaaaacagggggtgctgtagaccggctgacggacaccagcagatacacgggctcccacaaggagcgcttcgatgagagcggcaagggcaagggcattgcgggacggcaggacatcctggacgacagtggctacgtgagcgcctacaagaatgcaggcacctacgatgccaaggtgaagaagtgaggcttgggaagaccgccctgccaagtgcggctgcccctgccagaggctcaggcctgggtctaaggggcacgtggagcaagagatcctggtcccctccctgctggacctgccacccagagcttcctgcctagtcccactgggctggcccaccaggcctctgacccaggctgctctgcggccccttcctcctcctcttcctgctccaacttctgtccacctggggacagtctgtgcctgtagcctcatgaccccaacccagccccaggcatggctaacccctgactgcttgcctcatatttaagctgctgctctggccaagtgcctaattttaacccagacctcaataaagacaccttttgtaccaaaaaaaa

SEQ ID NO: 54209 - DNA, 320 bp, Homo sapiens
tgtaaaatttttacttccttttttatttttttaaattctcagtgatccttattctgattccttttggttttgacaattaaaaattatgaaagctggttgttttgtctcctattgctgaaataatttagttgatttaacactacagatggtgttaggataatgaatacagaacatcaatgagaatctaaattatatctcttgagacctccctcattccaagggaggtctcataagtatacatgcatacatgtagaacttataaaaaagaaaaagccacataaatcaccatgacattatagaagcagattcaagagaaaata

SEQ ID NO: 54210 - DNA, 706 bp, Homo sapiens
gacaaggtgtttggcacccacaaagaccatgaagtttcaacgcttgacacagctataagtgctgtaaaggttcaattagcagaatttctagaaaatttacaagaaaagtccttgaggattgaagcctttgttagtgagatagaatccttttttaataccattgaggaaaactgtagtaaaaatgagaaaaggctagaagaacagaatgaggaaatgatgaagaaggttttagcacagtatgatgagaaagcccagagctttgaggaagtgaagaagaagaagatggagttcctgcatgagcagatggtccactttctgcagagcatggacactgccaaagacaccctggagaccatcgtgagagaagcagaggagcttgatgaggccgtcttcctgacttcgtttgaggaaatcaatgaaaggttgctttctgcaatggagagcactgcttctttagagaaaatgcctgctgcgttttcccttttcgaacattatgatgacagctcggcaagaagtgaccagatgttaaaacaagtggctgttccacagcctcctagattagaacctcaggaaccaaattctgccaccagcacaacaattgcagtttactggagcatgaaccaaggaagatgttcattgattcatttcaggtttactgcatggaaggagccccaagatgatcaagaagtaaatgagttggtagaag

SEQ ID NO: 54211 - DNA, 650 bp, Homo sapiens
gcctcctatttcagtttctcaacatgaaagtcatcaagcaatctcccatcttccaactggacaacctctctccccaaatatgcctccagattcacacataaaccacaatggaaaccccggtacttcaaaacagaatccttccagtcctcttcagcgtttaattccaggctcaaacttggacagtgaacccagaattcaaacagatatactaaagcaggctaccaaggacagagtcagtgatttccataaattgaagcaaagccgattctttgatgaaaatgaatcccctgttgatccgcagcatggctctaaactggcggattataatggggatgatggtaacgtaggtgagtatgaggcagacaagcaggctgagctggcttacaatgaggaagaagatggtgatggtggagaggaagacgtccaagatgatgaagaacgagagcttcaaatggatcctgcagactatggaaagcaacatttcaatgatgtcctttaagtcctaaaggaatgcttcagaaaacctaaagtgctgtaaaatgaaatcattctactttgtcctttctgacttttgttgtaaagacgaattgtatcaagttgtaaagatcattgagatagaattaaggaaaaactttaatgaaggaatgtac

SEQ ID NO: 54212 - DNA, 1480 bp, Homo sapiens
cgcgagccgggaccacgccgacccagcgtgcccaggccgaggaaagcgcggcggcggcagtccgaagacccaccggactgaaagagaaggacgaggtcatcttcggacgggaggggcaagccagccatcctgggaccccaggcgtgcaggttctctttgagggtattccaccctgcaaaaagcatgtattcatggtcagctctcagcaaggccagtagcagagtggtaaaggccttggccctccaaggctgggaaaagacaatgacaagtcaaatccagacctatgttggatgttggtctactaggtgactgtctcctggaaatgttatgcagctcagcaaggtgaagtttcgaaatcagtatgacaatgatgtcactgtttggagcccccagggcaggattcatcaaattgaatatgcaatggaagctgttaaacaaggttcagccacagttggtctgaaatcaaaaactcatgcagttttggttgcattgaaaagggcgcaatcagagcttgcagctcatcagaaaaaaattctccatgttgacaaccatattggtatctcaattgcggggcttactgctgatgctagactgttatgtaattttatgcgtcaggagtgtttggattccagatttgtattcgatagaccactgcctgtgtctcgtcttgtatctctaattggaagcaagacccagataccaacacaacgatatggccggagaccatatggtgttggtctccttattgctggttatgatgatatgggccctcacattttccaaacctgtccatctgctaactattttgactgcagagccatgtccattggagcccgttcccaatcagctcgtacttacttggagagacatatgtctgaatttatgggagtgtaatttaaatgaactagttaaacatggtctgcgtgccttaagagagacgcttcctgcagaacaggacctgactacaaagaatgtttccattggaattgttggtaaagacttggagtttacaatctatgatgatgatgatgtgtctccattcctggaaggtcttgaagaaagaccacagagaaaggcacagcctgctcaacctgctgatgaacctgcagaaaaggctgatgaaccaatggaacattaagtgataagccagtctatatatgtattatcaaatatgtaagaatacaggcaccacatactgatgacaataatctatactttgaaccaaaagttgcagagtggtggaatgctatgctatgttttaggaatcagtccagatgtgagttttttccaagcaacctcactgaaacctatataatggaatacatttttctttgaaagggtctgtataatcattttctagaaagtatgggtatctatactaatgtttttatatgaagaacataggtgtctttgtggttttaaagacaactgtgaaataaaattgtttcaccgcctggtaaaaaaagaaaaaaaaaaaaga

SEQ ID NO: 54213 - DNA, 2003 bp, Homo sapiens
  misc_feature (1)...(2003): n = a,t,c or g
attcggcacgcagggggaactttcccagtccccgaggcggatccggtgttgcatccttggagcgagctgagagctggaggtgagctgggctcgcggtcgcccctctcgcgcgccctctttgagaaccacggcttccaacctccctggaaatggggggaacatggccgaggcgcgtggcgaggccgcctcgtggaggccccggagcggcatcctcagcgccccagcgatccggtgcccattaggtgcgccttgaagccgagaacctgctaaggccatcaaacctattgatcggaagtcagtccatcagatttgctctgggccggtggtaccgagtctaagcactgcggtgaaggagttagtagaaaacagtctggatgctggtgccactaatattgatctaaagcttaaggactatggagtggatctcattgaagtttcaggcaatggatgtggggtagaagaagaaaacttcgaaggcttaatctctttcagctctgaaacatcacacatctaagattcaagagtttgccgacctaactcgggttgaaacttttggctttcgggggaaagctctgagctcactttgtgcactgagtgatgtcaccatttctacctgccacgtatcggcgaaggttgggactcgactggtgtttttgatcacgatgggaaaatcatccagaaaaccccctacccccaccccagagggaccacagtcagcgtgaagcagttattttctacgctacctgtgcgccataaggaatttcaaaggaatattaagaagaannnnnnnnnnnnnnnnnnnnnnnnnnnnnnnnnnnnnnnnnnnnnnnnnnnnnnnnnnnccatgcttcctgtacagcctgcaaaactgactcctagaagtaccccaccccacccctgctccttggaggacaacgtgatcactgtattcagctctgtcaagaatggtccaggttcttctagatgatctgcacaaatggttcctctcctccttcctgatgtctgccattagcattggaataaagttcctgctgaaaatccacatctcccctgggtccggtgttctggaagtgagagagacaatgtcacacttcaaggaggcagctctctagacaggaaggttattcacgtcccatgtcaagtctagctagagttcagagcaattgagaagtgcaattttatctcctgcctttcattctataccctgcttctgaaccatcgtgttcaactgtgaaactcacactttggtgaccctgactccaaaacttaatacacccaaggtcagccccagtgatctgcttcatagcaaggactttgggtgggtcttcccagggagtagggcaccctcagagaatgtggctttggacttcatcacagctggggccttttgtgtcacttcagatctaaacttgtaaccgtgctagatctgtttctaacgtgacaacatcacgaaccacgagtccagaagcctaatccataatcctccctcctcatgacaaagtctcatgctctgtgctcaacgtggttagctgcacaagatgtaaaccaaagcttcactgaaccctcgacccaaatcagtaactcaagtgcgtcaatcataatgaacctccccaaactcagtatttatgattatttttgaggcagggtctcactctgtcgcccagactgggagtgcagtggcaggatcagggctccgtgcggccccgaccttccaggctccagcgatcctcccgcctcagcctcctgagtagttgggagtagagatgcgtcccacatcgcctggctaatttttgtatttttgtggagaggggatctcgccacgttgcccaggcttgaagccagatcaagcaattgggttcttcggatttccgaaatagaccccaatattctgnctttaacccagagggagcaaanggnncctncccaaggcgtnaccaaggctcccgggtcctggggnnctaggaanggtaagcgcaactcgcgcccnaccaatgcctgggcat

SEQ ID NO: 54214 - DNA, 423 bp, Homo sapiens
gtaatcttttgtgcctttgacattttttctgtatctgctactaacaacctcgttaaagtgattgctatttatttccattgctatcctttcccaaccttcagtctttttttcagagagagggtctcactctagcccgggctggagtgcagtggtgcggcctcggctcgctgcggcctcgacctcccgggctcaagcctctcaagtagctgggatcgcgggtgcatgccaccatgcccggccaatttttgtattttttgtagagacagggttttgccatgttgcccaggctgaccttgaactcctgagcgcaagtgattcacctgcctcagcactttgggaggccgaggtgggcagatcacctggggtcaggagtttgagaccagcctgaccaacatggagaaacccatctctactaaaaaaaca

SEQ ID NO: 54215 - DNA, 406 bp, Homo sapiens
gagtggtggcatctgagaggctggtcgtggactgtggttgggggagctggtctcttgtggctcagcgccgtgcggaggttgaagcgtacctgcggaggtcgcaccagggcgtgaggaggaggaggaagggcatgagccgagcttgaggaatccgtgctccaaactctacactcaagggtggcccttgggtagggtgaagatcccctgtctttatcctagttccacaccttggtgtgggttactgggtgcaggatgaactgtcgcttcgaggtgcctgagggtgcggtggaggggcggcaggttggaggaggccatgcctgctgtgctgcacacggtgcttctgcaccgcagcacaggcaagttcactacaagaaggaggcacctacttcattgcaccgtggcaccc

SEQ ID NO: 54216 - DNA, 544 bp, Homo sapiens
ttttttttttttttctcaatcatcatcggtttaatgaccacgtggcatgactctctggctatgtacatatatacacatattcacatatataatatgtaaataacttttgtgtcatttacacacccaaaaagtgtgcaagatgtgagaggctggcagcccacattattactatcgagaaagaacatttcaaaagccgagttctcctaacacacacgttctctgctcgcgcctcctagctccgcagggtgggcaacttggcctcgcaggcacagcccgttttcccgctgctctctaatcctccagcagcagctccagctcctccagcggcaggcgcacccggagctccttctcagtcatcaggtccaggatctcctgcatctcatcggggaaatactccacggcgtccaggtacaacacctttgcccaagggcaactctgaagtgctttgtagaatacacctttgcttctttctttatttcctaaggaaaccagaaagttcaaatacatcctccacagcaaggggcactggctgccactgtcgctg

SEQ ID NO: 54217 - DNA, 701 bp, Homo sapiens
acaacttgtcctataatcatcctgggatccagggatctttcttcacaggcatcctggagattatctcctctgttgtatctcctggatctaatgtcatcctcttcttggttcactcgctcattttgttggaacacttcatcggagttccctgggaaagactgcataagaaatacacacttttagttgcatataatgcatatacagacatatagatctatctagatatatgtttttcctgtattctcacacttatttgatagtttagctaggtgtagaattataggttggaagtcattttaattctaaattgtagaggcactgctacatttctactggttcctaatgtgctgtcgagaagttccatgcctttctgcttgtcaatccttttactgcaaacaaaatttttttttttcctgtgctggaagctttcagaaaaatatctgttctaaatttttatgaagaaatatttcttttctatgaatctttaaacttaatttttttttacccatcaaactcttgagaaatgtttaattgcaagaagaaatttgtgttttcactatgtaattagtaagagtttttttttttagaaatgaatatgaacacatacagattttaaaatgaatgcttcctgctcatttgtatagtggtaaaaacaaaaataaaacaaaatgaatacttctatctaaaaaaaaaagtcgacg

SEQ ID NO: 54218 - DNA, 385 bp, Homo sapiens
ggtaaaactgaaaaaaattagagtcagcttaatgcccacctatgaaggaatagataaattatggtttcattgtgctatggaatacaatgcattatcaataaggatgaagtaagatgaagcagattatagtagtgtatacttactacaaaagaaatgtatgatacatcatggagttagaaaattgttgcataagtgtgtgcagtaaatagcttgattatattttattttcaaaaactcttgttaaaggaggaagatttttaccttttattttataaacttgtatattggttcaaattcattactattttttgtttgtttgttttgttttgtttgatacggagtttcgttcttgtcacccaggctggagtgcaatggtgtgatctca

SEQ ID NO: 54219 - DNA, 367 bp, Homo sapiens
  misc_feature (1)...(367): n = a,t,c or g
gaataattttaataattttttttaaaaaaaagatctgttggagccgggcacggtgactcacatttagaattgcttgaacccgggaggcggaggttgcagtgagccgagatcatgccactgcactccagcctgggtgacagagcgagactccgtctcaccaaaaaaaaannnnnnattcntgnccntgtngaatttttngccttgcttttgggntcnttnaananccagggncggggggntccantntgaaaaaanccaccntcnggganntttcagccctnnnaaaaatnnntgccaagggnttnggcccccncctgggcccngnataatgnctttggagtttcccatttcccggcccctccttgag

SEQ ID NO: 54220 - DNA, 1902 bp, Homo sapiens
tgtgcctaaagctgctcttcatcagaaagaaccagactctggtagaaagaaaacaggtctgcttccagcaagatctcaaatccagtggggacataaaatgaaaagggcctagaggaccctaaaataaaggagacagggaactttggggatgtttattgcaaatggttataatttaagtgatatttacaattgtttaagacagagggcaaacaggctctgagccaggcctcagctttagaggcccatcctggagaggaaatggcacttgcagggaacatgagctcaatcactattgctcactaagcacagggtcacactggagtcatcttagggaggctgcgagggaagaaaagggagtgcacagagccatgaagcaactactttaaattctgaatcttgctgtgttcccactgagcatgctgccttcctagagcaggccttggagccatcccagggactaacacagatccttcctggggcgcaggcttctcacactagcgtagggtgcctaggtcatcctcatcattgtttatcatcacagacttctttctgcctgccagatatcttccctacttgtggctttaaaacaccagcaggagggaagtcaaggaatgttcttgttagtataaatccatagcaaaaacgatttgagaactggatgcttcccagggttggcaggtgtgtggatggttccctgaattctttatccacaggatgcttgaatgggtggtgctgttgaggctgacaaatgtctgagctttacagacttgttcatgtttttgagaacctatggggatactcattgggcagaatcagagcccagcagaacacggggacggggaagggtaaagaggggaaaccgacagagtcctgaggtcatcccgggaggaagggagactacttccagaagcagcagcacaaagggctctgccgagactctgcggagggggtccagggtactgggggtggaggggtcccctcttgcagtgtggggttactgtttgggtaaagcgaagtcccaggcagtttcctgtgcacatttccacatggcctgcatgaggcgagtgaaacccatgtctttgggcttttccaggcctctcatcagccgttgcttcatgatggaaacaaattccttattgctcagttcgccattgcccatcacagtcaaagagtgcaaacaccacatcacacacgtggtctgagagctccactttagccactgtcctggccaacctggctggcatgggtcactttatcaagagatgctccagcccatatggtaaaaactcaatgcagtgtccacatcattaatgttctttaggaaagtaaagaagttctccacctcctgaaatgtcagaccctttccttctttgaagtgcttcttgagctgcctctgcatggcggtcagcttcttggactgcaccccactgtaggcaagtagcatgccaccaaactgcctctcagtaattctcccatccacagggtcatggcgttcaaactcaagcttcagaacatcatgctgcagtttacgctgaaattcgaggaagtttttgattgtcagctttcccttcagatcagctccaaaaaagtaggttgtgagggctgaacacaagccagacttgagggtgttgccagtagttggacgatctctgtggcgcatacccatactggttactgcagatgctcccaggaaagccaccatcattagtcttcgccggatctggatgggctgtgatcctccatggtaccatcgagaacccacagccagttctgccaaagcagaaagtgagttcagacgaaacatcgcgtccaaacacgagctccagcagcctctcggtcaaagccgcccacctctgacagccatagagatgaaacagcggagacaaacctccaccgccctcc

SEQ ID NO: 54221 - DNA, 697 bp, Homo sapiens
aaattggagcaaaatcagtcttattctatctggggctttacaactcagtataatgtttaagtttgaaaagcacttgtcatccctagcatgttaacttgggaacttttgcacatttcatatttctcatttgctgaaattgagtgattaatcttgcaaagtctaggtaacatagtaattggtaattttaaaaatacatattaagggccctgtaatgagatttggcacttggatttttactaaagggacacctgcagggttgttttgtagtgaaatgttttagatcttttgttagcaaacactacattttaattgtactgcttgtttagaattattaacaaatggaagcctccatatttatattttcagtgcataaagccaccttcttgctttacttcagagtaacatgccaagctattttgtgttcactaaatttagctatcagttaaacactgcagaaaatattagctactcaaataagtaggcttctgaaatagttttaactgcaagtgtgttaacttgtgtggtggtttgaagccatttttccaaataaagttattaaacaccactttatgtactgaagcatgaacagaaaaatcaagagctgagcagaccacctcctttatgtaggcaaaacttccatcattttggcttttgttctaaacagaactaaatgacatgcatagcatggtaacttaca

SEQ ID NO: 54222 - DNA, 395 bp, Homo sapiens
cggacgcgtgggcaaagatcctgtgaaggagagaagagcacacgcacgacaatgtttactgaaaaatatcagtatacgcagggaatacattaagcagaatcctatggctactgagaaattattatcactgttgcctgaatatgtagttccatacatgattcacctgctagcccatgatccagattttacaagatcacaagatgttgatcagcttcgtgatatcaaagagtgcctatggttcatgcttgaagttttaatgacaaagaatgaaaacaatagccatgcctttatgaagaagatggcagagaacatcaagttaaccagagatgcccagtctccagatgaatccaagacaaatgaaaaactgtatacagtatgtgatgtggctctctgtg

SEQ ID NO: 54223 - DNA, 1940 bp, Homo sapiens
gagagtccctactgtgcgtcagaatccaccttgcgtgctgtgcgtatctgtgaacctggagcggttacttattttgacagatatcactttgggtctttttacattaaatttcttttctctaaggaatataagacataccccatagctctgtgtgagccagcaataccgctgccccctggcgacagggcagaccaatgatgccaggcagctgtcacacgctagtattggcttcattgtgatctgagccctgcacgctgggccttcagaattaatggccagcagtgtcagggatgagcccgtcagccagggcacaggcctggctcacagtcctgcacacctgctggcctggggagctccagccaggcagcgagtcctgccccgcccgcagctccctcccacaccccgcctggccaagatgactgcttcagggggctttggggaaagaattaggaagggtcagaacccaaacaatacctgctcatttacactgaggattcagggcgggagacaggagccttggggtcctgttaaaccacagacagttatgaactgaaagtcataacggggagaggtgcctggcttctacctggggtgctcaggaatgttcctcgtcacccctgccactctgtggttcggtgccctgcttcctcctccactcctgggccgccttctccagcgccgcacacacagatgctcagtctcagagaggctggcacggcctggcagtctgagaaaagcgtcagttaggcacacctgcaaggcccctcggtgggacagcggcggcctttggagttaggagccaccctggggaggttgtgccggtgccatgctcctccctgtgtcttgtatgaaaggggccactgtgtgtcttcctccccggcgggagcccacaatgtgtgcactgtaggacagcggccccgaggtggaagcctggctggagggctgccctataggtcttctcttcccgcctcccctgccatgcaaccagatgtgttgtgagtggggcagcgtgccccacgctggagtaactccgcacgcttctgtctttcacggtgggcgctcggggggagcctgaggaaaacccccttaggtacctgtgcgaggctgtggagtgcaggccagagcagggtgtgcgtagccccagcacccaggttcttctgtcagaccctgtgacctgcgagctgctactactgtaaggagggaaatggatgaatctggctcgttttaaaatcacgttttctgacgaatcctttgccccttcacctttaccccgcccgcacccctaggccctctcagccttcctatcatcccacgtgtctacccagacccttgtgcggcccatgccccggggcgccggcgtcctgtccctgagctgggaggcggctttggatggtccgggcgtcaagagcaggggtgggccggggaggggtcctttgcggtgagctatgtttacatgacacagtgtgccaaagtgacttactgcggttgcgttagtttctagtcatcaggactatctcaccctcccactcctgtttttaaaactcagaattctttcctaagagcccttcgagcaaagcgtgccgaagttagttgtcttctctgtggtggtcctttcttatgtcctcataaaagctcagatgatggtatctgtgagtatgttttgcaaattcaaaatatagtttggtaatttttttttccagttgatttttaaaaagaactgctgtacagagcttgtactttgtccattttatagatggaaaccatccttgaaaattgtttaacttaaataaagagaagatactttctagataccgctctttgctggcaagagtctgtcctggtgtgtgagggctgggtggggtgggtgtggggactgggattggggtcagccttctgcagctcctgctcagtggctgtttcttatcaccttttgcagatgc

SEQ ID NO: 54224 - DNA, 466 bp, Homo sapiens
tagtaatgttatctgtaagagcaattgaggaagtcataaatcttgtgacctctggccacatgactcctgagtagtgaggaattatagaaactatgtttacattttagcagaattcatgcccctcctataatcctaatctcattaactttacaaaggcagtttttggtccctgaacaaggaaagagttagttttagggaaagactgtaatcatcttctttgcatcaaagttaaactataaacttaatttctcttatgttcagcttggcctatacccaggaatgagaagacagccagtctgtgagggtaggagcaagatggagtcagccatgctagacttctcttacagtaataatttttgcaaaggcagtttcaaatggattgaagatctaagtgtaggagctaaaactataaaacttttagataaacacatagttataattctctgtggccttaaattagggaatg

SEQ ID NO: 54225 - DNA, 901 bp, Homo sapiens
  misc_feature (1)...(901): n = a,t,c or g
cctaactcctaggctcaagcaatcctcctgccacctcagtctctcaagttgttggaacacaggtgccaaccacgacacctggctaattttgttttgttttgttatgttttgttttagagatgggctcttgctatgttgcctatactggtcttgaactgctggcctcaggcagtcttcctcccttggccacccaaagagatgggattacaagcatgagccactgtgcacagctgagatttttcgacttagtctttttgtacacccagtatcttacagaatatccgtaatatagattcataaataaaccatttccttcaatggtataaataaataaaccactgctataaatggtggaattttctgagttaagagcaatacatatgatacaaaacttgatatatagagtttcttagccaaactggaggggctggctttaggtgatccgtggactccctgaaattggggacaccattggaaatatgtgtgaactcatgggcagtttcctatgatttccagtcctcaaaatatctcttggactcaaagatgccttagggcagaggacgcgtgtacccccagtacagaatctcggacagtgaatgtcagtagacactcggcagaaaacctctgccaaattgagtgctctgatgtgactttttcatcaagtcaatgttcctgggatctcttgtacatgataatctcactcttgtaaggtttcatcgtttctgcttaccctacttttctttcccatcctgatccctctcccaccagactggactctgaaacgggcatgtacagagaagaggagancccaacacgcttcaagctttgagtggagaggacacagcctctgctgggacagggaacagagggatgcggagaccctgaagatgctttgggacag

SEQ ID NO: 54226 - DNA, 608 bp, Homo sapiens
agcattcgggccgagatgtctcgctccgtggccttagctgtgctcgcgctactctctctttctggcctggaggctatccagcgtactccaaagattcaggtttactcacgtcatccagcagagaatggaaagtcaaatttcctgaattgctatgtgtctgggtttcatccatccgacattgaagttgacttactgaagaatggagagagaattgaaaaagtggagcattcagacttgtctttcagcaaggactggtctttctatctcttgtactacactgaattcacccccactgaaaaagatgagtatgcctgccgtgtgaaccatgtgactttgtcacagcccaagatagttaagtgggatcgagacatgtaagcagcatcatggaggtaagtttttgaccttgagaaaatgtttttgtttcactgtcctgaggactatttatagacagctctaacatgataaccctcactatgtggagaacattgacagagtaacattttagcagggaaagaagaatcctacagggtcatgttcccttctcctgtggagtggcattaagaaggtgattggccccacggtatggccatattacctgaccctctaca

SEQ ID NO: 54227 - DNA, 1673 bp, Homo sapiens
accgttttgactgattacgaatttaatacgactcactatagggaatttggccctcgaggccaagaattcggcacgagccctgatgcctgcaaagagtttcaagatgcaggtgaacaggtagtatcttccccagcagatgttgctgaaaaagctgacagaattattacaatgctgcccaccagtatcaatgcaatagaagcttattccggagcaaatgggattctaaaaaaagtgaagaagggctcattattaatagattccagcactattgatcctgcagtttcaaaagaattggccaaagaagttgagaaaatgggagcagttttcatggatgcccctgtttctggtggtgtaggagctgcacgatctgggaacctcacgtttatggtgggaggagttgaagatgaatttgctgctgcccaagagttgctggggtgcatgggctccaacgtggtgtactgtggagctgtttggactgggcaggcggcaaagatctgcaacaacatgctgttagctattagtatgattggaactgctgaagctatgaatcttggaatcaggttagggcttgacccaaaactactgggctaaaatcctaaatatgagctcaggacggtgttggtcaagtgacacttataatcctgtacctgggagtgatggatggcgttccctcggctaataactatcagggtggatttggaacaacacttcattggcttaaggatctgggattggcacaagactctgctaccagcacaaagagcccaatccttcttggcagtctggcccatcagatctacaggatgatgtgtgcaaagggctactcaaagaaagacttctcatccgtgttccagttcctacgagaggaggagaccttctgagtgtgccctttggccacggacactgttgggaaccaaactctgtcttggagcctccttttagctcactccacaagtaaatggatttaatcaaaggtcacctatctgcttttggattgtctagggtcacagtaatccctagggatttttcaccgcttattctttttgtctttttaacaaacatattatccgaattttttttctggcaagccactgatagtctctggctaactaggttaattggaccttttttacaaagtttgatccccaagcatcctcaactaaatcattgaatacttcaatcaggatattatctgctttactttacaaataaaaccaaatcttttgtcaacaggatgaaacccatcttaaaggaaagaaaaggaattggtgtgaagagagaagttagagaagggaaatgcagtgaattactatctgtgtccatcaggaagtttgtcctgttaaccaaatggttactgcactaccagggttactggtttattttccagggagctgataaagcaggagaactgttgctgcatgttttctatttggactccgtcacaatatggtaggatatccctcaccaactcccgacactcagcagacttgtttttatatttttttctttcttgtacattcttactacgtattttttgacttaagaatgacatctttagacgcatttcagagccaatgatgatatttgctttagataattattatattattataaatatagccatattattttgaattcaaataaatttctatactggtaaaaaaaaaaaaaaa

SEQ ID NO: 54228 - DNA, 197 bp, Homo sapiens
tcaggagttttacatactatgcgttgttacttgtaggtcttgtttggaaagaagtaacttcctaaggtcaattcagaaaagaagggtagtaacttagaggaagtaaatttgaaggccctagtgtctaatattagtaatttgggcttttgaaagtttcctttctaaaaggtaggaaattaactctttttttttttttt

SEQ ID NO: 54229 - DNA, 294 bp, Homo sapiens
ctcatgcctcagcctcccgagtagctgggactacaggcatgtgccaccacgcctggctaatttttgtattttgggtagacggggttttgccgttattgaacaggctggtctctaactcctgacctcaagtgatccacctgccttggcttcccaaagtgctgggattacaggcaggagccacagtgcctggcctagaagtgttacattttgatgaagtccagtatatcaaagaaaaaatttttttaatgtttatagctttttgggtcctattttagaagtctttttttttttttt

SEQ ID NO: 54230 - DNA, 3006 bp, Homo sapiens
ttctctacatctaaaggacatcctttctgagctgctgtgaataaatttggaatggtactgtatattctcatctaatggagaactagctgtactttgaataaggattgctgcactggacgactttagaacatccctcacaatgtcgtcaacccggagccagaacccccacggcctgaagcagattggcctggaccagatctgggacgacctcagagccggcatccagcaggtgtacacacggcagagcatggccaagtccagatatatggagctctacactcatgtttataactactgtactagtgttcaccagtcaaaccaagcacgaggagctggagttcctccttctaagtcgaaaaaggggcagacacctggaggagctcagtttgttggcctggaattatataaacgacttaaggaatttttgaagaattacttgacaaatcttcttaaggatggagaagatttgatggatgagagtgtactgaaattctacactcaacaatgggaagattatcgattttcaagcaaagtgctgaatggaatttgtgcctacctcaatagacattgggttcgccgtgaatgtgacgaaggacgaaaaggaatatatgaaatctattcgcttgcattggtgacttggagagactgtctgttcaggccactgaataaacaggtaacaaatgctgttttaaagctgattgaaaaggaaaggaatggtgaaaccatcaatacaagattgattagtggagttgtacagtcttacgtggaattggggctgaatgaagatgatgcatttgcaaagggccctacgttaacagtgtataaagaatcctttgaatctcaatttttggctgacacagagagattttataccagagagagtactgaattcttgcagcagaacccagttactgaatatatgaaaaaggcagaggctcgtctgcttgaggaacaacgaagagttcaggtttaccttcatgaaagcacacaagatgaattagcaaggaaatgtgaacaagtcctcattgaaaaacacttggaaattttccacacagaatttcagaatttattggatgctgacaaaaatgaagatttgggacgcatgtataatcttgtatctagaatccaggatggcctaggagaattgaaaaaactgttggagacacacattcataatcagggtcttgcagccattgaaaagtgtggagaagctgctttaaatgaccccaaaatgtatgtacagacagtgcttgatgttcataaaaaatacaatgccctggtaatgtctgcattcaacaatgacgctggctttgtggctgctcttgataaggcttgtggtcgcttcataaacaacaacgcggttaccaagatggcccaatcatccagtaaatcccctgagttgctggctcgatactgtgactccttgttgaagaaaagttccaagaacccagaggaggcagaactagaagacacactcaatcaagtgatggttgtcttcaagtacatagaagacaaagacgtatttcagaagttctatgcgaagatgcctcgccaagaggctcgtccaccagaacagtgcaagtgacgatgccgaagccagcatgatctccaagttaaagcaagcttgcgggttcgagtacacctctaaacttcagcgcatgtttcaagacattggcgtgagcaaagatctgaacgagcaattcaaaaagcacttgacaaactcagaacccctagacttggatttcagcattcaagtgctgagctccgggtcctggcccttccagcagtcttgtacatttgccttgccgtcagagttggaacgtagttatcagcgattcacagctttctacgccagccgccacagtggccgaaaattgacgtggttatatcagttgtctaaaggagaattggtaactaactgcttcaaaaacagatatactttgcaggcgtcgacattccagatggctatcctgcttcagtacaacacggaagatgcctacactgtgcagcagctgaccgacagcactcaaattaaaatggacattttggcgcaagttttacagattttattaaagtcgaagctattggtcttggaagatgaaaatgcaaatgttgatgaggtggaattgaagccagataccttaataaaattatatcttggttataaaaataagaaattaagggttaacatcaatgtgccaatgaaaaccgaacagaagcaggaacaagaaaccacacacaaaaacatcgaggaagaccgcaaactactgattcaggcggccatcgtgagaatcatgaagatgaggaaggttctgaaacaccagcagttacttggcgaggtcctcactcagctgtcctccaggttcaaacctcgagtccctgtgatcaagaaatgcattgacattctaattgagaaagaatatttgggagcgagtgggatggtgaaaaggacacctacagttacttggcttaacccttctggaagggtctgactgtgtgacccgcagcaaatagttcatgttggaaagaatgaaaacaactcaagttcatagcagccagcctgccgccattggacctcccttttaaaaactgagaccaagactcccatcagctggtctcggatttacatcggaactgctcaggattgatacatttcaagtctgtaaatacggacaccaacgccatttaccctaatttaagaacagcggggactgaccctccgtgccgagggctgcatgctaccgcactaagtcaatacatgggctccccgattcgcagctgtcgtcttggcagcacttgtcacgttggcagcactttgagagcaagtctgagtggacccacatgtaacctgctatgaaaaccatttgtatagtgtgtttcattttttaatgtgtgaaaataaagaaaattaaaggatttctgtacaagtcgcattgggttttgttttaagttttactaatttctatatgtaaataaaagatataatgattgtgcaaattaaaaaaa

SEQ ID NO: 54231 - DNA, 402 bp, Homo sapiens
ataaaaggaaaccttttattcagatatgatgcgcctatatgtaacaaataattggagaaataaagaaaaacatagtttgaagaatgggaatgttctacctgtgtaataaatagtaaatatttttcatatgaatccacctctttaaattcattagagaccagataaaaggataggtcagttaatttcacctagattatagaagattggccacctcctcccagggaggtagtgtactgttgtggaatcaacaccgaatttgggagttagtaagactgacttattgtctcagactttgtcattaacctgccttaatgacataatatgaggtctgaggatgagaagtagggaaagagatgtatcagataattgctaaggttgcttcaagccttgaacttttatgat

SEQ ID NO: 54232 - DNA, 444 bp, Homo sapiens
gcgtggaaatctcttaaccatgggagttaagtctcaaaattctggtgatacaagtggttgaaacttaaaactgtatttaaaaaataggattcgtgaatttgagatagttcataagtctgcaaaaggctgtataaatacatattttacatttactattattaattttgtagtaaatttgagtacagcactctctttatctgtggggaaactttcaggactctcccctattactttaatttcagtgagacattattgaaatattaagtggggcttacacatttgttttgcttttactggacaaataatacacaacttggaggcttttttttcctttctattcttcctctaaatgttcaacacttttctgattttgtgatttgaggttgtttaatagcttcctgaggctccattgagatcgtatatacgtgacacttaacagtctag

SEQ ID NO: 54233 - DNA, 2476 bp, Homo sapiens
atccgctatgacatgattacgaatttaatacgactcactatagggaatttggccctcgaggccaagaattcggcacgagacccaggcagccaggctccagagcccataaggcccataagcatcacttctccttgtcctcacccatggctgggtttgggctgcaaccaggctgatctcttccccgggtcccgtcctcactcccccagatcaaagagccagccgagaagcaaaaattcttccaggagctgagcaagagcctggacgcattccctgaggatttctgtcggcacaaggtgctgccccagctgctgaccgccttcgagttcggcaatgctggggccgttgtcctcacgcccctcttcaaggtgggcaagttcctgagcgctgaggagtatcagcagaagatcatccctgtggtggtcaagatgttctcatccactgaccgggccatgcgcatccgcctcctgcagcagatggagcagttcatccagtaccttgacgagccaacagtcaacacccagatcttcccccacgtcgtacatggcttcctggacaccaaccctgccatccgggagcagacggtcaagtccatgctgctcctggccccaaagctgaacgaggccaacctcaatgtggagctgatgaagcactttgcacggctacaggccaaggatgaacaggggccccatccgctgcaacaccacagtctggcctgggcaaaatcggcttcctacctcagtgctagcaccagacacagggtccttacctctgccttcagccgagccactagggacccgtttgcaccgtcccgggttgcgggtgtcctgggctttgctgccacccacaacctctactcaatgaacgactgtgcccagaagatcctgcctgtgctctgcggtctcactgtagatcctgagaaatccgtgcgagaccaggccttcaaggccattcggagcttcctgtccaaattggagtctgtgtcggaggacccgacccagctggaggaagtggagaaggatgtccatgcagcctccagccctggcatgggaggagccgcagctagctgggcaggctgggccgtgaccggggtctcctcactcacctccaagctgatccgttcgcacccaaccactgccccaacagaaaccaacattccccaaagacccacgcctgaaggagttcctgccccagccccccaaccctgttcctgccacccctacaacctcaggccactgggagacgcaggaggaggacaaggacacagcagagggacagcagcactgctgacagatggggacgacgaagactggggcagctggggagcagggagggccgagtctgtgctggcccagcaggacgactggagcaccgggggccaagtgagccgtgctagtcaggtcagcaactccgaccacaaatcctccaaatccccagagtccgactggagcagctgggaagctgagggctcctgggaacagggctggcaggagccaagctcccaggagccaccttctgacggtacacggctggccagcgagtataactggggtggcccagagtccagcgacaagggcgaccccttcgcttaccctgtctgcacgtcccagcacccagccgaggccagactcttggggtgaggacaactgggagggcctcgagactgacagtcgacaggtcaaggctgagctggcccggaagaagcgcgaggagcggcggcgggagatggaggccaaacgcgccgagaggaaggtggccaagggccccatgaagctgggagcccggaagctggactgaaccgtggcggtggcccttcccggctgcggagagcccgccccacagatgtatttattgtacaaaccatgtgagcccggccggcccagccaggccatctcacgtgtacataatcagagccacaataaattctatttcacaccccttgtgccgggctcagtctagcccctgggaggcggctggggtctggcgccgcctgcgcagcccgcgcccacgtcagacgtgaacatcaatttgcttcgaaagccaagggtaaagaggcacgatctgatttatcagtttctaggaaacaccctctgggaggaaggcaggcagcgcccgccggagaccttacaaccgcccgctaaccggggaggggggccggtagggcgcctcgggtctcaaggcgccgggagggtctgcgggccctgaaggtccctgggtccgagccacaagtcggggcagaagtgaggccgagctcgcggaaatccctcagtgatcaccgaggtctgggccgagggcggcgtcggcggcgtcacgggcggcgctggggaacgcaggccccgtgcgggcggctgcgcgcgaacgcggctttgcagacgcagcggaaggagccgcttggtgttcacgcagcgctcgctctttgcacagcagcccgcgctggttcagctctcggcactcgtcgatatccacgcagcggggcgcg

SEQ ID NO: 54234 - DNA, 394 bp, Homo sapiens
aattcctgaattagtatttcttgactatcaacttaaagaatggacttcctagtacaatgttgcacttatttttttttctgaaataattctgcctgcatgtatgtgttgtgttttagcttctccccttaccccaccccaaagatcttttcttcctaatggttaatgtctcaactcggttactgtttactatcagatggtttttcattagtgaatttagacctctttgagaaagcttgtatataaaaagttaacagatatattttatggaaaaacccatcttattttcaaatatatttaactgctgttatattttattagaggaaggttgtaaatattttctaggagttctattgtaaagaaaagtatttttgaaaaaaattaatgtaataaaaag

SEQ ID NO: 54235 - DNA, 1554 bp, Homo sapiens
gcggcacgagcggcacgagcggcacgaggtcatcagtgatgtcttcaggttcactgtccccaagctgctcagccttttcctggagtttattggtgatcccaagcctccagcctggaagggctacctcctcgcccgtgctgatgttcctctcggcctgcctgcaaacgctgtttgagcagcagaacatgtacaggctcaaggtgctgtagatgaggctgcggtcggccatcactggcctggtgtacagaaaggcatccacagcatatctgaagaaatattcagaagttaactaatctcagatgatttcagcaggagtaaagaagagaaacagactcagaaatgccattacaacagttaattatgtcaaatttatcaccctgattgatcacgcagcattaacctcaagaacgccaagccaagtttttttgacaaatgtgagccaaggtttccgaaaaactagcagatatgactgtgacttacaaaatggaaaaagtaaacgagaaacacaatttgatatgatttaataaaagatttgtttccaccacttctcctgggaacctcagcacattttctttccactgacagttattatctctacctttattgaacaaagacacccggaacacagctgctgaggatcagtaaagaaaatcattcttttattaataagactgttattagcaggaaaaaaaaatccatgtttgggagtttgcactgaagttacaggccattttgaagaaatatggctgactagtgccaacattatttcaggcaatttcatgatcaaatgtcttattaggttgtttaaaatttttatagagattgtaaatcagaactattttctatttgccctaaatatttagatgctacagggaaagcagatcaaattaaagggtactgtgcacatttttttactgggaactcccagggatataaatcatttcgcctgcagcatggaattcttcagtacacatgcttgtggaaacattccacgctccgccagcacggctcattaaagtgatgatttgggttgcaacaacagtgccaagtacttcctgtgttcaactggggaccatgtggcaagacccaaagcttccccagagatcctatgggaataagttttttgagccaccatattccattatttcagcctaaaataacaccatgggacaagaatcagaagacagaggagcagacaaatgtgtgtagacatgctggaaggaatctttctttttagaaacagggtcaatatctattaaactttaagatgtgtatctcttgacctggcagtttctgtatttgagttttaacctactgatataccccatgcatgtgaataaagtatcttcctgcatgtaacaggatatttaatgtaaccttgattatagttgcaaatgctgggaaacgatccaaatgtctttcaatatggcactgattaaataaattatggcacagtctcacaatgaaaaacaaatgtagccattaaacagaatgaaatgggtctagctaaattgaaataggactacctctaagatatgttgttaaaaaaaaaaa

SEQ ID NO: 54236 - DNA, 398 bp, Homo sapiens
tgcagatttttatgctggtcaagagaaagattaacatactttctggaatcagaacctttcttgtatgaaatctttaggtatcttattggaaaagacatcacaaataagctctactcattgaatgatcccaccttaaatgataaaaaagccaaaaagctggaacatcagctcagcctctgcacacagatctccatgttggaaatgaggaacagtatagccagctccagtgacagtgacgacggcttgcaccagtttcttcggggtacctccagcatgtcctctcttcatgtgtcatccccacaccagcgagcctctgccaagatgaaaccgatagaagaaggagcagaagatgatgatgacgtttttgaaccggcatctccaaatacattgaaagtcca

SEQ ID NO: 54237 - DNA, 412 bp, Homo sapiens
caattctcaccaactctttctctctctggtgttttctccttttctcgtaaactttgccgcctatgagcagccacattgccttactgaaatccagagcctaaccttcaatcccaccgccggctgcgcgtcgctcgccaaagaaatgttcgccatgaaaactaaggctgccttagctatctggtgcccaggctattcggaaactcagataaatgctactcaggcaatgaagaagaggagaaaaaggaaagtcacaaccaataaatgtctggaacaagtgtcacaattacaaggattgtggcgtcgcttcaatcgacctttactgaaacaacagtaaaccatctttattatggtcatatttcacagcaccaaaataaatcatctttattaagtagatgaaacattaactctaact

SEQ ID NO: 54238 - DNA, 584 bp, Homo sapiens
gactcccctgcaggtaccggtccacgcgtccgggcgaacgtaaaggacacttgatcacaatccctggaataatatccaggaaacacttgctggagccactcgcagcacccttccctggcagcacacttggggacagcgaggagatgagcgcatctctgaattacaaatctttttccaaagagcagcagaccatggacaacctggagaagcagctcatctgccctatctgcctggagatgtttaccaagccagtggtcatcttgccgtgccagcacaacctgtgccggaagtgtgccaatgacatcttccaggctgcaaatccctactggaccagccggggcagctcagtgtccatgtctggaggccgtttccgctgcccatcctgtagacatgaagtggttttggatagacatggggtatatggacttcagaggaacctgctggtggaaaatatcattgacatctacaagcaggagtccaccaggccagaaaagaaatccgaccagcccatgtgcgaggaacatgaagaggagcgcatcaacatctactgtctgaactgcgaagtacccacctgctctctgtgc

SEQ ID NO: 54239 - DNA, 774 bp, Homo sapiens
tttttttttggctcttaagggtctttaatggtttcattttgtggcccttccccccaaccctggtgactgtcccagcaagcagtcagtagaggtccccggagttcagtgggggcctggagatgtcggacttgtgagggaagggccactctccccttgtaacctctggtggctgctaggtggaagctgcagcaagggggtcccaagtgcagggcctctgggtgctacacatctcacagccagggcggtctggggcattgatgaaggtgcaggaaggacaggaccagctgggctggagtggactgggcaggctggaggcagctggctgggggcctgggggtagcccccaatgatgggggaaacaagcgtccaagttccccgtccatcttctgggggtgctgagggctaggtcctgtggctggggcttctcgaggagctgacagcaagtagaggaaagcagggtccccatcctgccgaaccccgtaagaggcaaggctgcgctcaggcacacacaggcaccgtccgatgacccagcgttgcacggctggcgggaaaccgagctctgagaacacctgctcctggagagctgcaacagtgcagtgggggtggacctgcagggcaacgtgtgcagaggacgcggcggatgcggcagaggcagcgtcttcaagtgtgacctgcagcctgatggggccaggtgggaagcaggcctcctgaagctgaacactcagggccacacgatgctgggccaggacggctgccacttgggctgcccccttc

SEQ ID NO: 54240 - DNA, 429 bp, Homo sapiens
ggaaggataactacaggataagcagctcttagaactggaattgctgagttaactgctctgtgcatttccttgctttttcttgcttttcttttctttcttttattatttttttgggtaaatttttattgaactatagcatagcgtagatacaggaaagtgtaaaaacttaaatgtacaattcaatgaattttcgctaggcaaacactgggggcgccagcacccatatttaaaaacagaatattaccagaatcccaaaagccccatgagctgccgtccagtcactacttaccgtttccctgatcccctgcataggataatccttatcatggcttctgacactttcggttggttttggatgtactgacactttttgtgtgtgtgtgacacttttataatacaaagaaaatcatacagtaaaaaaaaaaaaaa

SEQ ID NO: 54241 - DNA, 986 bp, Homo sapiens
aacagactgaaatcgccaagagattgaatacgatttgtgcacaagtcatcccatttctgtctcaggaacatcaacaacaggtggcccaggctgttgaacgtgccaaacaggtgaccatggcagagttgaatgccatcatcgggcagcagcagttgcaagctcagcatctttctcatggccacggacccccagttccccttacgcctcacccttcgggacttcagcctcctggaatcccgcccctcgggggcagtgccggccttcttgcgctgtctagtgctctgagtgggcagtctcacttggcaataaaagatgacaagaagcaccacgatgcagagcaccacagaggtgagaggccgggcaagccagattaggactttgtcctcatactcttacagtgctgcaaagttgtgtgcatcgctaaagagagccccaacctatacagagagcaaacaatgagataagaggaactgtcgcaaagctttccactgaaacacaggtcaccctgggaagtttgcagggtttgctgtgggcatctgtagatttctcgatctcgttagattgcaggcatcttgacatcttggcaactgcctagttaatgccagtggcctgtaccatattatggaaaactgttaactgcttaattgggtaattttcaaagaaagtaatgttgttaaatggggcgaaataagaagttaaatttgaaagtgaatgtgttcaaatgaaaggtttgataattgcatctgttactacttagtttcataggctttaattctagtatgcattaaatattgggcaaaattgcacttgactaattttttgaagaaaagtaatttattctgtcaagaaataaaaaaataggctttgtgtatggttaaactgtaaatcttatgtttacaaaatactgtaattttcaggaaatcactgtattaggaatgtgcaatgacttatataaataaaagccatttttaaaactgaaaaaaaaa

SEQ ID NO: 54242 - DNA, 901 bp, Homo sapiens
ttttttttttttttttttgacgctgagtgtatttatttatctacgcgccctggagaccggcccctaaatttaaatatccagcacggggccttggccctcctggccgtgggtggttattgggacgggtcctggagcccttccagggcagaggaacccagagcccggaggtgggatgcccctgagccagcagctgccgatagcaacaaaaggtgaggaggagatgggagccaggcactcatcccaatcccagagacgccaagcggaagggaagatgcttcgggccccaccgcaaggctgagggttggccaagctgggggtgcacacatgtggaagaactggaggcccagtgccatgagcagaggctgtaccctagatgcccggccccagtgccagccaacccaagacaggagaaagagtttggcagtttcgcctctgaggaatacatgcctggccctcctgtgaggtgaggcggtaggggggaaggcgcaggctccgaagtctgagggcttgcccggagggggagtttctgagccttttgcatgggtgcatgccccctgccccccagcccttcagaggctgatgtggaaggcatcctgcagccactggtcacgggcattgtgcgtctggggcacagtaaggggtggcgggtcaggaggcaggctggcatcgggaggctcctcgtcgtcagacaggcccgcatccggtgggtaggagctgtccgaatggagggaggatgacaggtcctggcagaagctcaggtcttggcacaggtgtttgtagtcctggattgactcgtacaggccccacagctggcacaacaaggacatgtccaactgccgcagccccacctgcagacaacatctccttgcgcagcgcggccagcgctgagtcgaggttgaca

SEQ ID NO: 54243 - DNA, 1336 bp, Homo sapiens
cgcgggggcgggcgcgcaccgggagcgcgtcggaggcgagtggaactggatcgggtttgctgccagcggcgtgagcttcggccgccattttacaacagctccactcgcgccggacacagggagcagcgagcacgcgtttcccgcaacccgataccatcggacaggatttctccgcctcagcccaacggggagatctctggaaacatggctacagaacatgttaatggaaatggtactgaagagcccatgggatactacttctgcagttatccattcagaaaattttcagacattgcttgatgctggtttaccacagaaagttgctgaaaaactagatgaaatttacgttgcagggctagttgcacatagtgatttagatgaaagagctattgaagctttaaaagaattcaatgaagacggtgcattggccagttcttcaacagtttaaagacagtgatctctctcatgttcagaacaaaagtgcctttttatgtggagtcatgaagacttacaggcagagagaaaaacaagggaccaaagtagcagattctagtaaaggaccagatgaggcaaaaattaaggcactcttggaaagaacaggctacacacttgatgtgaccactggacagaggaagtatggaggaccacctccagattccgtttattcaggtcagcagccttctgttggcactgagatatttgtgggaaagatcccaagagatctattttgaggatgaacttgttccattatttgagaaagctggacctatatgggatcttcgtctaatgatggatccactcactggtctcaatagaggttatgcgtttgtcactttttgtacaaaagaagcagctcaggaggctgttaaactgtataataatcatgaaattcgttctggaaaacatattggtgtctgcatctcagttgccaacaataggctttttgtgggctctattcctaagagtaaaaccaaggaacagattcttgaagaatttagcaaagtaacagagggtcttacagacgtcattttataccaccaaccggatgacaagaaaaaaaacagaggcttttgctttcttgaatatgaagatcacaaaacagctgcccaggtaaaagtgctgtttgtacgcaaccttgccaatactgtaacagaagagattttagaaaaggcatttagtcagtttgggaaactggaacgagtgaagaagttaaaagattatgcgttcattcattttgatgagcgagatggtgctgtcaaggctatggaagaaatgaatggcaaagacttggagggagaaaatattgaaattgtttttgccaagccaccagatcaga

SEQ ID NO: 54244 - DNA, 797 bp, Homo sapiens
  misc_feature (1)...(797): n = a,t,c or g
gaggattttcattaaaagtctcagcagtgggtttcttgggttatttaaaacatcacctaaataggccttttcttcctaattggccatcaaattaaagcctatcctttctcaagcaggagctggtattgtagggagtggccgggtattctgggctgggctcttctggagtagggggtcagcaaacattgtctgcaaagggccagatactgaatccagtactttcagtttggcgagccgtgaggtctctgtcgaaactactcaactctgccgtcctagcacaaaagcagccatagacaacacacaaacgagagggcttggctcccttccaggaagatttatttaacaggctcccagctgaatttcactcacaggacacagtttactgatctctgttctagtgagtgggtcaaaaagcatatgcatccttatccgtcaactcatcagctcttcctcaaggcaacctgaggccagacaccaagaaaccaagcgtatctgctctaaaatgacttgttcctggggaatgccttcaaccaaaacacagctagtatttctatgccccaaatccaatcccagtctttcatgatccatgccggcggttgggtggggaggggaatcattggttgggggaagggaggaaaccccacctccagcccccgccaccgggctccctggggcacccaggcaagatctggggctgcagagaacagaagagctggtgcacttaatccagctctgccctttgggggggagggaggacctgtgttttcaaggttntgccattggggaacgagttttta

SEQ ID NO: 54245 - DNA, 742 bp, Homo sapiens
ttttttttttttttttcaatagatcatgtttattcccaagccccaaccagacatgttctacccctcaagatccctgagacccaggctgtgggctggaaaatgaaggcacagtgtcaagagcgcccctgttggcatatgaagacccaggagtgctgaccttcagggatctgcctgcactgcccatgggcctgggcacagcaggaggcactcctgtttctgtcccttctgtctctggtcttcagagcaaggtttctgctgagatgctaaggaagctgagtcctttgtcagccctgactctgactgagaggcagacaggagccaaggccccattgaagctccaggatgacgatggccctcaggggaacagacgcaaaaccaggcacgggcctgccttccagctggaatctacctgtcaggcccagaacttctgtgcagttggagtgggctccccagaaggaaaaacaatacagctgagtctagtgctaggggacagagaactgggggctcaagaaagcaccccaaaacgggctgccaggttaaggatccatggggctgaagagaagtttgccccagagcccaaagcccagtctgcagtcagtgggtggagatgagaggcagcctgggcccctgcaggggctgggccctgaatcctgaggccaccgtcacctcaacatcacttcctacagcagaaaaaggtcactcttctttccaaaggtggtaacacagcctcagagcttgctcc

SEQ ID NO: 54246 - DNA, 1175 bp, Homo sapiens
cgacagtgtctagcgggagctccgcgtgtagctacgccggccgcctggctttgagacaacgtgattctccgcagctggtcgcctacccgtgatgttctgcccacgtcgagacctgagctgaaatggcagacgatctcggagacgagtggtgggagaaccagccgactggagcaggcagcagcccagaagcatcagatggtgaaggagaaggagacacagaagtgatgcagcaggagacagttccagttcctgtaccttcagagaaaaccaaacagcctaaagaatgttttttgatacaaccaaaggaaagaaaagagaataccaccaagaccaggaaaagaagaaagaagaaaattactgatgttcttgcaaaatcagaaccaaaaccagggttaccttgaagaccttacagaagctgatgaaggactattatagcagcagacgcttggtgattgaattagaagaactgaacctgccagactcctgtttcctcaaggccaatgatttgactcacagtctttcctcatacctaaaagaaatttgtcctaagtgggtaaaacttaggaagaaccacagtgagaagaaatcggtcctgatgctgatcatctgcagctcggccgtccgagccctggagctcattaggtcgatgacagcattcagaggagacggcaaagttataaaattatttgccaaagcacataaaggtccaggcgcaggtaaagttgctggagaagcgtgtggtgcacctgggtgtaggaactccggggagaattaaagaacttgttaaacaaggtggccttaatttgagccccttaaaatttctggtttttgactggaactggagagatcagaagttgaggagaatgatggacattcccgagataagaaaggaggtattcgaacttctggaaatgggagtgctcagtctgtgcaagtcagaatccttgaaactgggccttttctaagtctgtgtcctaatgaagattccagttttcacagtagaagttgcatcttatttaatgactctgatacattgcaagcactcagtaaatatcagcaaatagtttatgttaattgtgtcaacagatggatcactggaatgtggggattctgaaacagaaatgaaactgtccttttgacaactctcttatataataaagtatcaccggcttgtg

SEQ ID NO: 54247 - DNA, 1934 bp, Homo sapiens
gttaaatgaagaaattggtaaattgttagccaaggtggaacaactaggagctgaagggaatgtggaggaatcccagaaagtaatggatgaagtagagaaagcacgggcaaagaaaagagaagcagaggaagtttatcggaattctatgccagcttccagttttcagcagcagaaacttcgagtctgtgaagtctgctctgcctatttaggacttcatgataatgacagacgactggctgatcattttgggggtaaactgcacctgggatttattgaaataagagagaagcttgaagaattaaagagagtcgtagctgagaagcaggagaaaagaaaccaggaacggctgaaacgaagagaagagagagagagagaagaaagggagaagctgaggaggtcccgatcacacagcaagaatccaaaaagatccaggtccagagagcatcgcagacatcgatctcgctccatgtcacgtgaacgcaagaggagaactcgatccaaatctcgggagaaacgccatcgccacaggtcccgctccagcagccgtagccgcagccgtagccaccagagaagtcggcacagttctagagataggagcagagaacgatccaaggaggagatcctcaaaagaaagattcagagaccaagacttagcatcatgtgacagagacaggagttcaagagacagatcacctcgtgacagagatcggaaagataagaagcggtcctatgagagtgctaatggcagatcagaagacaggaggagctctgaagagcgccgaagcaggggagatctaactagctgtgtacatttcttcagtccttaagcttcctacggagttacgtactattgtttagttcacagctgttcagggtgacagtgagcagatccagacaccagatccagctaggctagatgtacagtatctaacttgatctgaactgaacctgttttccttgatgatgcctaaaactacatccatagtttctggtgaacctgtaatacagttctgaaagtacagttttatataataagatgctgatctctttattctttcaagtaagagtgctagtgaacaaattgtgttacttgccttgggattttttgaacgtttgtaaaatgctgtcttcctagtccaaacagctgcagctttgggcatttttctttttaattattcttcctctgactttgtatcccttaatacctacactctccaattgtaagagaaagggggcagggaagcaatatagcttccattctaaggctgtattcccgttatgaattactagctgattacagttcagagcattgatcctggaatgtgtgctggagaaatttaaaatactggggttttttgtttaatggtgcctatttagagttggaagttgaacagctgttgcattacatacttttgcttttttattgaaattttgaaatcaaacgtcttgatttttctgttctgttgaattgctatgttcaggatgttctagggggtgggggcagggactcttttcgtaataagcacttgttttattttgtgtgtgtggagtataaaggctacacccttattgtaaaaaaataataataataaaatgaaagaaacaatcaccaccaccattattaaactgtaacttgtctagtaaattgtcactagaactatttgctgtgggcatttcctctattctgttacgtcattaacagtgccttactgtgcaaggcaccaaaggacataaatacgtacttgcaaagattccagatgagctgttcatgtgggccccttgctgactatattccagccacttcagggttgtttgtaatgaccgttatagagaagggctcgacctgcagaagaaactggggtgtttttattctcattcaacaaacccaaataaaaacagtatatgttaccaaaaaaaaaaaaaaaaaaaaaaaa

SEQ ID NO: 54248 - DNA, 434 bp, Homo sapiens
gggcaagcagaagtatctagatagaattgaataacaccattttgtttccattgtatttatttttacagttactttctatctctggtaagtgatactgagtttccatttccaacagtgatacagtgtcttttaaaaatacatttactgaacttaaaaataagttgattcaaaggaagtaattcaggaaactggaatataggcagtgcagatgtagcaaaattatagaggtggtgtataaaaatggctgaaatttgggaaccccagggccaactggtctctggagctttgccagctctaccagcctgtggtttttggaaaaggtgggcctgggcaaggaagccgtttccttgagtgaagaatggagccgtactctccctggcctctgctgagcaatctgactctccaactgcccccgggagcatgggggtagatag

SEQ ID NO: 54249 - DNA, 434 bp, Homo sapiens
aataaactgaaacttggagaactgaactcttgaccacagagctaatggaggacagacaaaattccgcaggtgtgaatgacctctcggcctctcctcttaactcttttgctaaaatgctttaccaaattatttggcactaagaaaatgatttcctgactgttgctagaggccctgctagcagcttggaacacataatcattctcatctagcagaatataattattggtataattctgagctactgtaatttcattctactaaaaaatcgcagcatgaatttgtaatatcaggaagactttggggctagagaaaataaaatgtttggaaaaatgctgccatatgtacaggattcaagtggcatctgcgtgtgctcattacaccacatcattctgtatctgccaatttgttcctcaggtaactcaaatgactcatgg

SEQ ID NO: 54250 - DNA, 725 bp, Homo sapiens
  misc_feature (1)...(725): n = a,t,c or g
gagcaacaacctaagcaccgttatcagtgcctaggaatgttcaaggcccaggctggggttcagacctgcagaggaaaacatcagctggctgggtcaaggcaccatgtgttacttggtcaggacagagacaaaaatgaggaaaactaggggaccccacacacatgtgggctaccatactcctgaacaggtctagctagttatttgtttttttggaagttaatctggggtagaaatgtatggtgatttttattttctctgtctgaagaaccagccatttttaaaaaggttattattgacatcccaatattttgtcttggtgggcttactcataagtccaaacattttattctcaacaggtgtaaaacagggcagagcattctaaaaccacatggtagtgctttggtggaggactgcttccacttagaaacaaactctgagaagtaggctaagagaagacaagagggccggcgcggtgactcacgcctataatcccannnnnnnnnnnnnnnnnnnnnnnnnnnnnnnnnnnnnnnnnnnnnnnnnnnnnnnnnnnnnnnnnnnnnnnnnnnnnnnnnnnnnnnnnnnnnnnnnnnnnnnnncgtgggggcacccgtatnccactctcaggangctgagcaggagaattgttgaaccangaacanaggtgcagtaactganatccccnttgccttccnctggcacagagnngattcatttaaaaaaaa

SEQ ID NO: 54251 - DNA, 6192 bp, Homo sapiens
  misc_feature (1)...(6192): n = a,t,c or g
gaagacaaccctgagatagcagctgcgattgaggaagagcgagccagcgcccggagcaagcggagctcccccaagagccggaaagggaagaaaaaatcccaggaaaataaaaacaaaggaaacaaaatccaagacatacaactgaagacaagtgagccagatttcacctctgcaaatatgagagattctgcagaaggtcctaaagaagacgaagagaagccttcagcctcagcacttgagcagccggccaccctccaggaggtggccagtcaggaggtgcctccagaactagcaacccctgcccctgcctgggagccacagccagaaccagacgagcgattagaagcggcagcttgtgaggtgaatgatttgggggaagaggaggaggaggaagaggaggaggatgaagaagaagaagaagatgatgatgatgatgagttggaagacgagggggaagaagaagccagcatgccaaatgaaaattctgtgaaagagccagaaatacggtgtgatgagaagccagaagatttattagaggaaccaaaaacaacttcagaagaaactcttgaagactgctcagaagtaacacctgccatgcaaatccccagaactaaagaagaggccaatggtgatgtatttgaaacgtttatgtttccgtgtcaacattgtgaaaggaagtttacaaccaaacaggggcttgagcgtcacatgcatatccatatatccaccgtcaatcatgctttcaaatgcaagtactgtgggaaagcctttggcacacagattaaccggcggcgacatgagcggcgccatgaagcagggttaaagcggaaacccagccaaacactacagccgtcagaggatctggctgatggcaaagcatctggagaaaacgttgcttcaaaagatgattcgagtcctcccagtcttgggccagactgtctgatcatgaattcagagaaggcttcccaagacacaataaattcttctgtcgtagaagagaatggggaagttaaagaacttcatccgtgcaaatattgtaaaaaggtttttggaactcatactaatatgagacggcatcagcgtagagttcacgaacgtcatctgattcccaaaggtgtacggcgaaaaggaggccttgaagagccccagcctccagcagaacaggcccaggccacccagaacgtgtatgtaccaagcacagagccggaggaggaaggggaagcagatgatgtgtacatcatggacatttctagcaatatctctgaaaacttaaattactatattgatggtaaaattcaaactaataacaacactagtaactgtgatgtgattgagatggagtctgcttcggcagatttgtatggtataaattgtctgctcactccagttacagtggaaattactcaaaatataaagaccacacaggtccctgtaacagaagatcttcctaaagagcctttgggcagcacaaatagtgaggccaagaagcggagaactgcgagcccacctgcactgcccaaaattaaggccgaaacagactctgaccccatggtcccctcttgctctttaagtcttcctcttagcatatcaacaacagaggcagtgtctttccacaaagagaaaagtgtttatttgtcatcaaagctcaaacaacttcttcaaacccaagataaactaactcctcctgcagggatttcagcaactgaaatagctaaattaggtcctgtttgtgtgtctgctcctgcatcaatgttgcctgtgacctcaagtaggtttaagaggcggaccagctctcctcccagttctccacagcacagtcctgcccttcgagactttggaaagccaagtgatgggaaagcagcatggaccgatgccgggctgacttccaaaaaatccaaattagaaagtcacagcgactcaccagcatggagtttgtctgggagagatgagagagaaactgtgagccctccatgctttgatgaatataaaatgtctaaagagtggacagctagttctgcttttagcagtgtgtgcaaccagcagccactggatttatccagcggtgtcaaacagaaggctgagggtacaggcaagactccagtccagtgggaatctgtcttagatctcagtgtgcataaaaagcattgtagtgactctgaaggcaaggaattcaaagaaagtcattcagtgcagcctacgtgtagtgctgtaaagaaaaggaaaccaaccacctgcatgctgcagaaggttcttctcaatgaatataatggcatcgatttacctgtagaaaaccctgcagatgggaccaggagcccaagtccttgtaaatccctagaagctcagccagatcctgacctcggtccgggctctggtttccctgcccctactgttgagtccacacctgatgtttgtccttcatcacctgccctgcagacaccctccctttcatccggtcagctgcctcctctcttgatccccacagatccctcttcccctccaccctgtcccccggtattaactgttgccactccgccccctcccctccttcctaccgtacctcttccagccccctcttccagtgcatctccacacccatgcccctctccactctcaaatgccaccgcacagtccccacttccaattctgtccccaacagtgtccccctctccctctcccattcctcccgtggagcccctgatgtctgccgcctcacccgggcctccaacactttcttcttcctcctcttcatcttcctcctcctcttcgttttcttcttcatcttcctcctcttctccttctccacctcctctctccgcaatatcatctgttgtttcctctggtgataatctggaggcttctctccccatgatatctttcaaacaggaggaattagagaatgaaggtctgaaacccagggaagagccccagtctgctgctgaacaggatgttgttgttcaggaaacattcaacaaaaactttgtttgcaacgtctgtgaatcaccttttctttccattaaagatctaaccaaacatttatctattcatgctgaagaatggcccttcaaatgtgaattttgtgtgcagctttttaaggataaaacggacttgtcagaacatcgctttttgcttcatggagttgggaatatctttgtgtgttctgtttgtaaaaaagaatttgcttttttgtgcaatttgcagcagcaccagcgagatctccacccagataaggtgtgcacacatcacgagtttgaaagcgggactctgaggccccagaactttacagatcccagcaaggcccatgtagagcatatgcagagcttgccagaagatcctttagaaacttctaaagaagaagaggagttaaatgattcctctgaagagctttacacgactataaaaataatggcttctggaataaagacaaaagatccagatgttcgattgggcctcaatcagcattacccaagctttaaaccacctccatttcagtaccatcaccgtaaccccatggggattggtgtgacagccacaaatttcactacacacaatattccacagactttcactaccgccattcgctgcacaaagtgtggaaaaggtgtcgacaatatgccggagttgcacaaacatatcctggcttgtgcttctgcaagtgacaagaagaggtacacgcctaagaaaaacccagtaccattaaaacaaactgtgcaacccaaaaatggcgtggtggttttagataactctgggaaaaatgccttccgacgaatgggacagcccaaaaggcttaactttagtgttgagctcagcaaaatgtcgtcgaataagctcaaattaaatgcattgaagaaaaaaaatcagctagtacagaaagcaattcttcagaaaaacaaatctgcaaagcagaaggccgacttgaaaaatgcttgtgagtcatcctctcacatctgcccttactgtaatcgagagttcacttacattggaagcctgaataaacacgccgccttcagctgtcccaaaaaacccctttctcctcccaaaaaaaaagtttctcattcatctaagaaaggtggacactcatcacctgcaagtagtgacaaaaacagtaacagcaaccaccgcagacggacagcggatgcggagattaaaatgcaaagcatgcagactccgttgggcaagaccagagcccgcagctcaggccccacccaagtcccacttccctcctcatccttcaggtccaagcagaacgtcaagtttgcagcttcggtgaaatccaaaaaaccaagctcctcctctttaaggaactccagcccgataagaatggccaaaataactcatgttgaggggaaaaaacctaaagctgtggccaagaatcattctgctcagctttccagcaaaacatcgcggagcctgcacgtgagggtacagaaaagcaaagctgttttacaaagcaaatccaccttggcgagtaagaaaagaacagaccggttcaatataaaatctagagagcggagtggggggccagtcacccggagccttcagctggcagctgctgctgacttgagtgagaacaagagagaggacggcagcgccaagcaggagctgaaggacttcaggaacttcctgtagaaaagcccccaaaacaaaacaaaccttaattgactaaaaagtattgcatgctcaacttaggataagcactacggcaaaggatacgaaatctaccaagcttgcaagaccagttgaagctgactcaaaaatcctaacattcagctgattgccggcaggtntagagtcaggcatctgctgcttcggtgggggcccaacgcgcatgctgggcgcccagggtgattgagatccaaagagaagggcactgtaagacaggccagatgaactggctcctcgtcatgggactggtacctcagatctgagcatggcccttgtttttggcacgtagcagagaaaggattgatttgaacttaaccttgcaaagcaagttgcctgttttagcagtagtttgttgtaggtttcagggatgacagatttggatgcactcatttaaaacgttttggtcacatatcagctcttgatgcctttcttttaaattaattatagacagagagaggcatttagctgatctcttacccctgggtatttcttttttttgttgttttcgtttttttaaatcacaagtagattgccagcgtaatggagaggaaaccagattggatatggactcttttttatgcctattctggtgttgcgtttgtatatccaaatggacgttatcctctcagattcttatctgggcactaatttataactattatattatcagagactatgtagcaatatatcagtgcacaggcgcatcccaggcctgtacagatgtatgtctacacgtaagtataaatgaatttgcataccaggttttacacttgcatctctaatagagattaaaaacaacaaattggcctcttcctaagtatattaatatcatttatccttacattttatgcctccccctaaattaatgactgagttggtggaaagcggctaggttttattcatactgttttttgttctcaacttcaaaagtaatctacctctgaaaaatttgtagtttaatatttgtttggtgaatttgtgccactttaatccttccactatcattcccattttgttacatttctgttatggggactttatgttgaaatattgtataaagcatttgtagcaatttaaaaataaaatatttaaaattatttaaattgttttggacgcttcaattgtattatatgtgatttacatttcactttttttgttggcgttgttaacccggagagtgctcctgtattgaactttgctgttagttattttattgcttctttttggagagtgctataaaagactattctaatgaaaacattaaaatttacaatttgacatacaaaaaggggttgtccattgattttaaccaatgtagcactgagagagagagaggttaattatagatagacaagagtggtgtttgttgtttttcccctcccagcattgaaatcattggggcttgtcagaggtattaaaaaaagatttgttgtgctattgctgcaaacacttaataactagaggagaatttaaacaatgcattttatattattgtaaccaataaaaaactttctaaaaaaaaaaaaaaaa

SEQ ID NO: 54252 - DNA, 373 bp, Homo sapiens
  misc_feature (1)...(373): n = a,t,c or g
cggacgcgtggggactttgtggataaagcagagaagagcctgaagcagactccccatagtgaggtttccattaactttggaccatgcttcaagtatcctccgaaggatctcacttaccgccctatgagtgacatgggctggggcgccgtggtagagcacaccctggctgacgtcttgtatcacgtggagacagaagtggatgggaggcgcagtcccccatgggaaccctgaccaggtccctcttttctgtcaaggactttctgggaataatactgggggtttggttttgcttttgaactgtctcaaatgttctcccaaagatgctaaaaacacagnctctccttttagcaagttaaaaggctgggtaggactg

SEQ ID NO: 54253 - DNA, 2540 bp, Homo sapiens
ctttcacgggcggtgggagctgaggctcctgtcgttatctctgatccttgcaccctggcaggaagctggtagctcacactttaacgggaggccttcacatattccagaaaagaaaccactttgcagtgccagactggaagaagtaacggtcactctgaaaacagggtgggagagctgcctctctttgaacctctcccaggaccaactctaacccagggaggcaaacttggtcgatgtaagcggtggcttggagacagaatcatctaatggaaaagatacactagaaggtgctggggatacatcagaggtgatggatactcaggcgggctccgtggatgaagagaatggccgacagttgggtgaggtagagctgcaatgtgggatttgtacaaaatggttcacggctgacacatttggcatagatacctcatcctgtctacctttcatgaccaactacagttttcattgcaacgtctgccatcacagtgggaatacctatttcctccggaagcaagcaaacttgaaggaaatgtgccttagtgctttggccaacctgacatggcagtcccgaacacaggatgaacatccgaagacaatgttctccaaagataaggatattataccatttattgataaatactgggagtgcatgacaaccagacagagacctgggaaaatgacttggccaaataacattgttaaaacaatgagtaaagaaagagatgtattcttggtaaaggaacacccagatccaggcagtaaagatccagaagaagattaccccaaatttggacttttggatcaggaccttagtaacattggtcctgcttatgacaaccaaaaacagagcagtgctgtgtctactagtgggaatttaaatgggggaattgcagcaggaagcagcggaaaaggacgaggagccaagcgcaaacagcaggatggagggaccacagggaccaccaagaaggcccggagtgaccctttgttttctgctcagcgccttccccctcatggctacccattggaacacccgtttaacaaagatggctatcggtatattctagctgagcctgatccgcacgcccctgaccccgagaagctggaacttgactgctgggcaggaaaacctattcctggagacctctacagagcctgcttgtatgaacgggttttgttagccctacatgatcgagctccccagttaaagatctcagatgaccggctgactgtggttggagagaagggctactctatggtgagggcctctcatggagtacggaagggtgcctggtattttgaaatcactgtggatgagatgccaccagataccgctgccagactgggttggtcccagcccctaggaaaccttcaagctcctttaggttatgataaatttagctattcttggcggagcaaaaagggaaccaagttccaccagtccattggcaaacactactcttctggctatggacagggagacgtcctgggattttatattaatcttcctgaagacacagagacagccaagtcattgccagacacatacaaagataaggctttgataaaattcaagagttatttgtattttgaggaaaaagactttgtggataaagcagagaagagcctgaagcagactccccatagtgagataatattttataaaaatggtgtcaatcaaggtgtggcttacaaagatatttttgagggggtttacttcccagccatctcactgtacaagagctgcacggtttccattaactttggaccatgcttcaagtatcctccgaagagtctcacttaccgccctatgagtgacatgggctggggcgccgtggtagagcacaccctggctgacgtcttgtatcacgtggagacagaagtggatgggaggcgcagtcccccatgtgaaccctgaccaggtccctcttttctgtcaaggactttctgggaataatactgggggttttgtttttgtttttgaactgtctcaaatgttctcccaaagatgctaaaaacacagcctctccttttagcaagttaaaaggctgggtaggactgcgggagactgcctgcctttcaccattttctccccacttccagtgactgctcttattttgtgtaccataagccaacaaccgctgactccaggattgcataagccccctgtgaaatcggtgctgtactgcataccctgccagctgtgacttgttatcctactatattttctaaggagtgaataatattgtccgagtaactaacttatttaaaagacatttccttctgtgggcattgactgtatcccacctgttttccaaggaaatggtaacctgtttctgagaacacctgaaatcaatggctatacattccaaaccaatctaaacgctatttccttttggtgtgggtttggttttgttcattttgaaatacacttttgaacactgagatccgtaaaactactagatctctggaagtgtaattgtgaaagaaacttgcttgcagctttaacaaaatgagaaacttcccaaataaaacttgttttg

SEQ ID NO: 54254 - DNA, 80 bp, Homo sapiens
cctaaattttaataactggttcccagtgcttaattcacattagaagcttccatagccaggatgcagatgtgtacaccaca

SEQ ID NO: 54255 - DNA, 428 bp, Homo sapiens
acaaaacaaaattctgtatgctttgtcaacgagcaagcatcaggaaaagttactgaagttaattgaactaggaatggaaggaaaggttatcaagacacagaacttggcagctctccttcatgcgattgccagacgtccaaaggggcagcaactagcatgggattttgtaagagaaaattggacccatcttctgaaaaaatttgacttgggctcatatgacataccgatgatcatctctggcacaacagctcacttttcttccaaggataagttgcaagaggtgaaactattttttgaatctcttgaggctcaaggatcacatctggatatttttcaaactgttctggaaacgataaccaaaaatataaaatggctggagaaagaatcttccgactctgaggacttggctaatggttaatacttaaatg

SEQ ID NO: 54256 - DNA, 454 bp, Homo sapiens
tatgattgaagaaaacatgacctgggctgaagaagtgaggattgattggagtgggctagaatgagctatagtttctagctcatttgtaaggaggtagacaaaggagcattggtgcctcagagtgggtgtctggtgagaggaaaaacggtgcttaagagattttcaggctattgctgtgggacaggcatattttctccctttgcctttagctgtagataaagtgtggttatgacctgaggcttcttgtattcaaacttggcctagggcctatgtagaggccctagggtctacttgtggtggaggagggaagtatttgtagaatgtgtaggcttgagaagtaaataaagccaaaaaagcatcacttgcttacatttttaaatgagtcacaaaacaatctttctaatgcggccggtaaagaagttttaaaggtctaaggtttctctacagaaattac

SEQ ID NO: 54257 - DNA, 1108 bp, Homo sapiens
atcataatttgagtattccagagctgactacatactttcaagtttatatttcctgacaaggatatgacctttttccatcctgtaattcagagaaaagaaccacttgccctatataaactctaaaaagaaaactgcataaacccaggaacagggggcaaggagtgctcccctttgacctactattagcaggtccaacaaatgatatatcaccacgtctatgaagaaatttctttctataaaagcacaaaatttaaatcggatttgactttacatattagggctttcatcttgatgagaaactcataacagcagcagctcaaactgattgttaaaaggaaaaaacacagggcagattaataatgcaacttggatcttcactcttctctttccaattcaaatgctggaatatgacactctttttataatattctgcccatgaggttctctcccttcttttctgccttcagagtcctttccaaaaggaaattactgccttgcattctacattattcctaatttccaggtggaaaaatgagacaaattaagtgacttctaaaaacactaggaactgtattttttaaaaacaagacaatacttcagattttcttgctttaattcttctctatattaccacagtaaaatatttaacaaagtccaagagattactgatatgcaataatgacctatgactttacattaatggagtgatgtatcaataataaactgatcagttaagtaactggaaaatgtttgcatgtaaagaatgattcactatcctttttatcttgtattgaaatcgtcaaaacatttaaaaacacaaagttgaagtaattttaaataataataactgtgaaatactgcaacatcttgaagtactttataaatgaccaaaaacaggtaaaattttgttcagtataacttcagtgaagaagttttttgacacagaactacatatatttttaaattggtaatccacataagatatacacaaaaccttcaagtgactacattgttcaataaataaaactctacattgttttgtttttacagcctagtgagcttataactcagtaacacccttttaagaaattctagtctacagaatgac

SEQ ID NO: 54258 - DNA, 1223 bp, Homo sapiens
  misc_feature (1)...(1223): n = a,t,c or g
tttttttttttttaggagataaaaggtttacttagaaattgcaaacatttagcaaaggtaagacaaatactattttccatattctacagaaatacaatactttatagctggcttggtacatggtcacataagaacaaatctaatggaaaaagaatatttcattctacttttctgccacttatcacagtgtaataagtgccagtaagtcctggaagacagttgcagaggaagattagaatcccagggctgtttgttaatatacatgattatattgtaagaataatataaaaacaaaataggtaagatatacaattaacatgcaatttaagctatattattttgaagaaacaggacagaatttagtgaacgcaacttaaaaatttgttaatgtagtataatcagcatatcatggtattttacatggtatggaattattcctccttaataatgcttggcaaattggaacaggctgatcctacttctagaacatattaaaatgaagatgaaggaaaacaagtggataattctattagatgcttttctaaatattctgaatttttaaagtaccataattacaggcctacctcaccatctccaaagttaaagtcatattttatactctatgaanctgtactgtaccagtatagtagacccttagccatatgtgaactaactgagcacttaaaatgtggaccagtcagaattgagatgtgctgtgagtgcaaaatacactcaaatctaagacttagtatggaagaaaaagaagataaggtgtttcattaataatcttttatattgattacatgttgaaatgatatttttaatatactgggttacataaactgttattaaaattaattttgcttgtttcttttttaatatggctactagaaaattaaaaattatgttgtggttcacattatatttctgttgaacaatgtggacatagataatctacagtcattacattagccttagaatttagcatcatacttttaagcactctggggtactaacttgaactcccagaaacccataagcacactctgcatataaattattgcaaaattcattcttatctctctgaaagatatgcattttaagggtaaaaagaattcacaaaatattgaatccttaacaaatgtcaattagtatatggagagagctaaaggacttcaatgtagactgttacattggggaaaaacagatcaagaaacatagca

SEQ ID NO: 54259 - DNA, 360 bp, Homo sapiens
gcggcacgaggaaaattctgagctcacccggaaactaatgccctaaattaagattattcagcttctcaatttttaatagcaaaatggagacctgagtgtggataacttttagtatctgtgggggatcctggaaccaattccctgccaatatagaaggacaactgtctacagtacttgaagtattattaactacattcgccatgctgtatgttagatccccagaacatatttattctgcatatctaaaattttgatcattttacaaactttctattttttttgtcaattttctccagctagacacttgtgcaatacggctattatctgatctttgccttaaatgttgtgcttcttttccat

SEQ ID NO: 54260 - DNA, 458 bp, Homo sapiens
gggtgacgccagcgtcaccctttcttactccttggcactacggctaacaggacgcaatccctcaactacggctgcatcgttgagaatccacagacacacgaggtattgcactatgtggagaaacccagcacatttatcagtgacatcatcaactgcggcatctacctcttttctcctgaagccttgaagcctcttcgggatgtcttccagcgtaatcagcaggatgggcaattggaggactcaccaggcttgtggccaggggcaggtaccatccgcctagagcaggatgtgttcgtgcatctcactgatggtatctggagtcagatcaagtccgcaggttcagccctctacgcctccgctctacctgagccgataccaggacactcacccagaacggctggcaagcacaccccagggggcccatggatccgagggaatgtgtacatccacccgaccgc

SEQ ID NO: 54261 - DNA, 336 bp, Homo sapiens
ggtagcctaggagcaataggctataccatagagcctcgacgtggtgtaggccacgccatctaggtttgtgtaagtaaattctatgatgtttacacagcaacgaaattgcctaacaagacatttctcagagcgacacatgactgtgtgtctaaagcagttttatcatacaaagtagtggctcgtaagagggttaggaaattttagttacttgtagatgttaaaatatatactgctggccgagcgcggtggctcatgcctgtaatcccagcactttgggaggccgaggcgggtggatcacaaggtcaggagatcacgaccatcctggctaacacggtg

SEQ ID NO: 54262 - DNA, 380 bp, Homo sapiens
aaaagagatctctcgaggatccgaattcgcggccgtgtcgacctcaatagaggtgtccctcctcaccccattccggagctcaactccgatctaaacacacatgccatctatctccaattcctctcctgtggggagggggaggctgagccatactttttggactttttttgtggaaaatatcattggcaaatttgctttgggtctgtatcaccaattctccatgaactctttcaagaagttttaggtagctgttttttgcttgtttgttttctgttggtgctgccaaacaatttccccctttatacccttgctctgccaaccttgaccaaaggaaagcgatgtcatcatccacagtggataaatttctggagtttcgatgg

SEQ ID NO: 54263 - DNA, 812 bp, Homo sapiens
  misc_feature (1)...(812): n = a,t,c or g
gctcgacactttgggtcctcaggaatgacattacatgaacgctttactaaatacctaaagagaggaactgagcaggaggcagccaaaaacaagaaaagcccagagatacacaggagaatagacatttcccccagtacattcagaaaacatggtttggctcatgatgaaatgaaaagtccccgggaacctggctacaaggctgagggaaaatacaaagatgatcctgttgatctccgccttgatattgaacgtcgtaaaanacataaggagagagatcttaaacgaggtaaatcgagagaatcagtggattcccgagactccagtcactcaagggaaaggtcagctgaaaaaacagagaaaactcataaaggatcaaagaaacagaagaagcatcggagagcaagagacaggtccagatcctcctcctcttcctcccagtcatctcactcctacaaagcagaagagtacactgaagagacagaggaaagagaggagagcaccacgggctttgacaaatcaagactggggaccaaagactttgtgggtccaagtgaaagaggaggtggcagagctcgaggaaccttttttcgagccagaggaagaggctggggcagaggcaactactctgggaacaataacaacaacagcaacaacgattttcaaaaaagaaaccgggaagaggagtgggacccagagtacacacccaaaagcatgtgaataaactttgaagtgttcacctcagaaaaaaaaaangaanaannaaagacanntannattgggngggggcncgtttatgnnntcccnggnnggga

SEQ ID NO: 54264 - DNA, 813 bp, Homo sapiens
  misc_feature (1)...(813): n = a,t,c or g
gacatttcatataagtgaactcatacagtatgtgattctttgagtctggcttctttcacttagcataagtttccaaggctcatccacattgtagcatgtgtcagaattttattccttttttattgctgagagtttgtatttttccaataaaattattttatcttttccttttttttccttcttcagaatcccaaaattcttctcctagatgaagcaaccaggtgaggatatcttaataatatatgccattgtgtgtattaaaccaaattcttccttcaccaaaacacttttaattctgtacctcaaagtgatacaactgaaaatcctttttcccccctttactctaaagtgaaggaagctgaattaataatgacagttgaaaaccagtgggcagactgagtcctagttgagagttctaggtccacttcagacatggttgccatcaatcctaatcactctgtaagctgtaactgtgcagaatgcttttctccttacatcacagtatagttttatggagatcagaaagtcctaaacagttgaaattttgatcatggtaaaaattcattgctcaggaagggctgctgtgtgtatcaggaagcacatgggtgtcactgacgtctttgctttcttgtgtgtgtgctcctgtgtcagtgcgctggatgccgaaaatgagtaccttgttcaagaagctctagatcgactgatggatggaagaacggtgttagttatttgcccntcgtctgtccaccattaagaatgctaanatggttgctgtttcttngaaccaagggaaaattgactgaatatgggaaa

SEQ ID NO: 54265 - DNA, 1225 bp, Homo sapiens
accgctatgacatgattacgaatttaatacgactcactatagggaatttggccctcgaggccaagaattcggcacgagatcgggagacaataacttggacaatccagaaagtcccttttagctctgaaatttcatgaaatatgttagttttagagtccatctggagattttcagtacattttgatctttaaaaaatgagtctggaattttcccaccggatcctttctgtgttggtcatcagcctcatcacactcagtgactctttcctttcctctcaacaaggaactattagtcttgatggccatgacatccgtcagctaaacccagtgtggctgagatccaaaattgggacagtgagtcaggaacccattttgttttcttgctctattgctgagaacattgcttatggtgctgatgacccttcctctgtgaccgctgaggaaatccagagagtggctgaagtggccaatgcagtggccttcatccggaatttcccccaagggttcaacactgtggttggagaaaagggtgttctcctctcaggtgggcagaaacagcggattgcgattgcccgtgctctgctaaagaatcccaaaattcttctcctagatgaagcaaccagtgcgctggatgccgaaaatgagtaccttgttcaagaagctctagatcgactgatgggatgggaagaacggtgttagttattgcccatcgtctgtccaccattaagaatgctaatatggttgctgttcttgaccaaggaaaaattactgaatatggaaaacatgaagagctgctttcaaaaccaaatgggatatacagaaaactaatgaacaaacaaagttttatttcagcataaggaagcaattactggtaaacaatatgagactttaatgcaaaacagtgttgcagaaaaaaaactcagagactatgaaatacataaaccatatatcaagttatttgaaaaatacctatttttttccaaagtgtgtaaaagattgttttgaaacgtacctgttctcaagatctttttattcagagttttaataattgtaactttttaaatgtctatagcactgaagttattttcaggttttgtattttcttttcttgtggaatattttaattaatatagcatggcacctcattttcttttgcctgctgttaaagattgaagctattgtcaaatgacaactttaaaaaggcaattataaataaaaagcctgat

SEQ ID NO: 54266 - DNA, 542 bp, Homo sapiens
agaaaaaaagaaaaattctaaaactttaagtgaaatttattatcccttcccacttattttctgtggttttgtgtgtatagagcatcttcctttgttacccaagtacctcgaatgggttggaaactggcggtagaaggttagagtagccaattgatatgtaaaccaagtgtcagatcagatgagatgaaagaggtggagtttaaagcaagtgagatatgataaacaatgatgaaagcaaaaatagggcagttgaaccagagtcagccagttggcataactgccaataaatgaggcagtgtagaataactaataatgattggaatcaaggaaaagagagcatagaggaatcagctaaattagtatgttttatccatagttacatgactaacaaatgattaaaaagaagttattctctagataattttttaaataaaagtactgttaatatataaactaagttattcattcactgtttttcttcacagtaagaatgacaaaaatctgtgttctttgtacttatcaagtgactcaaattttggccg

SEQ ID NO: 54267 - DNA, 1460 bp, Homo sapiens
ttttttttttttttcatttgaatatatatttatttagaatgcacactaacagcatgacgataaactgtcattcacaaacctgtaccaagaagcacgtaatctttaaaatgtgttgtttttcacaagtaatttaagtatagcattattattatttggtacttgagtcaaagacgacatttagattcttcagctttgaagcatttagtaacatcattgtctagtcaggcagaggaaagaaattcaaaagcactttctttttcttctgtcagttcctttgcagtaagatccatcttctcacgtgagaaatcattaatagggagaccttcaacaaacttccagggtcttattcttgattacaacagggaatgagtagagcagatcatcaggaacaccataggagttgccatccagagataacacccatggacacaaactctccctctggggttccaaacccagatgtccctgacgtggtcacagatggcttttgcagcagacatggcactggatagttttcgagccttgatgacagcagcgccacgctgctgcacagtcgtgacaaattctcccttgagccagctgtcatctttcagagcttcataaacaccaacttcctttccttgcaatttcaccttggcatggttgacatctggatactgagtcgaggaatggtttccccagataatgacattctttacatcattagcagtcacaccaagtttaagagcaatttgagctttagctcgggttgtgatccaaacgagtcaagcaactgaagttctccttggggatggatggagctgacctggaagcagtcaggcagttggtattggctggattacccacaacaataaccttaactgacttccttggcgtatttatcctaaggctgcacccctgggatttgaaagattttcaacatttgctttcaagtaaatcttttctctcccatgccttccccttcttggcatggagccccacaagaatggcccacatcccaggtctttgaaggcaacgtccttctttatctgttgcgatgacatctttcaggaggggaagggcacagtcttgcagttccattaggacaccgtcccaggacacccatcatgggggtgatatccaacagcacaagaattataggctgatctttaccaaagacagatccatttccaatactgtacagcagtgaatatgcaatttgaccagctgctccagtcacaaggactctgattggttcagactttgctggaaagtcctcaatgactttaaccaagtcttggcactgctgtgcaaagggcttatttatagagtcagctttcaggctagccagtagaaagctgggctgctgcaggtgagggaacgccatagcagcctccagtggagagttgaaaatggccttcttagcaaaccactgtgggatccatagcgtcgctcgcctcagagatggaagccgccattcc

SEQ ID NO: 54268 - DNA, 798 bp, Homo sapiens
gagcaggcccgggagccgggaggtgcgggcggcggcgctggacccgacgcggcgagagaggccccgagatgccgagcaagaagaagaagtacaacgcgcggttcccgccggcgcggatcaagaagatcatgcagacggacgaagagattgggaaggtggcggcggcggtgcctgtcatcatctcccgggcgctcgagctcttcctagagtcgctgttgaagaaggcctgccaggtgacccagtcgcggaacgcgaagaccatgaccacatcccacctgaagcagtgcatcgagctggagcagcagtttgacttcttgaaggacctggtggcatctgttcccgacatgcagggggacggggaagacaaccacatggatggggacaagcggcgcccgcaggggccggaagccaggcagcggcggccggaagaacggtgggatgggaacgaaaagcaaggacaagaagctgtccgggacagactcggagcaggaggatgaatctgaggacacagatactgatggggaagaggagacatcacaacccccaccccaggccagccacccctctgcccactttcagagccccccgacacccttcctgcccttcgcctctactctgcctttgcccccagcgcccccgggcccctcagcacctgatgaagaggacgaagaagattacgactcctagcgccttctgccccccagaccatagccccttttagttggttttagttgctctggggggaggagagaaggtagagctgttcttaaatttattaaaaaaaaaaattaaagggga

SEQ ID NO: 54269 - DNA, 2940 bp, Homo sapiens
  misc_feature (1)...(2940): n = a,t,c or g
ggcatcccccgcgtcgctaaggagcacgggctgtcggccagaccccgagttctcggtgcgctcacggccgccgacgctaggaggccgcgctccgcccccgctaccatgaggccccggaaagccttcctgctcctgctgctcttggggctggtgcagctgctggccgtggcgggtgccgagggcccggacgaggattcttctaacagagaaaatgccattgaggatgaagaggaggaggaggaggaagatgatgatgaggaagaagacgacttggaagttaaggaagaaaatggagtcttggtcctaaatgatgcaaactttgataattttgtggctgacaaagacacagtgctgctggagttttatgctccatggtgtggacattgcaagcagtttgctccggaatatgaaaaaattgccaacatattaaaggataaagatcctcccattcctgttgccaagatcgatgcaacctcagcgtctgtgctggccagcaggtttgatgtgagtggctaccccaccatcaagatccttaagaaggggcaggctgtagactacgagggctccagaacccaggaagaaattgttgccaaggtcagagaagtctcccagcccgactggacgcctccaccagaagtcacgcttgtgttgaccaaagagaactttgatgaagttgtgaatgatgcagatatcattctggtggagttttatgccccatggtgtggacactgcaagaaacttgcccccgagtatgagaaggccgccaaggagctcagcaagcgttctcctccaattcccctggcaaaggtcgacgccaccgcagaaacagacctggccaagaggtttgatgtctctggctatcccaccctgaaaattttccgcaaaggaaggccttatgactacaacggcccacgagaaaaatatggaatcgttgattacatgatcgagcagtccgggcctccctccaagggagattctgaccctgaagcaggtccaggagttcctgaaggatggagacgatgtcatcatcatcggggtctttaagggggagagtgacccagcctaccagcaataccaggatgccgctaacaacctgagagaagattacaaatttcaccacactttcagcacagaaatagcaaagttcttgaaagtctcccaggggcagttggttgtaatgcagcctgagaaattccagtccaagtatgagccccggagccacatgatggacgtccagggctccacccaggactcggccatcaaggacttcgtgcttgaagtacgccctgcccctggttggccaccgcaaggtgtcaaacgatgctaagcgctacaccagggcgccccctggtggtcgtctactacagtgtggacttcagctttgattacagagctgcaactcagttttggcggagcaaagtcctagaggtggccaaggacttccctgagtacacctttgccattgcggacgaagaggactatgctggggaggtgaaggacctggggctcagcgagagtggggaggatgtcaatgccgccatcctggacgagagtgggaagaagttcgccatggagccagaggagtttgactctgacaccctccgcgagtttgtcactgctttcaaaaaaggaaaactgaagccagtcatcaaatcccagccagtgcccaagaacaacaagggacccgtcaaggtcgtggtgggaaagacctttgactccattgtgatggaccccaagaaggacgtcctcatcgagttctacgcgccatggtgcgggcactgcaagcagctagagccccgtgtacaacagcctggccaagaagtacaagggccaaaagggcctggtcatcgccaagatggacgccactgccaacgacgtccccagcgaccgctataaggtggagggcttccccaccatctacttcgcccccagtggggacaaaaagaacccagttaaatttgagggtggagacagagatctggagcatttgagcaagtttatagaagaacatgccacaaaactgagcaggaccaaggaagagctttgaaggcctgaggtctgcggaaggtgggaggaggcagacgccctgcgtggccccatggtcggggcgtccacgccgaggccggcaacaaacgacagtatctcggattcctttttttttttttttaattttttatactttggtgtttcacttcatgctctgaatactgaataaccatgaatgactgaatagtttagtccagatttttacagaggatacatctatttttatcattatttggggtttgaaaaatttttttttacaccttctaatttctttatttctcaaagcagataattcttctgtgtgaaaatgttttctttttttaatttaaggtttaaaattcctttgccaaatcatgttgattttgnnnnnnnnnnnnnnnnnnnnnnnnnnnnnnnnnnnnnnnnnnnnnnnggctgggaccaaccgggtgagatccacaagtctctggatgtggctgaaggcaaatacacaattgaagtactttctgttttgaagtgctttcccttttgaatctggtttgaaacatgcagcttctgtctctagcccaaggaaagaccaaaacatagggaaataaaagcatttatctttgtcttggaagtaattgttgaagttgtgcagttgatcagtgcacagttagatgcaatgtttatagaaattgattgttaaaccaaatttacactggcatgtgtggtgtagtttctaaaaggcacttcacatttgaaatttttcttaccttagaaagtttctagtgatctaaatgtctagttttgtattcttttgtgtgtgttcactgtttctcagtattaccacttgaataattctctgtacaggggggtttgtgctatacactgggatgtctaattgcagcaataaagcctttctttaaaaaaaaa

SEQ ID NO: 54270 - DNA, 2655 bp, Homo sapiens
gctcttttctcgggacgggagaggccgtgtagcgtcgccgttactccgaggagataccagtcggtagaggagaagtcgaggttagagggaactgggaggcactttgctgtctgcaatcgaagttgagggtgcaaaaatgcagagtaataaaacttttaacttggagaagcaaaaccatactccaagaaagcatcatcaacatcaccaccagcagcagcaccaccagcagcaacagcagcagccgccaccaccgccaatacctgcaaatgggcaacaggccagcagccaaaatgaaggcttgactattgacctgaagaattttagaaaaccaggagagaagaccttcacccaacgaagccgtctttttgtgggaaatcttcctcccgacatcactgaggaaagaaatgaggaaactatttgagaaatatggaaaggcaggcgaagtcttcattcataaggataaaggatttggctttatccgcttggaaacccgaaccctagcggagattgccaaagtggagctggacaatatgccactccgtggaaagcagctgcgtgtgcgctttgcctgccatagtgcatcccttacagttcgaaaccttcctcagtatgtgtccaacgaactgctggaagaagccttttctgtgtttggccaggtagagagggctgtagtcattgtggatgatcgaggaaggccctcaggaaaaggcattgttgagttctcagggaagccagctgctcggaaagctctggacagatgcagtgaaggctccttcctgctaaccacatttcctcgtcctgtgactgtggagcccatggaccagttagatgatgaagagggacttccagagaagctggttataaaaaaccagcaatttcacaaggaacgagagcagccacccagatttgcacagcctggctcctttgagtatgaatatgccatgcgcctggaaggcactcattgagatggagaagcagcagcaggaccaagtggaccgcaacatcaaggaggctcgtgagaagctggagatggagatggaagctgcacgccatgagcaccaggtcatgctaatgagacaggatttgatgaggcgccaagaagaacttcggaggatggaagagctgcacaaccaagaggtgcaaaaacgaaagcaactggagctcaggcaggaggaagagcgcaggcgccgtgaagaagagatgcggcggcagcaagaagaaatgatgcggcgacagcaggaaggattcaagggaaccttccctgatgcgagagagcaggagattcggatgggtcagatggctatgggaggtgctatgggcataaacaacagaggtgccatgccccctgctcctgtgccagctggtaccccagctcctccaggacctgccactatgatgccggatggaactttgggattgaccccaccaacaactgaacgctttggtcaggctgctacaatggaaggaattggggcaattggtggaactcctcctgcattcaaccgtgcagctcctggagctgaatttgccccaaacaaacgtcgccgatactaataagttgcagtgtctagtttctcaaaacccttaaaagaaggaccctttttggactagccagaattctaccctggaaaagtgttagggattccttccaatagttagatctaccctgcctgtactactctagggagtatgctggaggcagagggcaagggaggggtggtattaaacaagtcaattctgtgtggtatattgtttaatcagttctgtgtggtgcattcctgaagtctctaatgtgactgttgagggcctggggaaaccatggcaaagtggatccagttagagcccattaatcttgatcattccggttttttttttttttgtccatcttgtttcatttgcttgccccgcccccgagacggagtcttactctgtcgcccaggctggagtgtagtggcatgatctcggctcactgcaatctctgcctcccgggttcaagcttgtccaggttgatcttgaactcctgacctcgtgatctacccacctcggcctcccaaaatgctgggattacaggggtgagccaccgtgcccaacctcacttgcttcttatccttacactcccccagccccagagaaactgccacatacaccacaaaaaccaaacatcccccaatgaccttagccccattgctccattcactcccaggtgagaattcaggcaaacgtccacaaaggtcacaggcagcgtacatacggttctgttataccccatatattaccccttcatgtcctaaagaagacattttctcttagagattttcattttagtgtatctttaaaaaaaaaatcttgtgttaacttgcctccatctttttcttggggtgaggacacccaggaatgacccttttgtgtctatgatgttgctgttcacagcttttcttgataggcctagtacaatcttgggaacagggttactgtatactgaaggtctgacagtagctcttagactcgcctatcttaggtagtcatgctgtgcatttttttttttcattggtgtactgtgtttgatttgtctcatatatttggagtttttctgaaaaatggagcagtaatgcagcatcaacctattaaaatacattttaagccttttaaaaaaaa

SEQ ID NO: 54271 - DNA, 539 bp, Homo sapiens
  misc_feature (1)...(539): n = a,t,c or g
ttgaatncctatttgaaaacnntatgactgattacgaatttaatacgactcactatagggaatttggccctcgaggccaagaattcggcacgaggcccaagacagatgccccagagctgtttatggcctcagctgcctcacttcctacaagagcagcctgtggcatctttgccttgggctgctcctcatggtgggttcaggggactcagccctgaggtgaaagggagctatcaggaacagctttgggagccccagggtcttccctacctcaggcaggaagggcaggaaggagagcctgctgcttggggtggggtagggctgactagaagggccagtcctgcctggccaggcagatctgtgccccatgcctgtccagcctgggcagccaggctgccaaggncanagtggcctggccaggngctcttcatcctncctntntcttntgntncacccttggcctgtctcatcccangggtcccagccactcctggctctntgntgtacatatttganactannnnntatttcttgggaaaatg

SEQ ID NO: 54272 - DNA, 2568 bp, Homo sapiens
cgcgcactccctttgcgtctcgggctcgcgcgcgttgcccgcaccggaagtgactgagcttgcaagttcccctgtctcttcaggggaaactgaggccggcttgttcgggagagacggcgcgacagtcagccaggtaggccggcagccaggtaggccggcccgggtccgcggcgcgaactcggccgcgaagagctcttgcgtctggaagctaccgggccgatgaagggggatgtggcccccacggctcgcggggctcgcagaatcttatcttggctttggatcttagaagagaatcactaaccagagacgagactcagtgagtgagcaggtgttttggacaatggactggttgagcccatccctattataaaaatgtctcagagcaaccgggagctggtggttgactttctctcctacaagctttcccagaaaggatacagctggagtcagtttagtgatgtggaagagaacaggactgaggccccagaagggactgaatcggagatggagacccccagtgccatcaatggcaacccatcctggcacctggcagacagccccgcggtgaatggagccactggccacagcagcagtttggatgcccgggaggtgatccccatggcagcagtaaagcaagcgctgagggaggcaggcgacgagtttgaactgcggtaccggcgggcattcagtgacctgacatcccagctccacatcaccccagggacagcatatcagagctttgaacaggtagtgaatgaactcttccgggatggggtaaactggggtcgcattgtggcctttttctccttcggcggggcactgtgcgtggaaagcgtagacaaggagatgcaggtattggtgagtcggatcgcagcttggatggccacttacctgaatgaccacctagagccttggatccaggagaacggcggctgggatacttttgtggaactctatgggaacaatgcagcagcccgagagcccgaaagggccaggaacgcttcaaccgctggttcctgacgggcatgactgtggccggcgtggttctgctgggctcactcttcagtcggaaatgaccagacactgaccatccactctaccctcccacccccttctctgctccaccacatcctccgtccagccgccattgccaccaggagaaccactacatgcagcccatgcccacctgcccatcacagggttgggcccagatctggtcccttgcagctagttttctagaatttatcacacttctgtgagacccccacacctcagttcccttggcctcagaattcacaaaatttccacaaaatctgtccaaaggaggctggcaggtatggaagggtttgtggctgggggcaggagggccctacctgattggtgcaacccttaccccttagcctccctgaaaatgtttttctgccagggagcttgaaagttttcagaacctcttccccagaaaggagactagattgcctttgttttgatgtttgtggcctcagaattgatcattttccccccactctccccacactaacctgggttccctttccttccatccctaccccctaagagccatttaggggccacttttgactagggattcaggctgcttgggataaagatgcaaggaccaggactccctcctcacctctggactggctagagtcctcactcccagtccaaatgtcctccagaagcctctggctagaggccagccccacccaggagggagggggctatagctacaggaagcaccccatgccaaagctagggtggcccttgcagttcagcaccaccctagtcccttcccctccctggctcccatgaccatactgagggaccaactgggcccaagacagatgccccagagctgtttatggcctcagctgcctcacttcctacaagagcagcctgtggcatctttgccttgggctgctcctcatggtgggttcaggggactcagccctgaggtgaaagggagctatcaggaacagctatgggagccccagggtcttccctacctcaggcaggaagggcaggaaggagagcctgctgcatggggtggggtagggctgactagaagggccagtcctgcctggccaggcagatctgtgccccatgcctgtccagcctgggcagccaggctgccaaggccagagtggcctggccaggagctcttcaggcctccctctctcttctgctccacccttggcctgtctcatccccaggggtcccagccaccccgggctctctgctgtacatatttgagactagtttttattccttgtgaagatgatatactatttttgttaagcgtgtctgtatttatgtgtgaggagctgctggcttgcagtgcgcgtgcacgtggagagctggtgcccggagattggacggcctgatgctccctcccctgccctggtccagggaagctggccgagggtcctggctcctgaggggcatctgcccctcccccaacccccaccccacacttgttccagctctttgaaatagtctgtgtgaaggtgaaagtgcagttcagtaataaactgtgtttactcagtgaac

SEQ ID NO: 54273 - DNA, 411 bp, Homo sapiens
ggaaagtgctgtggaaggacaaatggagaaaagtctccagaaattggcctcgtttgaaaggacctcatgcaaagagagatctttggagacatttcagaaaggtttttattcaaacatattcgcagcttgtatgacagtggaatgttttgaaatgagcttgattctgtttacccatccttcttaatccaacaactctgctggtctctctgctgacacaagatcgttcgcaggttatagaaggatttaacacgtcagcaacagggagctgccaccaccgtgtactgtgctgctgtcccagaactggagggtctgggagggatgtacttcaacaactgctgccgctgcatgccctcaccagaagctcagagcgaagagacggccggaccctgtgggcgctcagcgagaggctga

SEQ ID NO: 54274 - DNA, 252 bp, Homo sapiens
gctcgacctgaacactggcttgggggcccctgtgcgtgggacacccctttcttcctcccaggccctggcccatctcctccaggaagcttgagtgctcactgcagccaccggcctccctgtaagacagtgagttgtctgcgagctctgctctgagccctggcacatggagcgactcagttacacttaatcagctcttagaggcactggctgggcatggtggctcaacggctgtaatcccagcaactttgggag

SEQ ID NO: 54275 - DNA, 386 bp, Homo sapiens
cggggatagcccggggcccggtgtatggccacggagttacagtgtccggactccatgccctgtcacaaccagcaagtaaactctgcctcaaccccaagtcccgagcagctgcgacctggcgatctgatcctggaccacgcagggggaaacagagcctccagggccaaggtgattctcctcacggggtacgcccattctagcctgccggccgagctggactctggggcctgcggcggctccagcctcaactcagagggcaacagtggtagtggtgacagtagcagctatgacgcaccagctggcaactccttcctagaggactgcgaactctcccggcagatcggggcgcagcttaagctgctgcctatgaatgatcagatacggga

SEQ ID NO: 54276 - DNA, 377 bp, Homo sapiens
ggtgtctagtccagagcctagcacatagtagacagtcagtaacaatttgtggaagtaaaggaagaagtaaaatctcttctgttgggtaataagatgtacccaaaacaaagtgaaattaaacagtcattgccctctacattaattcataacagtttcttttaagagctttggggccttcgttacatgcttaaagttccctgtgtgtgtgcagatgcaggtacacacatagcgcacacactcagaacaaaaccaccctcattctttattctatccctttcatctacaggcatttaatacagaaaattcagcttaccttagtggaagagtgttgatactgattgtgatccctggcatttccagagtagtttcagtgaaca

SEQ ID NO: 54277 - DNA, 392 bp, Homo sapiens; identical to SEQ ID NO: 42536

SEQ ID NO: 54278 - DNA, 1773 bp, Homo sapiens
tcccgaatcagtgggtggaggcaaaacccttcagcaagaagagaagcaacttcagccgtgtatgcaaatggataaccggttgcctcccaaaaaagttccaggtttctgttcctttcgctatggattgtctttccttgtgcactgttgtaatgttataataacagcacagcgtgcgtgcctgaacctcacaatggtagtcatggtgaatagcacagatccacatggtttgcccaacacctccacaaagaagctcctggataatataaagaaccctatgtataattggagcccagatatccagggaatcatcttgagttccacctcctatggtgtcatcatcatccaagttcctgttggatacttctctggaatatattctacaaagaaaatgattggctttgcattatgcctcagctctgtgttaagcctgctcatcccaccagcagctggaattggagtagcttgggtcgttgtatgtcgagcagttcagggagcagcccaggggatagttgcaacagcccagtttgaaatatatgtcaaatgggctcctcccctggaacgaggccgacttacttctatgagtacatcagggtttttgctgggaccctttattgtcctacttgtgactggagttatctgtgaatctctgggctggcccatggtcttctatatttttggtgcttgttgctgtgccgtatgtcttctctggttcgttctgttttatgatgaccccaaagaccacccatgtataagcatcggtgaaaaggaatacatcacatcctccctggtccagcaggtcagttcaagtagacaatctctgcctatcaaggctatacttaagtcgcttccagtctgggctatttccattggtagttttacgtttttctggtcacataacatcatgacactatacactccaatgtttatcaactccatgcttcatgttaatataaaagagaatgggttcttgtcttcccttccctatttgtttgcctggatctgtggtaacctagcaggtcagttatcagacttcttcctgaccaggaatattctcagcgtaattgctgtccggaaactcttcacagcagcaggatttctccttcctgcaatctttggtgtctgcctgccttacctgagttccaccttctacagcattgtcattttcctaatacttgctggtgcaacaggcagcttttgcttgggtggagtgtttataaatggcttggatattgctcccagatattttggatttattaaagcatgttcaactttaactggaatgataggaggactaattgcttccactttgactggattgatccttaagcaggatccggaatccgcctggtttaaaaccttcatcctgatggcagccattaatgtgactggcctaattttctaccttatagttgctacagcagaaattcaggactgggctaaagaaaaacaacacacacgtctctgaagtgtgaaacagagcacttgcagagcctgggacaacctccttattgaagggaagagggaccagcacatgaggctgaggctgaggggcagtcaccagcaccaggaagaaggtggtaggaggagtcctaggggccggttttaccctcccacatatcctgtgtgcatcgttttttaacatgtgttgtttgtaacatgtaatatatctgaattttaaatgggggtggtgatttatctcagtcttcctctctgcatcagttgctttataaatgattgtcaaaccaataaatacacacaagataaaattttaaa

SEQ ID NO: 54279 - DNA, 1044 bp, Homo sapiens
tgaagggtttatgtgcaaagtgaaaacaaattttgaaaaataagacaaatccattctcttcttcaattcagtctaatatgcattgtagtgtcttttaatcagtcttatcctctaagtcaacttcattttcctctttgtgaatacccatagcaatatgtaagattttattgaagtttcctgtgataactgaggaacactttgctatgcctcactgcccaatagggtgggtcatcaattaggagaaatcccaaattataaaagccaacatatgccgtgacctacgtaggaaaagatgtatttgtgcatcttctttctgggtagttaaaaattactccctcttttctctagcattttgacatttcagactcaatgctctgatctctagggagtgtgattattcaaactaatgagaggacaagaggacacagttttagaatctactgctgctaaagcacattaaaaacaaatcctggtttttaatgtatgcatagtttcatatttaatgaatatgctttcattaaatagggaggtagatttgaaaaaactgttataaagaaatgtgccctttttggggaatgaatactttggttcatgtctagcccactgggaattttgttttcaccttatactgagtcctttttctaatgtaaaaatatttcttccaagtttgatttctgtatcagggtaacattgagaacacacatatttctgtttgaggatttgtgacttcctatggaaacagtcttgcatctatgtatttacaaatgaaatttaaagtattcttaaagctttgccttaaatactgcttgcatactgatttacttaatgctaagcatggcaggggttataaatttaaatactataagacctggctgaatcccagatgtatcaataaattgttatagtagcttatggaaaatgctattaaagataaattttcatacattgtatttttagtcaagtaaaatatggatgaaaattaataaagtactgtcaagggaaaaaatatgtataaccttgtaagtgatttttctcccctttatt

SEQ ID NO: 54280 - DNA, 539 bp, Homo sapiens
gttggaattctttggtgtaaataaacgtttggttttatttatcaaggttagatttaagttccctgtgtaaaggtcttgctgggtgggtgtctcatgttcacatctgaggggcctgcagccctgtaccgtggaggcttcccaaggcccccattttatacacccctcgttcgacccatggtaccgggcagagcagagaggccttaaaaaaaaagcaccacaagccaaagcgtctctggggattaaggatcctttgccataaaactcattttgtgtctcagcagtgcagggattggggatggaaaaagtcgccagtttttgtgtgtttgtgtgtgtgtgtaaagtggactttccactgtaatccaaccacctaagtttatcaggtgcttcactgaggaagcctagtttttttaagcacaatagcaaaaccatcagctctgtattttctcctgttatttcattacagtagctgcttgtgggaactaggaaaaattcttccaacatattttaaggcctaaaatcttagttccccattctcctac

SEQ ID NO: 54281 - DNA, 821 bp, Homo sapiens
gggagaaccaggagcaacgggttccccaggagaaccaggatacatgggtttaccgggattcaaggaaaaaagggggacaaaggaaatcaaggtgaaaaaggtattcagggtcaaaagggagaaaatggaagacagggaattccagggcaacagggaattcaaggccatcatggtgcaaaaggagagagaggtgaaaagggagaacctggtgtccgaggtgccattggatcaaaaggagaatctggggtggatggcttgatggggcccgcaggtcctaaggggcaacctggggatccaggtcctcagggacccccaggtttggatgggaagcccggaagagagttttcagaacaatttattcgacaagtttgcacagatgtaataagagcccagctaccagtcttacttcagagtggaagaattagaaattgtgatcattgcctgtcccaacatggctccccgggtattcctgggccacctggtccgataggcccagagggtcccagaggattacctggtttgccaggaagagatggtgttcctggattagtgggtgtccctggacgtccaggtgtcagaggattaaaaggcctaccaggaagaaatggggaaaaagggagccaagggtttgggtatcctggagaacaaggtcctcctggtcccccaggtccagagggccctcctggaataagcaaagaaggtcctccaggagacccaggtctccctggcaaagatggagaccatggaaaacctggaatccaagggcaaccaggccccccaggcatctgcgacccatcactatgttttagtgtaattgccag

SEQ ID NO: 54282 - DNA, 936 bp, Homo sapiens
  misc_feature (1)...(936): n = a,t,c or g
ttttttttttttcaggcctgtacaaaactttattatactctgaataacaagcatgtaacaaaattttgagcatgacaaggatgaaatatttcaaattctgtttcttacaaaagcattaagcacaatacacaaagactgttcataatattttacagtcagctaaaaataacaagacattctaggatttcaggagttttccttttctttcaactagagcattagctttatttccattagctttgctacaatgaaaattaacatatatggacatacacatataagtgaaatggaaaatgaaggcatacaacaaacattccgattaatcaacaagtataaaatagtcttttagtacttccaaacttacattttctttgaatgtacaatgaaactttttgtctaaaatgtttttaatgttaattttgaccattcccaaagtaattaatactctttcttagcaccaccattaatctaattttagagtttgaaatgaattaagaaacactctaatcttattcagaggtgctattcacaacaccgaacaacaggcaatccactgccccttatcaaggctgagacactgtagtaaatgagtagttcaccaatactgtctatcccaggtgaatatcagccctgatcttacttccaatgatgagatacatgttttggcttatgtagtagcatgagctatgagataggaaacatgaaagtcacatggacatgaaattaaactcaaatctctactgcatggaggctgaatgtgaaatatttcacagtgactaaaactgactggctaacaggcaatggtggatttttatattcaactttgattaacataaatggactttacaagaaacccttgagatttaattaatgctgctaatccaagggctccaaatgactgaggagcctttaaaatcantatatgtgatcttttat

SEQ ID NO: 54283 - DNA, 609 bp, Homo sapiens
ctttaaaacagaatggactgttagggaaaggctgccctgggccatgcaggccgaggagaccaaggggattggaataaccagtatggcaaaatgcttggtcaagatccagactcgacgaagcctccaattgcacatggtgaaccactgcaacagtaatgtgtttgttcgtctgctgagactcggctccaaggtcacagctcgtaacactggtgttccattgcctaaagaggagaacatttctgctcccttgatctccagctccccagtgaaggcagcccgggagtatgaagatccccctagtgaagaggaagataaaataaaagaagaacctttaaccatctctgaactagtgtacaacccaagtgccagcctgctccccacccctgtggatgacgatgagattgacatgctctttgactgtccttctaggcttgagttggaaagagaagacacagattcatttgaggatctggaagcagatgaaaacgcctttttgattgctgaagaagaggagctgaaggaggctcgccgtgctttgtcgtggagctacgacattctgactggccatattcgggtgaacccactggtcaagagtttttccaggctcct

SEQ ID NO: 54284 - DNA, 353 bp, Homo sapiens
  misc_feature (1)...(353): n = a,t,c or g
gcttgatttcctgatctcaggtgatttgcccaccttggcctcccaaagtgctgggattataggcatgagccaccacgcccagccatttctcattgttaacacaaaggtaaaagcccttctgtactaatgaatctaagagtattgaatagtaagaatcaccaaaacttgatttctttctttctttttttttttttnaaatngaggcaaantntngntntgtnncccaggntgnagngcaggggccnaaccngggntaanngaancctccgcntacnggtttnaagggatccncnttcctgagccncctganaacntggnattncnggcccatgccacaaccccannttactttt

SEQ ID NO: 54285 - DNA, 4084 bp, Homo sapiens
  misc_feature (1)...(4084): n = a,t,c or g
ttttttttttttttgcttcatcagttttattggtcatatatccagaattcatcatatataaatctttcaaaataatgagctattacaagaatagtttacaagtcagctctgactgcacaaatacttgacacaggaaaccatttttacaaatacatatgttttcttataatactgtaataaagaaaataagtctgtatacatcctacgacaaattttgtagtctctttttcccattcaatcatcgtttcaggttttctattacagaacgtccatcacatccaataaaccaaattacaatctgctgcttcttctcattttcaaatactataaagattcacactgttaaagggttttttgggttccttttctaatctttcctgatttgaaaagaatccatgtatctaggctaaaagaggtaacttcaacaatatccctcttgactagaacttctatctgattaatcattgtttggtgaattatcttttcacttcctacttaggctaggccaggtggtagttttacccctgctgataaagtcctgacattcctaatagttcctaaactgcaaataaaaaaccctagaaacgagtgaaatagaaagaagctaaaccactattgattagagaacacactcaaattcagggtctctcccaggttgaagaagacagaaaagcaataaagtataaggatgtggcagtagttgtataaaatactgaaaatctgaaagagtcatcacttaagccagtagtgtatcatttccaaaatgtcagaggatacagaatcttagactctgtggctaggctgaactcagaatctcagactctgtggctaggctgacattcttatgctgtggctttgaaatagcctaataaatatccacttgcccagagcaagtaatcatttaggccaggggaactttacagaatactgaccatgtttgcctgaagagataggaaccaccagggcaaacatttggtattcactccacttcactgttactgaaaagcatccacttggcaaagcctgttgttttacttttcaggtgatgtgaattaaaattaagaaactagcagtattctactacagtcaagttcctgagtactcagctccaattatctaatattcttgaaaggatgctgatatggtttggctatgtccccactgaaattgcaacttgaatttatcttctggaattcccacatgttgtgtgagggacccagggggaggtaattgaatcaggggggccagtctttcctgtgctattctcatgatagtgaataagtctcacgagatctgatgggtttatcaggggtttccacttttgcttcttcctcattttctcttgctgccaccatgtaagaagtgcctttgcctcctgccatgattctgaggcctccccagccatgtggaactgtaagtccaattaaacctctttttcttcccagtctcaggtatgtctttatcagcagcgtgaaaacaaacaatacagtaaattggtatgaatagagtggggcatggctgaaaagatacccnnnnnnnnnnnnnnnnnnnnnnnnnnnnnnnnnnnnnnnnnnnnnnnnnnnnnnnnnnnnnnnnnnnnnnnnnnnnnnnnnnnnnnnnnnnnnnnnnnnnnnnnnnnnnnnnnnnnnnnnnnncccnnnnnnnnnnnnnnnnnnnnnnnnnnnnnnnnnnnnnnnnnnnnnnnnnnnnnnnnnnnnnnnnnnnnnnnnnnnnnnnnnnnnnnnnnnnctgttgttagtgtttagcaagagactgcgacatttgccccttcannnnnnnnnnnnnnnnnnnnnnnnnnnnnnnnnnnnnnnnnnnnnnnnnnnnnnnnnnnnnnnnnnnnnnnnnnnnnnnnnnnnnnnnnnnnnnnnnnnnnnnnnnnnnnnnccttataaataagggaagcaaagcataaaagtttggnnnnnnnnnnnnnnnnnnnnnnnnnnnnnnnnnnnnnnnnnnnnnnnnnnnnnnnnnnnnnnnnnnnnnnnnnnnnnnnnnnnnnnnnnnnnnnnnnnnnnnnnnnnnnnnnnnnnnnnnnnnnnnnnnnnnnnnnnnnnnnnnnggcagcccctgacatgnnnnnnnnnnnnnnnnnnnnnnnnnnnnnnnnnnnnnnnnnnnagnnnnnnnnnnnnnnnnnnnnnnnnnnnnnnnnnnnnnnnnnnnnnntggaagccccaagccttggcagcttctatgtgctgttaaannnnnnnnnnnnnnnnnnnnnnnnnnnnnnnnnnnnnnnnnnnnnnnnnnnnnnnnnnnnnnnnnnnnnnnnnnnnnnnnnnnnnnnnnnnnnnnnnnnnnnnnnnnnnnnnnnntcagcggcaggggnnnnnnnnnnnnnnnnnnnnnnnnnnnnnnnnnnnnnnnnnnnnnnnnnnnnnnnngagtccctactgggcattcctagtggagctgtgagaagnnnnnnnnnnnnnnnnnnnnnnnnnnnnnnnnnnnnnnnnagcttgcaccgtgcacctggaaaacgcaggcactgaacaacagnnnnnnnnnnnnnnnnnnnnnnnnnnnnnnnnnnnnnnnnnnnnnnnnnnnnnnnnnnnnnnnnnnnnnnnnnnnnnnnnnnnnnnnnnnnnnnnnnnnnnnnnnnnnnnnnnnnnnnnnnnnnnnnnnnnnnnnnnnnnnnnnnnnnnnnnnnnnnnnnnnnnnnnnnnnnnnnnnnnnnnnnnnnnnnnnnnnnnnnnnnnnnnnnnnnnnnnnnnnnnnnnnnnnnnnnnnnnnnnnnnnnnnnnnnnnnnnnnnnnnnnnnnnnnnnnnnnnnnnnnnnnnnnnnnnnnnnnnnnnnnnnnnnnnnnnnnnnnnnnnnnnnnnnnnnnnnnnnnnnnnnnncnnnnnnnnnnnnnnnnnnnnnnnnnnnnnnnaattttaggaaggaataattggttttaaaaattgggaaattaaatttggaaggggccaggtagatgatatgttggtatgtccaccaaatctcaacttgaaattgtatctacagaattccacgtgttgtgggagagaccaaggggaggtaattgaatcatgggccannnnnnnnnnnnnnnnnnnnnnnnnnnnnnnnnnnnnnnnnnnnnnnnnnnnncttatcaggggtttccacttttgcttcttcctcattttctcttgctgccatgtaagaagtgcctttcaacttccggcatgatttgaggcctcccagccatgtggaactgtaagtccaagtaaacctctttttcttnnnnnnnnnnnnnnnnnnnnnnnnnnnnnnnnnnnnnnnnnnnnnnnnngatgctgaagaagcccttgtccaataaggtatttaatagcacttagggactattagatgtcccatttctcttctctttcatttctcttatctcttctcaccccagtgtaacgaatcgctacaggtttttaccaaaatgctgcagcagtagttggaaatgagttattttgcattactaaagtgttcaatcacattatcacgggtcacatttgtatataaccaggagatggccaaataacatctactgcagtgattttgcaaattcagcatagtcaatgtatccatcattgttcttgtcatcatctctcaaaacaccatctattatgttaatcagttcatcttcactcattagtggtgcctgttcactcccttcctccttatggacatgagtgatggctgtggagagttctaagccatcaagcaaattattgccatcataatcatgcattttgaagtaatggagctgcaattcttgtggcgacatctccgcctctggtttgttgatgacaccttctagatgctccatgatatgctcttggtcgtgcactgtgttcttatccaggcccatgctgccgggttgggagaagctggctgcaggctcctcagccctggcgcctggggcacaaaaggcccagagcaggccacacaggaagggggttctgagcagggatctcatggtcatcaatatccttacggtctccgaagcagacgcgaagccctccaacgtgagcctcaccagcccccgtccccaaaacgctcttcctcggc

SEQ ID NO: 54286 - DNA, 2929 bp, Homo sapiens
cttcaccaaacacacttgagaactgtaacttcgtcaagcactttctgtcctgaagcttttaccagtatctgctgtcttttgtaattatgcatcctagctaaggcacagaagactgaatgaatgcaaggattcattaactctttgaatttgttaaatactaacagttaaccattagaagtggttcaatgatgtaagagtcacactgcttcaactttttctttgttgtagtttttaaattgtcgatttttagctatttgacagattaaaagcaaaataatcatgccatatttagtcctggagttcaagtctaaatgttgatgtgaaaaattattgtagtaaacttttaatatgggcaaagcaaccttaagctctattttagccaaatgaaacataatctgaaattatattagaacatttcccttgtcttcaaactgtttggtgtaacagaatattgatatgcagcttggtggatttcaccagttaatgcacattcttcttccctcctccccccattaatatgtatactgaaaaatgtgcatttgtctgaggaattattttgtttgctaccacttaatgaatctcaaaattttgagtaaatgtacctcagtctaatcagactttttatgacctttataactacatttaaaacccttaattcctatttctgggtgtttgcgagcctgattgctatcatgaagtaaaaatttattactctaggtattcactagctaaataaacatagttcttgtttagcaagcatatgttgttcctcagctcttttctccagcttttgcagtgtcctggcatccttaaaatactttgaaaatatggccttgatccatggattaaatcagtatctaagtgaatgtgttgatgttttattgatcagatctatataagtgggaatacagcatatatctggatattcttatagttatctttttaacatcttatttttttcattaattacatatcaacattaattttgtatcttgaagcaaattgattttgtataattaaatgtgtcaagcatctgtattaattgatttgatggcataaggttatgaaaataatgtactgccccatgtattactgttccaaaaggagaaagctatgtagaaagatacattaagggtgaaaatagcaatacagtagatttgaataccttgatgtcttgcattacttcatttatgtgtacatcatgtttagaaatgttttcatttactgtggtctttggtcacttcagctcaaagacctagtgatggatatttctttgaggctttcatttatataattttattttgtacaatgttttttttaaatgtgcaaatactgtattcaagtgaaaaaaatacagtatttgtagataaccatagctactacacagttcttcggtagtcccagtgtagttatatcagtgtttactgaagggaacatcaaaatattaatggtatattataaaataaagactttcttaaaggaaaattgcacctattttacctttttaagagtaagccatgaaatcttgtaacatgtctcttaactatttataatgaaaagtggcatttgggtatagtcaccacagcaatgttctacatccctaagattatctaggtaggacatgtcaaagatgactgttgtcattctggaggtcctattagagaatattataaaagggtgaccttgtaggaaggatctgagtcctccccctgaggttctctttttcttggtgctttattagcaactctggatatttttataaaactagttacattataaacggtttcaaacatgtttaatttacattaggtttttatgtaagagtgtcatggaagcactcagcaagcaggctgattgcaatagactcagacatgcgaataaatgtaattgagagtctattcatggtgaggagtacatcccagtgcctttaacctggatttctaatcttaagtgaaatgggtgcagcattcctttggaaaaaaaaatctttttattttcaagtgataattttgtgtttttctcatataagttttctccagagcacccaccttctcttccttcttggtctgtcattatattgcaaaatatttttcctctgaatgaaattatcacaggttgtctcaagcacaaccaactgaatgtctcttaactgtggggaccaaaagggagagagcctggggtctacaagaggagacacatcatcaaatgtttgaatgatcacaaattaagacattatcagcccagtaaatttcttgcttaatgtttttccaagttctggcttgaatatttcttattaaagctatcttatgtgggtattttattttgaaaggtattatagtttgtatatttaacagtaaggaggaaactgtaaccaaaattagtatttctctatacgtattggtacttgaagattcctttcaaaagaaatccagcgttttcctaattttagtacttaatttctctttttaatttaagtgatctttctaattcgaaagctgtgttctttttgaataccgtgcatgggggttaagctgatgttaaaacagtttgcaataaaaaaaaatgaatcagcttaagtcatttaatcatttcaagtgcattctgcatcctttaaaaataagtttaagaaatttaagagaattgtgttttcattaagttttgcatatcttttgttatgccatgtaaattccctttttcgtatgattaaaggaaggttatgataaaatgattagttcatttacattcacttgtagcaattacatgagaatttgaattttgtcgtgtttgggtttgttcattcctgtgaatgatggtacagttaggtgagattttctgttatggtacccaaactcaccatttggtcctctttaatctttgagggtttcaataaaaattgttcactcataaaagaaaaaaaaaaaagtcgacg

SEQ ID NO: 54287 - DNA, 465 bp, Homo sapiens
cggacgcgtgggcggacgcgtggggatcatttctatagtgtgttactagagaagtttctctgaacgtgtagagcaccgaaaaccacgaggaagagaggtagcgttttctcctgagcgtgaagccggctttctggcgttgcttggctgcaactgccgtcagccattgatgatcgttcttctctccgtattggggagtgagagggagagaacgcggtctgagtggtttttccttcttgatggctcaatgacagagactagctcgtaaactccgggccgtttccgggctgttcgctcctgcttggcaatgtcgcgagaaaggttttcgcctcctgtttcagcggtgacggctcttgggttttctcggggtggctttttaattttagtcttggcgcgaggcggggaatgctgtgtggcacctcctattgtctctttttgcgttttctcccattctcgctcccgtcgacg

SEQ ID NO: 54288 - DNA, 710 bp, Homo sapiens
  misc_feature (1)...(710): n = a,t,c or g
ggagttcatccggtccactccatactcggcatacgacccagagacgtacacaggccactggaagcagctgactgtgcgcaccagccgccgccaccaggccatggccattgcctacttccacccccagaagctgagccctgaggagctggcagagctgaagacctccctagcgcagcacttcacagcagggccaggcagggccagtggagtgacctgcctctactttgtggaggagggacagcgaaagactcctagccaggagggcctgcccctggagcatgtggctggggaccggtgcatccacgaggacctgctagggctgaccttccggatctctccacacgccttcttccaggtgaacacacccgcagccgaggtgctctacacagtcatccaggactgggcccaattggatgcggggagcatggtgctggacgtgtgctgtggcaccggcaccattggcctggccctggccgggtgagccctcctgccctgctgagggcaccctctccccaccccaagacccccattgaccccagctcaaagtcaccacagctgactccatcatgccccaggcccagctcctctttgctgccacagggccccatgtactcccctcctgggtggggcgacaccacgctttctgtttcanaagnaaagagggtcattggggcgagctatcccanaggctgnggangacnccggtgaac

SEQ ID NO: 54289 - DNA, 432 bp, Homo sapiens
  misc_feature (1)...(432): n = a,t,c or g
ggtttcaaatatgcatatattatgagtagtgttctgagcaagacagaaaaattaccaaaaataaatgcatgtaagcttagccttttattagtagggctgattgtttaagaaaccactttgttagcaccaggcacagtgacttgagcctgtaatcccagctcctcagggggctgggcagaaagattggctcacttgaagccacgagttcaagaccagcctgggcaacataacaagacccccatctcttaaagtatatatattttttaattagcaggatggtngggtgcacacctggattgcttcaacccaggaattcaaggctgcagtcagctatgatcgtaccactgcactccagtctgggcaacagagcangactccatctcttaaacaaacanaaaactgctttgctaaatgaaagctgnnntgattcca

SEQ ID NO: 54290 - DNA, 347 bp, Homo sapiens
gacatttcacatgaatatatcaaacttttcattcaaatctgcagtttttattttgcttatttttaaaaagtagagtctaatgagtctaatcttagaaggctgtgtggtagtttgcgaactgtttgagtggaacctttatgatgtcttaagaagtctcggacctgcttggtgtccactcatccaaggcttcctgtcagatattccagctgacagctcgcgctgaagctcaggctctggtgttgctaaccttccccacacctggccagaaagaagtcctgcttaaggcagtggacacggcacagctttgtgcttgacaaggggccttttgactgagcgctgctcacttc

SEQ ID NO: 54291 - DNA, 423 bp, Homo sapiens
ggaacatccgtcgagcagtggttcggctcctcgatcgaagcccaaagaccgtggtggtcatccggacggccaacgcccaagagctgggacctgaggtgagccttttcaacagcgactggtacaactttcagctggacaccatccttcggaggatgttctcaggggttggagtatatctcgtcgatgcctgggagatgaccctggcccattatctaccgcacaagctgcatccagatgaagttattgtgaagaaccagctggacatgttcttgtcctttgtgtgccccttggaaacctagcctgtcttggaagggactggaggaatcatattcaatgaccttctcaattgacctgagttacagaaagtggccccagtgagagatgactgccttaataagtataaaatttcaaaaagatctggac

SEQ ID NO: 54292 - DNA, 421 bp, Homo sapiens
gcgagaacatctgcctcctgcagacgttctccctctgcctcaccgctgtgttcctgctgcagctggccgctgggatcctgggcttcgtcttctcagacaaggctcgagggaaagtgagtgagatcatcaacaatgccattgtgcactaccgagatgacttggatctgcagaacctcattgattttggccagaaaaagtttagctgctgtggagggatttcctacaaggactggtctcagaacatgtatttcaactgctcagaagacaaccccagtcgagagcgctgctctgtgccttactcctgttgcttgcctactcctgaccagctggtgggaattctgctgtcccagatcctagtgaatcagatcaaagatcagatcaagctacagctctacaaccagcagcaccgggctgacccatg

SEQ ID NO: 54293 - DNA, 844 bp, Homo sapiens
cggaaaactgatcacatggagagaactgcaagtgtccttcgacgggagattgtggcagcagctaaggtgtgtggagctgccagtgagtcaccgtcagtgaagagcctccgcttgcttgttgctgatcaagacttttcctttaaagctggccagtgggttgatttctttattccaggagtctctgtggttggtgggttttcaatatgctccagtcccagactgctagaacaagagagagtgatagaattggcagtgaaatatacgaaccaccctcctgccctctgggttcacaatacgtgtacacttgactgtgaagtggctgtgagagtgggtggagagttcttctttgaccctcagcctgcggatgcctctagaaacctcgtgttgattgcaggaggagtcggaattaaccctctgctttccatcctgcggcacgcagcagcatctcctcagagagcaggcaaacaaaagaaatggatatgagataggaacaataaaactattctacagtgcaaaaaataccagcgaactcctgtttaagaaaaatatccttgatttagtaaatgaatttcctgagaagattgcatgcagtttgcatgttacaaaacagactacacaaatcaatgcggaactcaagccatacatcacggaaggaagaataacggagaaggagataagagatcatatttcaaaagagactttgttctatatttgtggcccacctccaatgacagactttttctccaagcaactggaaaacaaccatgtacccaaagaacacatttgctttgagaagtggtggtaggaggcagacaaaggcagaaaaaataaagaggtgagatct

SEQ ID NO: 54294 - DNA, 128 bp, Homo sapiens
cgcctctctaaaaaattcaagaaatttctctgtgtgacttcaaaaggacttggtgagggggagaacaaagattcagtacttagtacttgagatttgtgaggtacaaagtaattctgaggttatacaga

SEQ ID NO: 54295 - DNA, 1427 bp, Homo sapiens
gccacaagggcatagtgcagttcacttacgtgttgatgtagtttataatcagacgccttttctcttctgcaaaaggtactgttaagtaaaccagattttctaaataggcattcttaaaatttcagacttacaaagctagtagtagaattttattgaaaggcctaggtattaattttttaaatgagtgctttaacttaaaacaggcgtttggaatagctgctgcaatgtagtcttgtgtgtgatttttttttaagttgatgtgcagtctaattgttgtttcataaaagttggatctgttcctatgcccaggatgattttgtgaaccgtgaagtacgtgagactagaagacgcccaaacaagtcagataatagtaactacaatggttgctgatgttgagattattgttgaactataattaataatttggatggcagaatttatctcttttttgtaaactctcataactgaattgcttaagtataatttataaaatttcagtgcagttcattcttaatggaaaatctgaaacctaaattgcagatttaaaaggtactgtacaaccattatatctgtaaataacttagcacctttttgtcacttagaataatatgtactactacttgagtgagcgcttttggaagttatatcaagttctagtgtttgcttcttagtaactgaactgaatttacagttctgtcctagacattttgcactaaagtagccgaatccactctcatgtcttttcgttaatgtgctctgtaccactggtgagtgctccatagtttccttacctgctgctacagaatgttattttacatccctatggctattgccaaggctacaaaaaaggaaagctatatttgtatgcaacactaaccttttgactgctaatgtatgtttctgcttgctgtgccttgttatggctgctttttttgtgctaataaagtatgtttggtgttctccttgtatatctgctgttttatacatttgcaacaatttctcttgtaaatggaatggtttggggtttttaaataagcattaactaacaacctttctatagttaatgcagagttaatgaacagtctaatattgacttatcagaataagctaactctaaatttaatgctctacatcttatcagtcataattatatatactgtggaacagtatctgtagttactgcaaattactgtacagtttaggttataacagaaaactgacagagaagtaataaacctattgatttctctgcttataaatgaaagattgaaactatccaatgacatattatagtaaatgagtatctgtaacctcccactgcatcagaagcaggttaaatgaagtcttgtgaatttgtaatagatcagtaccatttattggtttggggaccatcttaattaaaaataaatgcccaaaatgtagaactt

SEQ ID NO: 54296 - DNA, 1084 bp, Homo sapiens
tatttcatcaaataacttcatttgatgttccatgatcaagaaagaatccctatctctattttacaagtaattcaaagaggccaaataacttgtaaacaagaaaaggtaacttgtcaacagtcataactagtaattatgagagccttgtttcataaccaggtcttcttactcaaatcctgtgatgtttgaaataaccaaattgtctctccaatgtctgcataaactgtgagagccaagtcaacagcttttatcaagaatttactctctgaccagcaataaacaagcactgagagacacagagagccagattcagattttacccatggggataaaaagactcagactttcaccacatttggaaaactacttgcatcataaatatataataactggtagtttatatgaagcagacactaagtgctatagacactctcagaatatcatacttggaaacaatgtaattaaaatgccgaatctgagtcaacagctgccctacttttcaattcagatatactagtaccttacctagaaataatgttaacctagggtgaagtcactataatctgtagtctattatttgggcatttgctacatgatgagtgctgccagattgtggcaggtaaagagacaatgtaatttgcactccctatgatatttctacatttttagtgaccactagtggaagacattccccaaaattagaaaaaaaggagatagaagatttctgtctatgtaaagttctcaaaatttgttctaaattaataaaactatctttgtgttcttttctgcaacagatgattccaacatgggtgtttgtctattcttctttactcttgaaacattagaccatgggaggctcttacagcgttgagttgatatttatacaacccaaatctaggtttgaactggtgaggtgtcaggtcatcaaatattcatgtctatatagtcttacacaggttctcaaaaaaaatgttcatgggataggtcattgataatggattccttattctgagaactccagacgactgaaatatatgagagaaggaaaaggacatagtaggagcaggcctgagaaaaaaatgaa

SEQ ID NO: 54297 - DNA, 389 bp, Homo sapiens
acctgggggcccggagccggggtaggcacagagttgtcctcggaggtccaggacagcggccagcccggcggcgggagtcagggccacgccacctgcagggaagaacccgagtcgaagcgggaagatggctgcagacaagcctgcagatcagggagcagagaaacatgaaggcacaggtcagtcctctgggatcactgatcaagagaaggagttatccaccaatgctttccaagctttcacatctggaaattatgatgcctgtctacaacaccttgcctgtctacaagatataaacaaagatgattataaaataattttgaatacagcagtagctgagttttttaaaagtaaccaaacaacaacagataatttgagacaaacacttaacc

SEQ ID NO: 54298 - DNA, 217 bp, Homo sapiens
  misc_feature (1)...(217): n = a,t,c or g
gcattaatgaataacaacatgaaattcaaactgtcattattgaataacaacagaggagattaaaactgttcccaacttgcagttattacaaatgtgctaacaaacacaatttgtgttccttgccccttctaccgtcttggaaaaaaaagcaggttttttttttttnggttnntgngggnnannannaantnnnngnntccnannnngtnnnnccttt

SEQ ID NO: 54299 - DNA, 865 bp, Homo sapiens
ctgagaatgctccctcctaggccagggccgtctctgcacacccttcttttttaaggagaccttggtgtcctgaaatcctggggttgcaagactgccagcctgtgtgatcaatcctgcggttaggaaggtggagttttgctttcccatcttttcctctgcctccggcatttggccctaaatgccagcgttttttgcttaggtatccagctcccgtccgcctgtgtgtggcggagctgctgggtaacggtgtcgaatagcaaaccttgggggctggcgggaggtggcttatcttgtgggtagatccctctcgagcagccgtatccacctctcggctctgcttatctctaagtcccacttgctttgaagcatatctctaggaatcgccccttctgcagtcaccgaagtgtcacctgaccttgcgcctaggggacctaatttatcttttatgtatcttactgtaagaggtgtggagtttggcctactaattgaacccccagttcttggataaagtccaccgacagttactgggcaagaaatttttcagtgatcagtggaatcaattttcccaaatcttggtcttaggcagtgtcgtgggagtcttccttagaattgccttgtgattgtccaaactatcccaagaataaatgtgttccaaatggatttgaaaacaggcctgtatttctgagactgtcactgcctttcacaaacacttgactacatcaaatgtctaaaactgaaaatcaaatttttgtgatataactattataaaagtatgtttacatcaacatactgtccacatttgccaccttgcatgggggtttttaatttgtgtgtgtgtgtgagagacagagcaagactctgtctc

SEQ ID NO: 54300 - DNA, 481 bp, Homo sapiens
  misc_feature (1)...(481): n = a,t,c or g
gattgtgaccagaagattttgaaaattaaatattactgaagatttcgacttccactgttaaatgtacaagatacatgaaatattaaagaaaatgtgtaactttttgtgtaaatacatcttgtcttggtttcattcaaaaacatttcacttttggggttgcgtgtcagatttggcagtataaattctggctatattttttggtggtagatttatttggctgttaagtattgcgatatgactaaacatactgtatacctgatgatcatctgtaaagttagagtatatctttttgctttctttggagttagtgttattccaggatattttacttaatctaaaagttaatttatgttgctcatatattactcaagtatttaaatttagagagaatgccgctctgtttaaagcaatgtgtaaagatnagtttttttaagcatggaatttagggttggggtacaatttgtttctattaagcaagtac

SEQ ID NO: 54301 - DNA, 1237 bp, Homo sapiens
tttttttttttaaaaatcgaatacctttatttgtgctcccttaagcagcatgtgagaagtggcagtgacctcagcagcaggcctggtatctttgccctgttgagaagccaagatctcagctgtactagtcaggtgttttttcagacagcaagtagaagaggtggtggccaactccagtgctgtatcctggaggaggtccgggtcagcactgggcaaggtaggtagctagctgcctgacccctagtctggggttggaacttctgtttgcctgagtaaagggatgtcagtcctaagatttctccacattgtgtctttcttctgcagtggtaaaaaggctggtccttgaattgtcctgcatggtaccctaaggcaggcccactggctctttttgatcaaggattctgagaaaagctgcccttggaggcccttgaaataacataggggagcagaatgagtgctcgagtcgtggctgacacagtccagctcacactgccatcacagaggctgagtgagcagtcacccagggagggggctccccagctcattccattcccatggggcaagtgactagaaggtaagagcacccgagtaagccagtgccttcctgtatccacacccaggaataccttccagttgtccaagcagccgtagttgtaaggattcctaaatactctgcccttggcctgtagccgacgtctctccttcttgttgatgtgcctttcgatgctagtctcacctcgactgatgagaacagcatgccatacagttagggcacccagggcaagtgccacagaactgcacaggaaccagaggtagacaagactcttgtgagtcatcctttctcgaaaggagaaggtgggtggtggggtctggtgataagtctggttggcaaccgcctgtagtttgttcttgtcgagctgtttcattttctcaatggcagcataagcctcccggaaaaggtcccaacttccatagctgcagtagacacagcccagagtcatgaaaaagcagaaagagaagaagtaccgatggttatagtggcccacacaattgtttagccaggctggttgggaaatgattaaggactagaatcaaacacaatttcaggcggtgtccaggcccctcaggttcatccctggttcctgacaatatcacccaagcctcaggcttccagtcactaagaactactttccaaaggcaagaaaatacaagactgttcacacccaaggttgaggtc

SEQ ID NO: 54302 - DNA, 368 bp, Homo sapiens
ggccagtgaacacgaaatgtgcctgacatccctaataatcaaagaaatacaaattaaaacacaatcataccaattttcatctaacagattggcaaaaatgtaaaggatcatgtgtatattcattgcagtgttgcttgtaatagcatacagcttgagtgacctccagtagaggtgatgtttaaatatattttgctgcattcttaaaaggaaatgtagcataatgcagccatttggagagaatgagataactatatgcactctctttgaaagttttgtgactactatgtgcccgggagttgcactgggctttctttaaggtattttcagcaaacctgtcttttaatgatttatattgtacctaataagag

SEQ ID NO: 54303 - DNA, 1603 bp, Homo sapiens
cgtccttcctcagccgcgggtgatcgtagctcggaaatggcgggatttggtgctatggagaaatttttggtagaatataagagtgcagtggagaagaaactggcagagtacaaatgtaacaccaacacagcaattgaactaaaattagttcgttttcctgaagatcttgaaaatgacattagaactttctttcctgagtatacccatcaactctttggggatgatgaaactgcttttggttacaagggtctaaagatcctgttatactatattgctggtagcctgtcaacaatgttccgtgttgaatatgcatctaaagttgatgagaactttgactgtgtagaggcagatgatgttgagggcaaaattagacaaatcattccacctggattttgcacaaacacgaatgatttcctttctttactggaaaaggaagttgatttcaagccattcggaaccttacttcatacctactcagttctcagtccaacaggaggagaaaactttacctttcagatatataaggctgacatgacatgtagaggctttcgagaatatcatgaaaggcttcagacctttttgatgtggtttattgaaactgctagctttattgacgtggatgatgaaagatggcactactttctagtatttgagaagtataataaggatggagctacgctctttgcgaccgtaggctacatgacagtctataattactatgtgtacccagacaaaacccggccacgtgtaagtcagatgctgattttgactccatttcaaggtcaaggccatggtgctcaacttcttgaaacagttcatagatactacactgaatttcctacagttcttgatattacagcggaagatccatccaaaagctatgtgaaattacgagactttgtgcttgtgaagctttgtcaagatttgccctgtttttcccgggaaaaattaatgcaaggattcaatgaagatatggcgatagaggcacaacagaagttcaaaataaataagcaacacgctagaagggtttatgaaattcttcgactactggtaactgacatgagtgatgccgaacaatacagaagctacagactggatattaaaagaagactaattagcccatataagaaaaagcagagagatcttgctaagatgagaaaatgtctcagaccagaagaactgacaaaccagatgaaccaaatagaaataagcatgcaacatgaacagctggaagagagttttcaggaactagtggaagattaccggcgtgttattgaacgacttgctcaagagtaaagattatactgctctgtacaggaagcttgcaaattttctgtacaatgtgctgtgaaaaatctgatgactttaattttaaaatcttgtgacattttgcttatactaaaagttatctatctttagttgaatattttcttttggagagattgtatattttaaaatactgtttagagtttatgagcatatattgcatttaaagaaagataaagcttctgaaatactactgcaattgcttcccttcttaaacagtataataaatgcttagttgtgatatgttaatgtgtgatgatatgattcttaaatactt

SEQ ID NO: 54304 - DNA, 1031 bp, Homo sapiens
gccttcctgtatacatgtgataatgatactgttttaaagaacaggtgtgaaagtctaagagtttaatccagactctgcacaagaagttaatctgccaaaccctaggattctccttctgaaagctcagaatatttcttccccttccctatacacacagggctcgaagggttagagaagaaaggcagacaacagcttctgagctttggactaatcacagcctctgttctcaggcaggagccccaacactgagaccagaaaagatggtgctatgctttcctcttcttttactgctgctggttctatggggaccagtggtgtccactttcatgcttgggcctaagcgtctcaccaaggctcactggtttgaaattcagcatatacagccaagtcctctccaatgcaacagggcaatgagtggcatcaacaattatacccagcactgtaagcatcaaaatacctttctgcatgactctttccagaatgtggctgctgtctgtgatttgctcagcattgtctgcaaaaatcgtcggcacaactgccaccagagctcaaagcctgtcaacatgactgactgcagactcacttcaggaaagtatccccagtgccgctatagtgctgctgcccagtacaaattcttcattgttgcctgtgacccccctcagaagagcgatcccccctacaagttggttcctgtacacttagatagtattctctaaggcatccactgcatttcctttcatttgacatagcttctgttacaattgcatccacgttttcttttcttttgttgattttcttgttcccgtagaagaaagaagaaaggtgtttggagaattcgagtgcctaggatgccagaccagagttgagacaaaaagaaataagattattttctgctttgtagttctgtacttttcgagagaagggaatagggaagacagcaaagaaagattcagatttctaaccctgcaacttttgccaagctttattgccctgtgttcacagcaataaaaccacacaactgctgcattcta

SEQ ID NO: 54305 - DNA, 1449 bp, Homo sapiens
  misc_feature (1)...(1449): n = a,t,c or g
ttttttttttttttaatttttttttccatctggggaggtgctcactcaatgtttattgaacagcgaatacagaaaagacagtccctggagctctatatgtggaaagtagcccttctggacagaaagaatattcgtggtccatgtggtttgagtctgttaagaaggacactaaggcacatggctggtgatctttgcgtcatagacacgggtgagctcatggtggaactcctccttgtctgtaggtttccaggctgggcacagaggtgagggcagaatgttgggggtcccagtggatctccccacaacttcctccagggcaggatttccacccaggcccaggctgcccgttcctctccttctccgccagtctgcgctgcggctgccacggctcacaccagagggatggggtaggaggcgcaggcagccaggccacacatgttcttttccgcgctcgatgaggaagtacccgttcattccccactggggaccccaagagtttttcacgatccagtaagggatcccatttttttctccatacccaacagccagtactgcatggtttactttatctggagttttatggcaggaagtactggagtagatgcccgttctatacatcatgaagtcctgagtcacctcaaaggcaaagctcacagggttgtagagggccacagcctccaccatcgcttcctcgtcatagattgtgatgttggctacatccttgacaaagccgatggcctttccaggttggaacttgcaataaccatccttgcccctggtaggggtaggtgtcttcaccccatgatccccttgttgtacaggatatactcgaaagcctggctggggagacccccttggcagccgtaattattgaagtccctgggcgcagtccaccagctgctgttccgcccaaggacagcatctttcccggttgcgaatggcgaatcgcagactcccagggccccagtggtggagaaagtccagcaactgccgcaggcaccctgatttttcacaggtgagacaaaatttccttttttccgccagtccacggaaggtgggtagggaccagtacctcgaaggtagttacttttggtggctgagcaattctgaggctctgaccagagatacttgtgttttatttccagcaaagctcatgtctgaaaattggttcagtgccattttaaatgtgtggttcccattgttgtgggcgtttatcttcctccagttgctggcaaacgtctgcagcctgtggtggtactcctccgtactgtaggtcttacggtgcttagacatccatgacttgaagtgaaacttctctaaggagttcacgcacagttcggcggcaccgcagacggggactcccaggagccaggccccggcgcagagcagcggcagcgtggcccacgantcgcgancgctggcggcttggctcttgcgctcagggtccgc

SEQ ID NO: 54306 - DNA, 264 bp, Homo sapiens
accttcagcctattcaatctgacaggtacagatttaacttttcaggttgtgacaattcccctagccaagccagtcagttcaccacatgtagtaacataatattgctattccttatgcctctgttcacacatgccataagcagcacacctttttaagaaattcccttatcttctccgtgtcctttgcagcatatatgtgccacagtgctcctggcttctcttttccttcaataaatcgctttattgtgagttcgtcagaatctcc

SEQ ID NO: 54307 - DNA, 1919 bp, Homo sapiens
  misc_feature (1)...(1919): n = a,t,c or g
tttttttattatatgaatattttaatgcaaaatgcttaacacttaaaattagcaaagcgtcatttaaattaaaattccatttaactaaagatggttaaccccaagaaattgtacagtagttgatttctgctatataatgccagtcctatgccatacaataagaactgcaacattagctgtcacttcctccattgctcttctggaccctaagggatgagggaggggactcagacacaaaacacaacccaaataaactgtgcagtgattcctaatagttataaacccaatctaagttgtccaaacagctgaagaataactgcaggtattgttccagagctgatacgaggttttgcttttacagcctggtaaaagttctgcactaggtgagaagtcacagtttaaggatgcatgttctgtaaatagttactacatatacacatttactgtctgtaaacactagaaatatacattagacagagtaccctcacaagttgggtacagtttaaaaaagaagatgaggtaacatgaatctcaaagtccacaggaatcctgcctgaagagtttgaacagctgcctgtaattcatttccaatgtgcagggagattaaggtttgccaaaactggattcactggctttcagcatagcaactgcatctttcactgcatggtagataacattcttcacctgtaatttatcttcgtgattggtatgagtctgtgacagatatcggaattcctgagtaagccagaagcagtgtttaacatgctctggagaaacaaaatcttcagccactttgatgcagctatataagttatgaacctgatgtggagctcctgccgggataaacaccacatccccaagaaactgtacaatagccccagccttgaactccatactcttgatgaagacgttttcttaatgatcggtctaaataccgagctttgatcatgaataggatcgtggtctgctgggttttcttgaccttgctcttctgatacctttttaagaaattcccttatcttctccgtgtcctttgcagcatatatgtgccacagtgctcctggcttctcttttccttcaataaatcgctttattgtgagttcgtcagaatctccatcttggatggtcttaaggacttcttcttcttgctcacactgtcctttgggaattcccacatagaccatgacattagctgcatcagatacatctaagtgaagatttgttgttccatatttccgatcttcaggagtgattaatccataagcattatacatcttggggcccagatctggccgaacaaagtagtttggcagcctagaggccaaattcagtttgccatctcgccttgtgtactcgggcagtggaatgttggccatcagatcatcaaacctggaaggcatcatatctctaaaatcttctcctggtggccagtccttaagtttcaacaccattggttctttttcatttttcaaacgatttggaacatcttcaaatccatcccagaagtctcctactgtggctcctgtgatgatttcattggtcctacaattaactaggtctacttcctgctcaccaaactctttcctgaaggattcaggtttccaaagttcagagttcaatttatgatgcactccagacaccatcactggctgcccttgtttccagcactccctaaacacattccagttgctcttattgttggggtcttgcaagcacagcaagcgattatcacaaagccaatagtgaggagtgtcaaagcccagaatgctgggcttgatggttagtccttgaggcctcttagataaatcagaagtcgtcttattttgcaccaaagaggcctcgtgccgaattcttggcctcgagggccaaattccctatagtgagtcgtattaaattcgtaatcnggtcaaaagtttcaa

SEQ ID NO: 54308 - DNA, 3740 bp, Homo sapiens
tttttaaaattacaaaaggaaatttatttcaaaagcataaggggacatttacatttaaacaagatgataaacaggtgtcttgcaaaagaaaaaaatccatggcattaagtttttcattcaaattcggaagcaaaaataacctaagttgtgcactattgccttaggaaagggaaggggaagggtgagggataagggaacagtcaactcagtatcaaacttgagaaagtaaagtcacttctgctcagttctgagtttacaaatatgcttataaagacaaaaagtggtaaaattatatttaatgttcaaatttatttagctgtagtctctataatttctgtacttgaaatggctttgggccactggctgatctatctctgaggtccagattagctggtcagttttcaaatggcaattttatattcctttgttcagattccaagggagtttaggttcagctcatggtcttttggaatgtttagagattattgccaccactccatagccaagctgaccaacttttgctcacttgtatcattctagcctttcagaactattttccccatacacatgtgcagtaattctaataaaggagttttgcttcttctgcagtgtagaggtaatggtaatgaagacacctgcattggaatcacaaactattcctcagaaaaatacatcagactactagaaatgtcattcaggcagttgatttgaatagcaaacttggggagggaagattaactgtgaaacaaaaatatacgaaacattcaaatgcagaacaaagggtctatgctactaaaaatgcccatgacattaaacactccacaaaccccccatctgttgttttaacctaaaaattctattggctaacttatacaataattttgattaataacctgagaagttaaaatcttgaaagtggcaaaagcaaaccgagagagcatcccttacttattggtaccatgttatcaagtcactttttctgggtagccctggttattaaatctccaaattgtaaattataccatctcttcctgtagaaacctgtatgtacatcagattcagtattttggttgttatttcaccaacagcaattccaatttatctttgaaaatgcagcctttattcttagttttaaataacaataatcatgtaagtgcaactaacttagaatcccttgctactgggagtaaaaacctaaataacaagttaataacggattcagcctcaaaaggataatcaccgtgtcagactacccgttcctggaatttaaaaagtgatttatgttgtgtagtcaagtttcacagcatgcatatatatatatatacacacacacacacacatatatgcttatgtatgtatgtatattatacatacacatttctattcaaatagtaagattccatattcaaaagtttgtatcacaatatatggaaaagaattaagtaggcggtgcaaagcaacttactttctcctaaaaatgtaatgtcattcctatattttaagaaagctatgtaagtattttgcttttatgacactaggtaggaatgctgcaccactgcccagcagctttattaaacaattaaaacaaaatgttaagattgaccattactcttctccatatattgggtaaaaaactaagagggaagaggaaaatcagtaacctttcaaaactgatgatctttatcagcagaactagactgaatttcattacattttagaatgaacagctctcaacaacaaattatcaagatgtttaaaagattcacaatttgaagtctgaataatgatactgcaaaaacaagtcaagattgcagacaaagcatccaaaaatatcactgtggttttaccttggacacaaccatggtctgttacaaaagtaggtcatacatacaaaggtataaagaacattaagtttttagctgaaggcagcagtctgtttaaagggacatccccggcaatccaatgagtagtagaatttaagtatattaagctcatgacaatgctgaagaatgctgatgtcttattcagtagagtcttccccgactacgatttcctcgtgtgccccaacctcggccacctctacttcccctgaaggctcctctctgctcataattaaagttgcccaaattgctgctatatttcccactgggagggttataaatctgcctggcatctctttttggtcctgctgaagatttcttgggtggtgaacctgaagttgtatcttcactggctctcttttgcccaatctcaaccttttgtacaggtttccaggatagtgttactgtgctcttataagaaggaggaatgtggaagagatccttgattaaaacattgatattgtttgttattttcaatgcaacgactttaatcttgttctcttctgtttttaaggcctcacccgttttaccctggagagctaagcgaagttgtctgatataaacttgcaggccccgtgcaaagtactgcagcctgattttggattcatgaagcttttctgcattcagtttggctgttaagaaatctggaagttttcggcccaactggtgaaaactgtacaacaaacattccacataactgaactgtagcttgggttcttcattaccagcattctctccattttctgcctcttctggagggaggggcatgtattccaacaacttatcaaatagtttccttaaatttgtttctagtttttccatgtcaccacaaaatgaactcatctccgccaacaatttcaatacctccaactgtatatcaagaccttccactggggtagtcaaggtaccgaggttagggagaacctgctcacagaaatatgtcacaaaccttgtggaatggacatttttagagaagaggggtactgcctgccgagtgcactgtaagagcctgtccacacagtcaggatccgagggattgaaggtctgttctaggtcggcctgttcagccaccaactctacaagttgctgtcttccactcactgtctgtaagctttttaacccagacagtatcttcataaatagaacaaattcttcaccagtcacatcttctaggacctttttggattcagttagtataagctcttccacttcctttgttaagacttcatctggtaaagtcttaagttttgtagaaaggaatttaattgctcgttctctaacaatgtcctctccttgaagtatttggctgaacaacccacctaaagtcccttttgcatccattttaaatatacttaatagggcattgttcactaggttaaattctgcagagtcatctgtctgcaaaagttgcgttagtatatctgccactcgaggaagattttctccagtggccaaattgagggcagttctttaattgcttgacgtcgaatagatacatcttcatcctcacagaggtctaactgtgcattgatagcagaatcagccaattctggaaaatgcttaaagaatttcggaataaattgagctgctaatcgcttttccttagtacacctttaacaccatccaatatcactttgataggcatctttagctgggcccacttgctcccgtggcatcgggccaggatgccataattgcggtaaaagctccttctacttgtcgggcatgttggagcgacaagcccagggcccggtttcccgcttatccttgtccttgaaccggcgccacctgccgcctcggaacttctctaaacccactacccgcactattacacctccagctgccgccagtgcagccgcc

SEQ ID NO: 54309 - DNA, 379 bp, Homo sapiens
gggcgattatctcttatcttttctataaagagagcttggattcctaaagaccttatactggtcccaactgtaccacctaatcatgtgtcccttgagtttgtcacgtgacctttgctttcctctgaaaatccttttactcagtaggccaattaaacccatttataataattaataaaatcaatatgtttgacttcaagtttttcccttagttttatgattttttaaaagtattatccttttttggcatttaggaaggcatctatttttggtttaatggttactttgatgtaatacttttttttctgctcttgtgtattgattcccgctgtgagtgataaatcagccatttaccttttcttccccctcctctctttatttt

SEQ ID NO: 54310 - DNA, 397 bp, Homo sapiens
gaaaaatgcagagaaacaggagtcttggctactcctttagaggcagactcagaccctcctgcctcacagctttatctttgtatttgccccttactttatcttgtgccttgagaaattgctggggagagaggtatgtccactgggcagctgtacaggatggaggatctagggcgtttccactcccagcagccaggttccctcaccccaagctcacccactgttggggagattatctacaataacaccagaaacacattggggtggattgggggtatccttatgggttcttttcagggaaccattgctggacaaggcacaggagccacctccatttctgagctctgcaagggacaagaactagagccatcaggggctgggctcactgtggcccacccca

SEQ ID NO: 54311 - DNA, 1275 bp, Homo sapiens
tttttttatcttttaaaaatacactttaatctaaccatggaatttcacaaacatttatatacaatcagagactaatttgaagtatgttttccattcatttcagccatgagaaaacacattgcagtaaaaattaaagatatccatccataaattacttttatttctcattaaatgagcacagagtcattagtatattaataacagatatgtttattattacatatccatcagtgcggctttcaataccacttgaaacatgcatatcatcctagagacgatcggttttccagtgcttcttatctgatacacattactgcaaagccattataaattactgaggaggtatttggttaaaaaaataaacaataaatcatactgtccatatgaatcaactcttgttactggacaagagtttaacagtatttatctggtaattcctatgttaactggaaaacatcatggatgtattgccatatttcctttttatgttggtgcaaccttctacattttttgcagttttataaagtcattattgtagcaggtagtttgatgcaaagattgtactcaatttatgaaagtccaacaaacctctaaatattttaaattaaaccaattatcaatgaaaaactcactgacacacataattttttgaaaatacattttttgaaatttctatacttactcatggcagtaaaataattatctcaaattaaggcactaaaaggacaatgcaacccccattgaaagtgttctaagaataatttacatttcaaacagtgcatacatttccctatatgtttgttaacttaatgtctttatcatttaaaacccacaaagaaatacattatacaattatagaaatgatgtaccccacaaaatgcttttaaacttggttcttttgtacagttagtttcctaatgtctctagtagtaaaataactcaatatggcttggcaaaaatgcatagattaaatgtaacttttttttgtcctctcccattccccaaacttgctgaaacatatacagtattttgtaaagcataatgaaagatatttaatttctccatcaagtccaacatgggcaatcaacagtaaggcttttaaattctacagtgagggcactgaagttcaagtgatatcactgctttcttaaaatagttttgtatagtcttgcaagagcacaaaaacttaagtcattaaaaaaaaaacaaaacttcagtttgtctcattttgagatattttctttactccttccatgagctgatcttgatagtgat

SEQ ID NO: 54312 - DNA, 399 bp, Homo sapiens
cccacgcgtccgcggacgcgtgggcagctagtgtctgcctgtgtcatagtactaattaattcacaagctgagatcctgcattttattcatctgcgttcatgccaaattaggaatcttgttccttttgtggaatctgattcattgacaatgacaataactaataacaccagcgtatgtaatattcccattccaaatgtccacttagctcattatttataccctaagagttgccatcgttctcaccatcccctgccatagactgtgaagctcttgtgccctcaactaactcatcccctgccatcttttgcagggtattgaactgtgaaactactagtttccctgtctctctgaactgaagtgctttttctcacctgggtaaagtggacccatcagtccctg

SEQ ID NO: 54313 - DNA, 401 bp, Homo sapiens
cgataccaatagctagtgttataagtgtcctttcctgaaactcttgccacgcattgtgttttggcgattttcatggttgtacgaatttagtcagacagccaattagaaatatatttttagaaaattaaaaatgaatttatgtggattcaatgagatcagttgggtaaatcccttaattcagtgtcatgctcatgtaaatactccataaatggtagccattagtattgattgttcttatctgaatgccagagtttagtctaagttatctttcttcttatgggaggaactttgtcttaggtcagaataaagattgttatatagattcaaacttggtatgtaattcaaacttattttatgttcaagactaaattgatcatagggaaaagtgactggggttcctt

SEQ ID NO: 54314 - DNA, 354 bp, Homo sapiens
  misc_feature (1)...(354): n = a,t,c or g
ggatagaaaaaccaaaacaacttttgaatgactatactttttttaaacttcatatttaggggtgtctgatttttttttcaactgaatacttttttttttaattatactttaagttctgggatacatgtgcagaacatgcaggtttgttacataggtatacacgtgccatggtggtttgctgcacccattaacccgtcatctacattaggtatttctcctaatgctattccttccctagccctccaccccctgacaggccccagtgtgtgatgttcccctcccctgtgccatgtgttctcattggcaactcctgcttatgagcaanaacatgtggtgtttggtattctgttcctg

SEQ ID NO: 54315 - DNA, 352 bp, Homo sapiens
atgctggcgtaatcgggttcctccgagccgccgtaggactggttccggcgggctggtgaggaatggagccggtaggctgctgcggcgagtgccgcggctcctccgtagacccgcggagcaccttcgtgttgagtaacctggcggaggtggtggagcgtgtgctcaccttcctgcccgccaaggcgttgctgcgggtggcctgaatgttcgcatcttaccacatacagttctttacatggctgattcagaaactttcattagtctggaagagtgtcgtggccataagagagcaaggaaaagaactagtatggaaacagcacttgcccttgagaagctattccccaaacaatgg

SEQ ID NO: 54316 - DNA, 723 bp, Homo sapiens
  misc_feature (1)...(723): n = a,t,c or g
gagccggtaggctgctgcggcgagtgccgcggctcctccgtagacccgcggagcaccttcgtgttgagtaacctggcggaggtggtggagcgtgtgctcaccttcctgcccgccaaggcgttgctgcgggtggcctgcgtgtgccgcttatggagggagtgtgtgcgcagagtattgcggacccatcggagcgtaacctggatctccgcaggcctggcggaggccggccacctggaggggcattgcttggttcgcgtggtagcagaggagcttgagaatgttcgcatcttaccacatacagttctttacatggctgattcagaaactttcattagtctggaagagtgtcgtggccataagagagcaaggaaaagaactagtatggaaacagcacttgcccttgagaagctattccccaaacaatgccaagtccttgggattgtgaccccaggaattgtaggtgagataaattagcaacttgatgatttcttccttgcattaatgtggggtcctttggattggtgagttatttttagcttagaaccacatttctatttctgtccatctaaaatacaataaagtcagtcatatttaccatgggcattatatttgccttatattaatgtttattaagttattgtacttctcatctcaaggttacctgtatnaaatatccagtagtccatttcataagaggggggaatggatcttcattnctggccc

SEQ ID NO: 54317 - DNA, 385 bp, Homo sapiens
catcgcccaggccgagcacgatgccccctaaaaagggaggtgatggaattaaaccacccccaatcattggaagatttggaacctcactgaaaattggtattgttggattgccaaatgttggtcaggcttcagcagaaaacttcccgttctgcactattgatcctaatgagagcagagtacctgtgccagatgaaaggtttgactttctttgtcaataccacaaaccagcaagcaaaattcctgcctttctaaatgtggtggatattgctggccttgtgaaaggagctcacaatgggcagggcctggggaatgctttttatctcatattagtgccttgatggcatctttcatctaacacgtgcttttgaagatgatgatatcaccc

SEQ ID NO: 54318 - DNA, 388 bp, Homo sapiens
gggggctgagtggcatcatggcggctcagaaagatctctgggacgccattgtgattggggcggggatccagggctgcttcactgcataccacctggccaaacacaggaagaggatcctcctgctggagcagttctttctaccacactcccgaggaagctcccatggacaaagccggataatccgaaaggcgtacctggaagacttttacacccggatgatgcatgagtgctatcagatatgggcccagctggagcacgaggctggaacccaattgcacaggcagactggattactgctgctgggaatgaaagataatcaagaattaaagacaatccaggccaatctgtcgaggcagagggtaaaacaccagtgtctttcatctgagga

SEQ ID NO: 54319 - DNA, 349 bp, Homo sapiens
ggcaaatatatagacatatatgtattattttatctagccagaatcatattgctttgtaacctccttttattctctttatattaaattacggccatgttcctgtatcattaaatattacactatatcactacttctgatggaagtacagcaaaccactaaacacggaagtcaagtcctgggctctggaatagtatatattattttagttatgcccagcttctggacctgggatggcattttgtaacagacgcagccttatctcttttgtattttcataaaatcttcagtataggctctaaaaaggagcccacgtgaaatgctgaaaagacgatgtttaaaaagtcacaat

SEQ ID NO: 54320 - DNA, 605 bp, Homo sapiens
gcgcgattcgcggcagcgccccgatggaacctcctggtcctgtgagctgcaagatagaaagcaacatatgcccccaggtggcctccctcaccctggcaatggaaacgaacagccgagcttcaccggacaagactagaaatcgttcctccacccacccagagacaaagcatatttgacttcttcctctactggggcccttgcaagattccagctggtatgagccttctgcagagctagtgcagactaggatggctgtatcactaacagcagctgaaactctggcccttcagggtacacagggacaagagaagatgatgatgatgggaccaaaggaagaggaacagtcttgtcccaggccctgcacatggacctgcacaggaagagccatgggagaagaaggaatctctgggagcagcccaggaagcactgagcatccagctccagcctaaggagacccagcctttcccaaagagtgaacaggtatatttacattttctgtcagttgttacagaagatggcccagagcccaaggacaaaggatcattgccacaaccacccattactgaagtggaatcacaggtgttctcaggaaaaacttgctactg

SEQ ID NO: 54321 - DNA, 783 bp, Homo sapiens
cggacgcgtggggggggagaaaagacccaatttaagtaacttttatagatctaaatttcgaaggaggatcctttcttattcaaaaccgaactaaaactaagtgacttgattcacagaaatcttaatattgagatgtctaaattgggtgggtttcagcacgtaaatgttgacaactaatagacattttaccatcggctgtggctttaccttgttgtggaagttgggttcggacaccaggataatagaatcttcctctcatttcccccagatccttgacagtataacttgatgacttctaatcctaaggaattgcataccttggttttcaggtacagccatttaaacagggtgcagtgtattgacagttcaaggaagtcccaggagtcgcgtggatttgtgtgctacaattttgttgtggaaaattgtactgtaatacttctcttggtactgtaagaatttttaatgtagaaattatgctctgtaatgttgtttttggaaataaaactgtttaaactctttgggttgtttaaccttttaaagtgaaatagctgtgacagtgaaatgttacttttgagagtagtgtcttaaatctaactttacagataagccaagtgtatgtagtagctcagattgtctagttgggcactgactttcagcacattgtctcatgagacactacctcttaatttattttacttgtatcaactttagagtagcatggccatttgtttattttttaataagtgatttgtttttaaaaattaaagtacttgtgactgcaaa

SEQ ID NO: 54322 - DNA, 96 bp, Homo sapiens
ctggaaagcattgtgttgtttgcacctttgtgaagtttttaaaaatgaagatgcaagtgcttcatttttaaaaacgtcgacgcggccgcgaattcc

SEQ ID NO: 54323 - DNA, 662 bp, Homo sapiens
gcgtccgcggggctgggcgcgggggacagcggggacggcacggcgcgcgcacgttctaagtgccagatgatggaggagcgtgccaacctgatgcacatgatgaaactcagcatcaaggtgttgctccagtcggctctgagcctgggccgcagcctggatgcgaccatgcccccttgcagcagttctttgtagtgatggagcactgcctcaaacatgggctgaaagttaagaagagttttattggccaaaataaatcattctttggtcctttggagctggtggagaaactttgtccagaagcatcagatatagcgactagtgtcagaaatcttccagaattaaagacagctgtgggaagaggccgagcgtggctttatcttgcactcatgcaaaagaaactggcagattatctgaaagtgcttatagacaataaacatctcttaagcgagttctatgagcctgaggctttaatgatggaggaagaagggatggtgattgttggtctgctggtgggactcaatgttctcgatgccaatctctgcttgaaaggagaagacttggattctcaggttggagtaatagatttttccctctaccttaaggatgtgcaggatcttgatggtggcaaggagcatgaaagaattactgatgtccttgatcaa

SEQ ID NO: 54324 - DNA, 835 bp, Homo sapiens
tgccctggtgagccacctaccctcttgggcatttagttgtctatcagtaaactagatcattaacactgcgcctgcccctcctgctcacgggcacgttaggaacatgcgcttggataaaatccaagccagagatttagaaaccagtgtgtggtgccagctctcagccttggaaccacaagcccatttttcttaaaaagggatctggactggcatccaaagagatttcagtcccctcatgtaggtttaaccaccatgggcaaggcagtctctctcccaggtattcctctcactaggtgctctgctctagaaatgaagtctaaaagcagccccatcaatacagaacagagttagaaccacccggagagatttaatctggaatcccagcaagttgtgaaatggaaagactagtcggccagagagctgaggtctcacagtgtgcaaagaccagtcctcagtatctgcacccatccatttgagtttcaggtgaagcctaggatttgggagctcaatacaaagatgccagcatgaaggagggtgggtgccaactaggtttggatttagagacatcctccttttgggaaaggaaaaaatcctgattccacttaggtttccagggaagaaggcatccccatttcagaacagttttctaagccaccctcatggaggttttcacctgcagctttcagtctgctttgtctgatgtttgaggatggcaactgccccaaaaatggggtctaaagtaggcatcccgtcacgtttctgttaaaaagtaatactgcttttaagggtaacacttatgggaatgaatggaatgcatgaatgaatgagtcagttt

SEQ ID NO: 54325 - DNA, 373 bp, Homo sapiens
ggacttatgaatgcacaggaaaaagaaaatacctacataggccctcaaggacagcagaactaaagaaagctttaaaagaaaaagaaaacagattattattgcaacaaaggtctaagagtgtaaccagttccagtagcagtagcagtgacagttctgccagtgattcttcatcagagagtgaagaaacatctacctcttcctcctcagaggacagtgacactgatgaaagctcctctagttcctcatcctcagcctcctccacaacctcttcctcctcctctgattcagactcagattccagctcttccagtagcagtagcaccagcacagatagcagctctgcgatgaacccccaagaagaagaaaaggaatt

SEQ ID NO: 54326 - DNA, 259 bp, Homo sapiens
cagagattaagaatcacacaagtaaatacaatttaccgattgaacttatttttgttaggtcttgtaccagatactcaatagatggttatgtgtctctccctctaacttatagctgggagataagttctggcccagttactcaaggatagagaaattcaagacggggaggatcaggtcaggttggggtctagtgtatcagaagaggctctacaaacttcctagttctcagacaacagtaaagtgtaagaaacatgggttc

SEQ ID NO: 54327 - DNA, 1374 bp, Homo sapiens
tgagataaaagaggcctcaggcaggatctggcatagaggaggtgatcagcaaatgtttgttgaaaaggtttgacaggtcagtcccttcccacccctcttgcttgtcttacttgtcttatttattctccaacagcactccaggcagcccttgtccacgggctctccttgcatcagccaagcttcttgaaaggcctgtctacacttgctgtcttccttcctcacctccaatttcctcttcaacccactgcttcctgactcgctctactccgtggaagcacgctcacaaagggctaatctcgggccttgtcgaaggaagaggctgcagacgttaatgaggttagctgctggattccagtattcgtcgcataaggatccttctttgtctgcgaaggaaaaacacactgattatcataatgaggcacgtgggccgtggcccggctgggtcggctgaagaactgcggatggaagctgcggaagaggccctgatggggcccaccatcccggacccaagtcttcttcctggcgggcctctcgtctccttcctggtttgggcggaagccatcacctggatgcctacgtgggaagggacctcgaatgtgggaccccagcccctctccagctcgaaatcggcagactaggatggaagtgccctgtgagctggggggcccttcaaagggccaaggagaaaacgcaggccgagggaccagccttccaaatgggcttcaagctccaatgacctccgctcgccccctcgaaatgtctggaaaacataatgggcagattttctgtcttcaaagtttccggctaaacctcttcaagttctttattgtttgggactgagacactcagccatgttaatgggtagtttcttttgtatttgccttgaaaggccaaaatatttttatattgccacagacaaagccacctatttaaaaatgaactccatgtccgtcgtttcccaccaggagactatgtaccatgtgtgtgtctctatgtattctggggtcttgaaacaggtttctcatggggatggtcattcaccacggtccagaggggcagaacaggcggcggtttgcccttgcccagggggcctggggaacgtgggccctcatctcagatctgcccccagtatgtttaggacgcgagccccagaaggatctgggagtaaacttaacattcactgtgtctctgctctgcatccgccatttgtgtgtgtttctggactgtgggctgtgtgtaccttggttggtgactcagtgagaagaagcaggaatgccaaagatactgtgaatgttctgagttttgttgctgttgttgttgagaggttgtttcactggtatctattgcattgtataataaatgaccagatgaatg

SEQ ID NO: 54328 - DNA, 128 bp, Homo sapiens; identical to SEQ ID NO: 41037

SEQ ID NO: 54329 - DNA, 540 bp, Homo sapiens
ccctggggtggtgattcggatgtctgctacagggaaggaggcctctgaagagccattccccctggcaggggcctggagcttcgggaaggcctgctcagggcaaacataaaaaccgctgaagggggcagaatcccagtaatcttagccacccggcccccacccctccctggccaggcattaagtgtcccttgccgcgggccggggccctccttgagctccctcctccccggtcgcgtgctctgtgccaggcctgagtttcccttacatggtcgggggctcgagccttcggcctccctcctcccttctgccctcgctccttcccctttgagaggcctcaagggcacagagaggtcaagactgaaagctgaccaagcttggggtgggtggaaggagggggaagccaggcccgggagggggtggagacggggccattggcagggaccgggttccacctgttgcctgcgagtgcaagtgcagggtgagaggatggggaacagggggtctgctgaacctcagggacaggactggctgtcctgctga

SEQ ID NO: 54330 - DNA, 2059 bp, Homo sapiens
  misc_feature (1)...(2059): n = a,t,c or g
ttttttttttttttaaattcatgtttttaattggcttaatacaaaggtcccccaggaggccctgggaggagggggacagcctgggagaggcagagattcatggccagcagcccacccccacctgccacccactccccaacaagggtcccagactctttcaataatcctaaaaaaaccgacgagagcgcaggcagatgaagagccccttcatcttcacacgggtgacaggctgccctgccctgcccagggccctggtcctccccagccaagtcaggtgcccagcccagaccctgccctggcaaggtggggcagagcaatctggtcctccaggaggcagggcgccatgtaaacatcaacaggccagaccccacttcctccagccagtggggccccggagtccagtgctccaccccacagcctgctcagtcagtcaactccaggcactgcgtggctcggtggagggtgacagcctggggccaggtcccatgtgggcagtgcgagcccaactggcaccctttctggctctggaagtggtggcgacaggaccctggccccgcaggggtgggagggggcacagtcacgcccgggccccccagctcgctgatgcgctgtcgcaggtgaaaggcaaattcaaacatggtggccgcgaggctctggtggatgaggtaccggggcaggcggcccttgagatctgtattaagaatccagacaaaggtgcaaacacgggggttactggccgacttgagcacgatgaagcccccagggccattctctccccggacatatttgtgcgtcgggggcttggcactgtgtgaggtggcgatccctgatgacaagtatcggtccctgcgccgctcaatgcgccggacattcacgaagtcccttggggagaccacgccgcccgcagcccctgcagacacgtcataggagatgagggtgttgtcttccactcgctgcaggatctggcaggcagtcactgtcttgttccacagcaccatcctctcgggctgcaggatcacctcctggtacacgagctccgcaggacagggcaggaaggtcttcaggataaacgtcttgccgtgaaagggaacttcaatggtgtacacggtgtccccatattcattattcttctcaaacttccagttctcttcctgggccaagatctggtccaccactgccgtggcctccttcccctggcggatgtactcccgctcctgagcagagaaacttttcttcccagcaacttcttcatctgattcattgtcagaccctgcaaaggattctgggggtgaatagaactgtccctcggacagagcaccggagaacagcaggggtccacgggcaacagcaacctgggcggcaagataccatcgctcctcttccagcttcctggggtaggactttgaagtcaaggaaccaggtctccaaccaggcgaggacaaaagagacgatggggagcaggtagccaaatgcccctttgctgagcagctcagagaggatgaccttgacaatgaggaatgcactggacaccagcgtcgtgaccgcaatcacccaccagtgccggagctgcagcacggcatagcctaggagcagtccagagaagcggaagaaggccaggacaaagatgtcgaagaaggaagttttaaagttgtactggatgatctcctgctccaagttcttacggatgcctgtgttggtattcagttcgatgatccagagcagggagatgaagagcaggtcgaaggtgacgaagagacagaaggtgcggcggacatcagagatggcccttcgcttctcaggcggcggaaggaggtgcgaggagaggctctggctgtgggacagtgaggagcccagggaggccacggcaggcaggctgcgctccaagtctcgggtcagctccctgggcagcttgctcatcctggtgggcccccacctcagggcggggagggcgcggcctcagcagcagggctgctccatgtcagccacggccccggctcttcccgccccanccgcagtccgntccgcggcctcagtagcgcctcagagcggaagaagatct

SEQ ID NO: 54331 - DNA, 376 bp, Homo sapiens
caacaggaagccagcgcggcatggctgccaccgacttcgtgcaggagatgcgcgccgtgggcgagaggctgctgctcaagctgcagagactgccccaggctgagcccgtggagatcgtggccttctcagtcatcatccttttcacagctactgttctgctgttgctgctgatagcctgcagctgctgctgcactcactgctgctgccctgagcggagaggcaggaaggtccaggtgcagccgacaccaccatgacggacgggcgatggctgaggagaagctggagaggagatggccaatgccatgacacaggccatcagcctggccctgcagcccttacccctcaagaccaggctcccctgccccagctctggcca

SEQ ID NO: 54332 - DNA, 671 bp, Homo sapiens
cccacgcgtcccgaaacgattaaatgagggaacatatgcagaggtgcttttaaaaagcatatgccaccttttttattaattattatataaaatgaagcatttaattatagtaataatttgaagtagtttgaagtaccacactgaggtgaggacttaaaaatgataagacgagttccctattttataagaaaaataagccaaaattaaatattcttttggatataaatttcaacagtgagatagctgcctagtggaaatgaataatatcccagccactagtgtacagggtgttttgtggcacaggattatgtaatatggaactgctcaagcaaataactagtcatcacaacagcagttctttgtaataactgaaaaagaatattgtttctcggagaaggatgtcaaaagatcggcccagctcagggagcagtttgccctactagctcctccgacagctgtaaagaagagtctctggctctttagaatactgatcccattgaagataccacgctgcatgtgtccttagtagtcatgtctccttaggctcctcttggacattctgagcatgtgagacctgaggactgcaaacagctataagaggctccaaattaatcatatctttccctttgagaatctggccaagctccagctaatctacttggatgggttgc

SEQ ID NO: 54333 - DNA, 410 bp, Homo sapiens
gtttgtgctggctgaagtgcactatggggatggcagtagagatggagaggcctagagaattacagttgtatattggcagctgaaaacaagggccaaaaatggactggctgtgggaaagaagaagaaattgatccagagaggtcgtgacttgcctaaagtcacagagcaagttaatggcagagccaaggcaagacccaggactcctgactccagttctacgacatcactgtcctagggccatttcttgatgaaggtgaagccatcagtgtctacagcttcagctattgcccgtgtgcagatggtgcttaatctctcttgtgccttccagacctgcattccagccacctaccaaacccctttctgtggatgccaagaaaagtcttcagaccgtggacaatgtgctctttgcc

SEQ ID NO: 54334 - DNA, 379 bp, Homo sapiens
tactgggctccatcctgagctccatggagaagccacccagcctcggtgaccaggagactcggcgcaaggcccgagaacaggccgcccgcctgaagaaactacaagagcaagagaaacaacagaaagtggagtttcgtaaaaggatggagaaggaggtgtcagatttcattcaagacagtgggcagatcaagaaaaagtttcagccaatgaacaagatcgagaggagcatactgagtttgcaccctcagatgaagagctagactcttaccgtcgtggagaggaatgggacccccagaaggctgaggagaagcggaagctgaaggagctggcccagaggcaagaggaggaggcagcccagcaggggcctgtggtggtgagc

SEQ ID NO: 54335 - DNA, 313 bp, Homo sapiens
gatcaggactcatgagccttttcctttagcgaagttctagataaattccagagttcagcagtttgcttaatgtattggtttcctattgcttataacatcaccccaaacttactagcttaaaacaaacacacttattagctcatagttctgttggtcagaagtttggcatggattgtgtatctgggatctcagaatatcacaaggctgaaatcaaaatgtcaggctgggctaagttctcacctggaggctctgggggaaaatctgcctccaggttcattcaaattgtttgccaaattcagttccttgcagttat

SEQ ID NO: 54336 - DNA, 472 bp, Homo sapiens
gatatccatggaccgggattatcactttgagtgctaccactgtgaggactgccggatgcagctgagtgatgaggaaggctgctgctgtttccctctggatgggcacttgctctgccatggttgccacatgcagcggctcaatgcccgacaaccccctgccaactatatctgagctgcaatcactgctgctgctgtcaccctgcagacaaactgctgtggccagtgggcccctctgaggccagccaaggcaaagaatgcactctgcaggcctggcagaagagtcctctggggaggaccccaagggccggagacccaaagatcatgatattccaaatggattgtggaagagaaaccttatatttaccagggtgggggcgactggcctttttcccatgtgtgcagtctgagcttaggcacacacaggagggttccaggactttctgaacatctgattctgtatcttcagtatata

SEQ ID NO: 54337 - DNA, 1420 bp, Homo sapiens
ttttttttttttgcggtgaactacagaatttattaaataagaaagctatcaattggaacaggaggaaaaaaaagttttaaaaaaaatctataggaaaatagtcaaaaaagcatttagtgctcatcgccgtccctctgaggggggccgtcagaaaggcaactgggacctgacagacccgggcacatacttgaaattcctgaattctaacctgcattgtacaaaatgccacttgaaacgtccaccagaacccccagccaaagaggcacatctggacagcttcacagcacggaacgtgtgaccttggtccccgtgggtcccggaggaggacagcagcagccacgcggtggcccctgcgcactcaggccatgactgcagggaccacccactggggccacaagagtgacccgggagccagagggagccctgagcatcggcggaaggcacaggtccctgcccggggtggccatctcagaggcacatttagtgtttgttctacttatgaaatcaaggacaaccaattgtacttatcttacaactgatgttctgggatgggactggaaaacattgattccagaaccactctttttcttaaaatcactggcttttatgacaatgtcttccaagagctcattagaatctataagatcgcaggaatttcgccaagaagggctgcatagaaaccacagagacaactcggccagggctgctcccattgtggtggccaagaactggctgagggcacgacactggactcttgcgatcaacactttactctgggtgaagactgcatatttaaggacacaactgcacatttagatcgagcggtggtgacctcagggtatacacggagcttcatgctgagaacacccaggggtcctcaagagtcttcctcctcgtctttaacttcagaaattctgtctatagatttaaggatttcggcaacaagattcagtgtctcagctccggaaaccagttgcttgatggaagcctgtgcactgttcatgaccacccggaggttctgaagggccacgtcggcgttctgcttcaccacggtcaggctggcaccctggccgcagcgcagggcttcattctctcgctggaagttggagacctgcgcctggagcaaactgatttcctgttttagtttcacgacgtggttttctgcctttacagcccgtttggtcatcagctccaggttctgctccacctgctgaaccaccgactccaggtcgtggtagtcgctttcctccttgatcatttttgcttctaacttccgctcaagcgtcctcaccatttctgtttgagcttcagagaagctctgaacctcattcagctttcttctcagcttagaattttcatctttcagtgcgtcgtaacttatctgcagcgtccgcaggtgcctgtctcccagagactgtcc

SEQ ID NO: 54338 - DNA, 961 bp, Homo sapiens
ttttcaaaaaccagaatgaaattttattgtgtaaagtttatagaagtatgactagtattcctttgtacaaagtacacaacggttttaaatataactgagagaaatgtgagtcctatgacaacatctgatacacgctgaaccatttacagacacactaaaaatgttttaaaatatcttctttctccaaagagtccattgcgcatttcttagagtagagatggggacacattccaggcaaggtcacaatggcattttgttgccctcaatgctgattttcactgcgtgtgcagatctgctttttttccttatatctgtgaactttctcatctgtttatccagtcgactgatacccttcttggaggtcgcctgaaacctggatgactccatttccacattccatttgggcctgacaacatagtccttgtttgaaggcattgggacccttgcacgggcacagaatccaggatctccaggtctaagagccttctcctctcctgtcagcaccttttccaggtctcttctgggtgtctgaccaccagtgctgttcattcttcgtcgttgaggcatctgttctagatctctctgctccctttcttctcttgtcattcctttgtagtttgaggtaagaccaaatataggcctagaccactcattgattaatttccctgccatgtccttgttagaccttgactccttggggtgtttatagagatacatcactgctcgtccaatcccactatgcttcagggtctcctggctcacactaggcagctcttgcaggatcttcagcagctcctcccggatcttgagtgcaggcaaactcctatctggtagaggtgagagccattctttgatggcagacatcacaccactgtcaatgaatgtttctttaaggtcctgcttcttaaggtgcataactacagcaggcagtaaagttaattttttcagtgctggctttttt

SEQ ID NO: 54339 - DNA, 338 bp, Homo sapiens
gaaaatttatccccctaacagcctggtcaaactgggctatagttaaagcagcctcggaaccgtttcaatcggaaaatgaggcttatcctccagcagaaagaatttctgcagaggaaggtggtgatgctgctgaaggaggagaggatagtgaagaagattttgaggaaaatacagacaaacctggagatgagttaatttcttttgaggagcacgtgggaccttcagctgctcctaaaatagagaagccatatatgccaagatgtttaaaacaaagaagggccttgaggagcagtcggctcctcattgggatcatccggagtggccgcctccaataaagc

SEQ ID NO: 54340 - DNA, 376 bp, Homo sapiens
ccccaagctggtcatggaactgatgcccatcggtctgcgggggctgatgatcgcagtgatgctggcggcgctcatgtcgtcgctgacctccatcttcaacagcagcagcaccctcttcactatggacatctggaggcggctgcgtccccgctccggcgagcgggagctcctgctggtgggacggctggtcatagtggcactcatcggcgtgagtgtggcctggatccccgtcctgcaggactccaacagcgggcaactcttcatctacatgcagtcagtgaccagctccctggccccaccagtgactgcagtctttgtcctgggcgtcttctggcgacgtgccaacgagcagggggccttctggggcctgatatca

SEQ ID NO: 54341 - DNA, 1532 bp, Homo sapiens
ttttttttttttttttttctcagaacattcacctttaattctgttacaggttccagtatttgcgctggccctagtcagctgtgggtaagagtcacccatgggcaagagtggggaggggactgctcccccatgaaccacatcctcagtgttggccaaataccagcgtgttgggtaggcttcctgtgtccaccaggcctggccatgtcctgcacagtatagcttggacctctgggcctgaaccagggtgagcatcaaggcccccatttctcctcaccacggggtcgcttgtcagctccaggagccagtctggccccactgagaacttttcagtcgagggcctgatgagtcttgggaatgcgcttctgcaagagggcccaggctttctccacctggcgttgggtgatatgcggctcccacaaggtgctgagcaccacgtggctctgttccacaagctgctgcccgctcatctggctctgcagccggctttgaagccgcggcttcactgaggccatccctctccacaatgcgtcttacagcctcagtctctgggatgacagcagtccacacctcatggaccaggttctgccagccggcttcaagcaacacagcggcatcaatcacacacacacgctttccctcagccacagcccgatccatctcctctcgggccagctttgcgataattggccacataatgtccgtgagtatcttcagctgcttcttattcccaaacacccggctgcctaggaccttcctgttgatgatgccatctttatggagaatatctgttccaaaggcctccaccacaggctggtaggcagggccacctggggcataggcccgatgacccaggtggtcactgtcaatgacaaacgcccccaggcccttcagtcgctgagctattgagctcttcccagagccactgatgccagtcagcccaattacatagagacatgtggggagctctggcctttcatatggaggccgaagcaggttccccaacattcgctggcggaagctggaggagctgactttgtcctcttcattctccgtatgtctgaggtccttcagcagctggatctggtacaaagcaagttcctccaggtcattctcaaggcggaagcggttgatggccatccccccacgataggtctcctcgctgaccaccaggaactccagggaggggtcagagccagcgggcccataggggtccagcagggggatgacatcaaaagtcaaggagggcttgatgtccaccaggaattcactcagatgttcccacacgttctgtataaggttggagcagctcagggagcaacttgctcttcaacagatctttgtctgctactcccaccacaagctgctcctgggccaggatgcacgcgacactgagcaacaccttgtgggcgttgtgcaggcggtcaaacgtgccaccgacagcgccacggtagtagccacgcaccggctgctttggagacccggccacgggggaagctggcctgatcgtggagggtaaggggacatccaggggc

SEQ ID NO: 54342 - DNA, 472 bp, Homo sapiens
gtcaggggagttgtaaaaccattaataaagataatccaagatggttaccaagactgttgaggacgccagagatcttgagcactttctaagtacctggcaatacactaagcgcgctcaccttttcctctggcaaaacatgatcgaaagcagaatgttttgatcatgagaaaattgcatttaatttgaatacaatttatttacaacataaaggataatgtatatatcaccaccattactggtatttgctggttatgttagatgtcattttaaaaaataacaatctgatatttaaaaaaaaatcttattttgaaaatttccaaagtaatacatgccatgcatagaccatttctggaagataccacaagaaacatgtaatgatgattgcctctgaaggtctattttcctcctctgacctgtgtgtgggttttgtttttgttttactgtgggcataaattaatttttcagttaagtt

SEQ ID NO: 54343 - DNA, 550 bp, Homo sapiens
  misc_feature (1)...(550): n = a,t,c or g
ctcatagaagccgccgagccgggaggtccacacagcagcagaaatgggctctgccatcctctgaatcacagcaggaccctggcgggcaagagaccaaaggccccccgtggggaggaagcccatctgccacctgtctcggatttgactgttgagtttgataaactgaatttgcaaaatataggacgtagcgtttccaagacaccagatgaaagtacaaaaactaaagatcaagatcctgacttcaagaatcaatgcagtagaaagagacttgttagagccttctcccgcagaccaactcgggaatggccacaggaggacagaaagtgaaatgtcagccaggatcgctaaaatgtccttgagtcccagcagccccaggcacgaggatcagctcgaggtcaccagggaaccggccaggcggctcttcctttttggagaggagccatcaaaactcgatcaggatgttttggcccgctcttgaatgtgcagacgtcgacccccatcagttcccggcccgtgcacagatggaagagngctgcctgtgctactcccg

SEQ ID NO: 54344 - DNA, 1164 bp, Homo sapiens
gagcattggaaggcccaaaccctctcccttgagtggccaccccagcctggttggctggttttccccttttctcttgtttcaattgggtctttaccttgaactctcctctctggctttgcggtgggctgtggaggctggttttgaccaaaagtgagtggggcgggaggaaggggcaagaggaagggttgaggttacttggggcgagtcccttccccttcagagaggcttctatccttcccagggaggaggcgccgctgagacccttctgctgagagctctgccctcccctcatcacctgggcctgtgcagaaacgctcatgcacacctggctgcacaggtgtgcacgcattacccttcgcgtgtacgttcccatgtgccccgtgaaagcatgtgtggctgcagacgtgtccacatgggccttgcgaacctgggttagaaaccctggccaggcgaacgtggggtgattcacagcacaaaagacctcaccaccacacctgcactcaccccaccttgcatgcaccttgctacctgcttgcggctttcagcggagggcaggggtctggcacaggtgcgatggcaccccatgctccaggcatacagatgtggtttctcggctgcaccgggccaggctgcgggtgtgcaggcgtctgctaagttgtgtgatgtatcagcacaggctttgagacgtctggaccctgtccttcctcccgtgaggggttcttgttctttctgactcaggtgacttttcagcccttccaattcccctctttttctgccctcccctccaactcagccaacccaggtgtgggcagtcagggagggagggagtgtcccaccacgttctcagggcaggaggaagggttgaggttacttggggcgagtcccttccccttcagagaggcttctatccttcctttgcacagaatgagcttcgagctttgttcagactaaatgaatgtatctgggaggggtcgggggcacgagttgattccaagcacatgcctttgctgagtgtgtgtgtgctgggagagtcagagtggatgtagagcgcggttttatttttgtactgacattggtaagagactgtatagcatctatttatttagatgatttatctggtaaatgaggcaaaaaaattattaaaaatacattaaagatgattta

SEQ ID NO: 54345 - DNA, 623 bp, Homo sapiens
ttaaggttcttttatcatcagatatgacacaaagggaaacatcaaaatgcaccgtaaagttaaatccctagttacctttttttgaagctgttggcaaggtttgaccacttggggcatcttctgctgtgagatgacacttgaaaaacacccatcaaagttttcctggtaggaatctctctttactgcgtgtttttttgaaaagctgacagagaatatgctttggctttgacactaatgaagccaccacgcccggcaagcatttacagttttaaatctcccagtcagaataaattcttattgagggccatacctagcctgtcttcatcaaactcatagggtgaatctttgtcaaacctataggagagagatgcaggccatagagatggtcttgctgaagggcttatagctaaattagttcagatccaggaaccagattctggaactgattgcacctatattatgttgtgtgtcagacactcccaggacctgtttggtaataattaggacagctgacatacttgttgctaattttgagatctgggcaacaactgtgtaggctgttctttcaacctctttcttcttacttctttacttttccttcagagaggagaaagccacccctg

SEQ ID NO: 54346 - DNA, 469 bp, Homo sapiens
aatacattaaaagattttcactttaaattaattagtaatattgagcgctcaccctgtgcgtggccttgtgctaaccattagcactgcatcatttcaattcttttataagggcattcaatactacaaaatcaacatgatttcataaggtgcaaataaaagttggtgacagatttaatataattttgatcacaatttacaaatgatctttgcaaatagtggtcagacggcattagtttttcccttagttaagctaaattaaagggactccatcctgttatgattatattattattattattattattatttttgaggtggagtttcactcttgttgcccaagctggagtgcaatggcgcgatctcggctcaccacaacatccgcctcctgggttcaagcgattctcctgcctcagccgcggccttggaggtaagcttggggaaattaccaaggcattgccgccactacacc

SEQ ID NO: 54347 - DNA, 369 bp, Homo sapiens
gggagagagactcaggtatagaaatatccttactgccacctgacctgaagcagaagaaatcacagacagcttccagaccaggcccaacatgtgtagcaccagtgggtgtgacctggaagaaatccccctagatgatgatgacctaaacaccatagaattcaaaatcctcgcctactacaccagacatcatgtcttcaagagcacccctgctctgcttctcaccaaagctgctgagaacaagaagtttgtcccagaggggcctggggaattgttcagcaaatgagtcatggacagaggtgtcatggccttgcagaaattcccaatccagtgagaaggccataaaccttggcaagaaaaagtcttcttgga

SEQ ID NO: 54348 - DNA, 678 bp, Homo sapiens
taaaatgtctagcagcaagaagagcaaagaaaaggaaaaagaaaaagataagattaaggagaaggagaaagattctaaagacaaggagaaagataagaagactgtcaacgggcacactttcagttccattcctgttgtgggtcccatcagctgtagccagtgtattgaagcccttcaccaacaaagatgcctatacttgtgcaaattgcagtgcttttgtccacaaaggctgccgagaaagtctagcctcctgtgcaaaggtcaaaatgaagcagcccaaagggagccttcaggcacatgacacatcatcactgcccacggtcattatgagaaacaagccctcacagcccaaggagcgtcctcggtccgcagtcctcctggtggatgaaaccgctaccaccccaatatttgccaatagacgatcccagcagagtgtctcgctctccaaaagtgtctccatacagaacattactggagttggcaatgatgagaacatgtcaaacacctggaaattcctgtctcattcaacagactcactaaataaaatcagcaaggtcaatgagtcaacagaatcacttactgatgagggagtaggtacagacatgaatgaaggacaactactgggagactttgagattgagtccaaacagctggaagcagagtcttggagtcggataa

SEQ ID NO: 54349 - DNA, 526 bp, Homo sapiens
ttttttcctttggctttgttaacccaaacaggcgggtagaggcagaggtggacgcaggggcctggctctgcccttctggtcctttgtttgtctggctggttgaactcagtatgtgaaaaggccccttatctttgtgtgtccgagagatgctgttcctttttggggacactgaaagttctgagtccaatgaccctgatttggctatggaaggtgcagatggcgaggggggctcctcaggactggggaagaacgatgggatcctcatcagcttggtatgtggatgggaaacctgacacaggtcccgttctgtctgccgctggctgagccgctctgcctcccggcgcagctgctcctgttccctctcaagctgtttctgggcagcacgcagtcgctccaggtcatactggtatgtgcccttcttctgctggagctcctcccgctccttttccaggtcctgctgcccctgctgcacctcctcctcgcgctgggccaggagggcctccccgctcccgcagctccctctcac

SEQ ID NO: 54350 - DNA, 833 bp, Homo sapiens
ttttttttttttttcattgtttaaattaccatgtttatttatatcaacacaaaatacaataataaacacgacaaaaccattttatcttcatgtaacataactcttcagtgaacagaagtactactgttaatgttttggcctttccaaggtcctgcctggggtcaaaacagtattcagagaaagagcagattcttctctaccttccctaaaacacacacaaaggtaacttctattttctaaaatcccattccaataataattaaaaaaacaacagtaagtccacgtagaggagaggattgctgttgtgttatcagcattgcaacctgtatattgctgtagatttcccccaggttctgcgcatcagtcaggaacataaagggtatatcagcccttcggattttcaaggtgatttttcagtaattctttcacctagccctgtactctgtaaaggtctgatttacctgagttatctagaaaccagcaaaaaaagagtctccaagtgatcaaaggtatatggatctatcttgtagaattgaagaaacttatagattttgctgtgacaattcaatggacaaccacgaagcctccactacataatgaactattcacctagtaaaagcttcacattacaatttaatcaaaggtaataaacattgcacaaaagtacaatatctcatctatatgccagcagtttaaatgctatttgttcagtctcgaacattttcaaacaaatgacagttatcacttaactaacacaatctttctattatttcactgacaaaagaggcagtttcctgcagtggaaagaggagatggcttggagttagaagagc

SEQ ID NO: 54351 - DNA, 423 bp, Homo sapiens
  misc_feature (1)...(423): n = a,t,c or g
ccatatttaggtcttgattcaagcaaaccaactaaaaaagcaaaccaaccaataaacaaaaaacaacaacaaattataatgtggacactgatagaacatttgatgataattgaggaattattttgaactttttggtgtgataatgtagatgaaatattttatcttaagttatttcctagcactcttcaccaaaacgacctggaaacgatgaccaactcagtattaatgggcaccctagtgtccaggttgtaannnnnnnnnnnnnnnnnnnnnnnnnnnnnnnnnnnnnnnnnnnnnnnnnnnnnntgtccaagtctgcagcattatatatacacgatgagcctgggatgttttgtcacaccagaaagccagatgaaatgttgtgataatttgggttttctccaaaataatccactggaaagg

SEQ ID NO: 54352 - DNA, 1890 bp, Homo sapiens
cacgctgggacctatgtgtttgtgtggtcgttccaaactgccccagggctttgggggcggcacttggggtttctgggaatgacatcatctctataccccatccccagtagtttacattcctgacttctgaatacagcacagctgagccccctgcagctcccatctccagctattcctaggcaaagagcctcatggctaaggcagcctcaaagccagcccctcctcccacctattctgagtagctgcagaggccttgggtccaggctctaggttcatccctcagttggggggaacgtaggacccagctggagcctcttgagggagatgagaggcctctttgtgaggaggacattagctgtgtggcctctctctctttggccctgtttccttttttgcaaaacaaggacattttctgcagccccttcctctcagtgagctatgattggagggcttaggtctggaggattcaagagtggaagaggaatttaaggggtcccctagtctagtctctgcccctggatagtgtccagccttgtatatttctgaagaggtggatcccagagtggctctgatgtccacattagaaaaacttacttgtaatgatcatgtcagccttcagaagagaatccccaccaacttctgtgcctcctcagatggggatttatctggatctctgtggttccttctcagccgaaacaggtccagtatcccagtcatttcttcaaatgctgataggggtatgttggaatccgaagccacttccccgccttcaagccccagatgggctgctctcctgtaactttctaggagaagagacattttcttctttccctttcctgggtccatccctgcaccctgggtcctctcccagcctctcccccacattgtccctgactctaggggcacatccagttttccatcgtggctggcagcagctgggactgaggggcagagcctgttagggtgcagaggccctgggttcccgaggtccagccactctccctgggggcctctggggtgagagcagcttccgataggacctgcccagatttctgcatgttgcacttttgtttactgaaagagagaaaggggggggtcacagcaacatgccctggcctttctgctctgttccccaaccccactgaggcctgctgcacaggtcaatgccttcgttatcgttattgtactgtcactttgttcttgaggtagtagtcaaggatcaggaggggcagatgtcttctctgggctgcgtgggggccggagcagaggtgagcagcagtgcactggttcgggagcccccatcagcctccttgtgcaaactgggcccccatgccacagtctggctttccctccatctgccccaggacaagagcaagaaggacatcagttgcccagtcatgtgatcccctgccatcttgccttaggaacagccttcccccaccagcagccatggctggctggggctttagccaagccacctactgccaggaattggagcctcagttccctcctgtgtcaagtagctaactgcagcagctggactgagggcagagtctgtgggtgcagagaccctgcatgtaggtcacaggttgaggcccagccactctccctggggcctggtgggtaggcaagtagctctggggccacctcaagtgaccaaatgctattaatttccatcctttagcaggctgggccctaggcagggaagctggcttctgggagaggagtgagaacgtgcagggcctgcctagcttgcgtgcttgaggaaggtggcattccgtgcttgcctccttgaggagggtggcattctgtgtcttctgcttatgaagcgcctttcttaaagtttggcaataaatccatttttatggaaaaaaaaaaaaaaaaaaaaaa

SEQ ID NO: 54353 - DNA, 453 bp, Homo sapiens
gctactgctgcctgttgctgagaggaagaccgcagaaaattctggattcaaacatttattgctttttttgttttgctttgtttttgttttctttccttttgccttcagaagatgaacaatgaaaccacaaccctgatatccttgaaggaggcaatgaaaagagtagaccacaaactccaagcgttagaaacacagttcaaagaactagacttcaccaaggataacctgatgcagaaattcgaacatcatagtaaggctttggcaagccaagcagcccaagatgagatgtggacagcagttcgggcactccagctcacttcaatggaattgaatattttatacagctacgtcattgaagtacttatctgcttgcatactcgtgtgcttgagaagctgccagacctggtgagaggtcttccaaccttagcctctgtactcagaagaaaagttaag

SEQ ID NO: 54354 - DNA, 880 bp, Homo sapiens
ctgggacccggcaccagggaagtactgtggccgctgcggcctcagctccgactgggtcaggttgcggagactccaggccgcttccagggcgagtactcctgattgtgacatcacattcatcccctgggcgatggagcttgtcactgggaaggaatactcagtcggagaatagccaacaagatgggttactgggagaatctcttcagtggcactgagtggaggcatcagggggttggagccttgtgaacagggaacctgccccccaacacttggaaggacctgggtttcagtgatgagacatggggtatgatgtaacccgtttccagggggatgttgacgaagatcttatctgccctatttgcagtggagtcttggaggagccagtacaggcacctcattgtgaacatgctttctgcaacgcctgcatcacccagtggttctctcagcaacagacatgtccagtggaccgtagtgttgtgacggtcgcccatctgcgcccagtacctcggatcatgcggaacatgttgtcaaagctgcagattgcctgtgacaacgctgtgttcggctgtagtgccgttgtccggcttgacaacctcatgtctcacctcagcgactgtgagcacaacccgaagcggcctgtgacctgtgaacagggctgtggcctggagatgcccaaagatgagctgcccaaccataactgcattaagcacctgcgctcagtggtacagcagcagcagacacgcatcgcagagctggagaagacgtcagctgaacacaaacaccagctggcggagagaagcgagacatccagctgctaaaggcatacatgcgtgcaatccgcagtgtcaaccccaaccttcagaacctggaggagacaatt

SEQ ID NO: 54355 - DNA, 997 bp, Homo sapiens
gctttgcttcctgcccctgtgctcggggcctgggtggttactggcgtgtagatggaattgcttttttaatatgggaagatacatttatttttttccatgtgggtgggtgtctctttttggattttcttctgtttttacgtttctcttcttagaagggtgggagagaatcaagctcctgtggccacctgtgtcccagcagcagtgagtggagctgctcagggtgccctctcctgcggaccagtctctgaatgttcaaagatgagggcctggcttccgtgctctggctttgtaacttatctggaagggaaagcacatgccttcacgggcagggtatgttccttttcttctcggggtgttgacttgcattcctgtgtgaactgttccctctgccatgtttaccgtgtgatgttctgtagttgaaaatgttagttgtctgctggcacagaatttatctcgttcctttctctcccttctctcctccaaatcagtctcttcccttctccactagataactgtaaaaccttttcctggggtacatacattcgttaactcttgggcagtggtgagcacgagatgactttctgcagcgtttatcactgttgggtggagtcacgtcccttccctccaccgaagtcatcaaccagatagggaagggaaagatgaggcccagaaaacgagttcaaactctaggtcttgtacacgtatgtaagtaaatgtcaataacccaagcctttgtcatagcagtcacttggttgacttaggatctgggtctgttgaattttgtgcttgggaatggagctggagggagtggggcctgtgtacagcagctacctctcccaggtcctctcacttgcctgccccgcgtcctggttgcatggccgcacctgtgtgtgtgcagaggtctgtgtcccatcctctgcacctcctttccgggggcctgcgggagccccacgtgttgccaagatcttggtgcaataaaatactccggttttgtgag

SEQ ID NO: 54356 - DNA, 395 bp, Homo sapiens; identical to SEQ ID NO: 41077

SEQ ID NO: 54357 - DNA, 529 bp, Homo sapiens
taaaaatcctatcctaggaaattggtggtggggctcagaaaatgataccccaaagtatgaagctgtgggaggctgaatgctttgaactaaagtatctgaccatcgctcactccttttccctcccaaaaccctcctgaagcgcagggaggggccttctctgatgttctcttttgtttctaagggaagttcctgcagaaggaatgccattgtcttgagccctttcccctagcatctcataaaacatggacaattaactcacaggaaaggatactgaaggtgataccatctcttctgaggactgggctgcttgagaggttttatctgcatgacaagacagcctttgtttgccatgcatttcctcccctcaacctcctagcgtctgctgccacctcctcccagaaacctcaggccccagtttttggagctcaaatgctatttagacttcatcagtctggcccttactagagtctcacattttgtgggactcctgtgcatgtatgtaataaatttgcatgccttttctcctatt

SEQ ID NO: 54358 - DNA, 761 bp, Homo sapiens
tggctgcccacaggtctgcaggcactcggtacgccgctaacgcggcgaggtagctcggtgcgtctcgcggtaccagtgcgaatcatcgggctatccaggtccgagatcctagtctcctgtcggctctgaggaggatggatccttctgcggatacatgggacctcttctcacctttaatatcattatggataaacaggttttacatttatttgggctttgctgttagcattagcctttggatttgtgtccagattgtcatcaagacgcagggcaagaacttacaggaaaaatctgttccaaaagcagctcaggatttgatgacaaatggttatgtctcccttcaagagaaagacatctttgtgtctggagtgaagattttttatggttctcagactggaacagcgaagggattcgcaacagttcttgctgaagcagttacatccctggatctgcctgtggcattattaatctaaaagaatatgatccagatgatcatctgatagaagaggtgactagtaaaaatgtctgtgtcttcctggttgcgacatacactgacggcctaccaactgaaagtgcagagtggttctgcaaatggttagaggaagcatccattgattttcgatttggcaaaacttacctgaagggtatgagatatgcggtatttggcctgggaaattctgcctatgctagccacttcaacaaggttggcaaaaatgttgacaagtggctctggatgcttggcgcgcatcgtgtgatgagtc

SEQ ID NO: 54359 - DNA, 772 bp, Homo sapiens
ctctaccacagggagcagggagtatgtgagtctccttcattgtgctgatggactaccagctggcagggcccagggggtgggtgggccgtgaaagccctcccctccactggacagcactgccccccagctgagggaccagctctacttccacctggagttgcacagtctcaggctgggggcctcaggagaggtcacagcccctcagtctcttctccttcccctgcctgcaacaggctgcctgccccgccttccccaacacctcgctccatatgatagagcgtggcagctgggagcaggcccctgcccgtggtgggcccctaaagcaatagcaccgtaggccccctgccctcttagcacaagaggcccaggccctggcctggccttcgtgccctttattcattgtcaataaatccgctcagaccattacagctgcttcgcatcctggctccagctcctgattcccaaggcctgttcctctccccagcccaaccccagtgaccctggcatccagagtggggtgggtcatggagccagggtggggaaagaggtgggccagaactactagagaccttgatggatggtttccagccccagagatttcaggcatttcaccaccctagatagggtcatgacagaagagaaggtagttccggtcctagagatgatagaacaatgggaaaaaaaggagtgggttccagctctagaaatgggaaggggcaagtttccacccttggaggtgagggtggaaataaggggcgattccagcttttgg

SEQ ID NO: 54360 - DNA, 970 bp, Homo sapiens
  misc_feature (1)...(970): n = a,t,c or g
tcagggcgagttatttctttaatgaaaaagcacaagcccttatgtgtcgaaatacacgctgttacactgaaaatatatgcacgacagagcaagaagcttgtgcatgatcacttcttatccgtccccttcccagcactccctcctcttcccattctctccacatgtctcaagcaccctaccgagtagggcaggccaaatgttccttgggagtaatgccaactcccgacgttgccttcaggtccaaagggcttggaaccagctcgtgaggaagttctgaatctggcactaatattcttgagtggataatagtgtatcatagaataggacggaaattgtattgagatgtgaccctgtgtcgcctgtggaaaggcatagtgagaagaactttcccacgaaagcccccttcatcgttgttcagtggtcggctgtgtggatcccaggagagacatatgccacagactgtgagagcaaagcccgccgctgtgatctggacttgatgcactgtgactgagaatgatttccaaatgtgaatatgtgtagggacgtggtctatcaggcctggaacaagatgggggcagtgaaggtatggtttagtgtttgctttcatagtatgccatgtacaatgttttatatttcatagtttcttttaagtaactaccatgagtctctctaagcctcatggacaaagatgtagaccaaatgcaagagctgagcttgctttgggttcaaccatgatcaaagaaaaactgaggtcacctgcaggcttacgtgggaagctaagaaaatatcacagaaaaatggaaagaaatatggatgtgcagaggtaataaaaagagctgctgctggacatttatcaaagataggcaccttacagtatcttgttgcaagtccaaatcaggggagactttgttaatatgtatcttttgctcaaatttagtagggttttttttttttngnntnanggnntttt

SEQ ID NO: 54361 - DNA, 1414 bp, Homo sapiens
tcagatggctgggcttttaagaacaacatggacatcagaaatcaccagaaccttcaggatcgcctgcaggagcccatctactgctggccaggagcccccagtgccctgtggtggtggacaccatgcagaaccagagcagccagctctacgcagcactgcctgagaggctctacataatccagggagggcaggatcctcttacaagggtaaatcttggcccttgggaactacaacccagaggaagttcgtgctgttctggaaaagctccacagttaatctggacagatacctcaattctaggtgaccaacgggagggcttctcaaggcttagctctccctgagacccagctggcttttacccttgacctgtgtccctagctgaatcactagctcagatttttctgatctaagcaaacaactcccagctgaggaatgcagggccacagcacccaatcaagacaaattgttattatcagaaaatgaagcaacacttgagctgttcaggccagttccctgttgaagaaacagttccctgttgaagaaagtagagcctgacactgctcccactttggagaccacattccctgcacacggtctttgagagagcagttgcactctacaggcacacttctgaggtacggtatctctctccagccactctgataccaagtaattcaagctggcattccttctattagggaaattcattttacccaatttgcatttatggaattgatcatttaagacactaaattagtttttagaaccaattatgggaagaattccagttgttaggaagagatgaggagttggaagaggagggattagaaacaggaggaggcagtcatcctctccttgccaaaagatttaaacctgttccacattggtgggtgatgatgggtgagtttccatggtaacacatccctaattttaccagggaagaggagagtactcactttaccatctttgaatatatttcatagaaatctagctctctggtacccctgaaatcttcccactagccctcacttttcaacagagtcatctagaagggagggttggcttcccaaaagcataaccttgaccaaaccaaacaataggcacccagcaatgctgtcattcagttatgcagaagctcatttgtgaaattctgtttctctgatttcttcgcaagtctcttaatggtcatttgtgttagattacatcaaactgatggatagccattggtattcatctattttaactctgtgtctttacatatttgtttatgatggccacagcctaaagtacacacggctgtgacttgattcaaaagaaaatgttataagatgcagtaaactaataacagaattattaaaatatatcaggctaaaaaaaaaaagtcgacgcggcccgaaatttttttagttatgta

SEQ ID NO: 54362 - DNA, 1058 bp, Homo sapiens
  misc_feature (1)...(1058): n = a,t,c or g
gtaaatacaggagtcttttaattccttgtaaggaaaatttcctggataattccatgtattttaataatcacagagatagtcctatccttattcattatcaaaaatactgtggtaacaatttatagatgcacacaatctcatctattttgacataaaaaaggcagaaaggcaaaatacaaattctgagacagagagtaaaacaatacgacatccttaggtttatttattttattgtttgtttcactgtttgaatgtttatcttgcgagagtctacagaattgagagaaaatatctgcaggctaattttacataacatgaggcaaagattaagcactaaatataaaaaataaaacttttagcttgcttattaaactaggaagaattttcctgaaacacagcagttaaattggtctacaatgcattaataaatggagaacacggatctcgcctatgaaatattttaaacattgtggacgctaccaaaaagctcattggtatataaaaattttcaagtcacagtcctctaagcagactaaatacaagttagtttttaacctgaattcagaagtgcaaaatctgtaaaaataaaaatatttccattgttctcagcaatctatggattaaccttacaaatccttaaagtcttttcagtaacatgaaccatgatctcttgacaagttccttgcttaagtggcaagtaacttttgaagctggacttctcaatctgtagagagaagcaagctgcattcacagcattgctcccttttgaaaattatcttctgaagagaagaaggtccagcaaagatcttcagtgcaatactccctgcatatgtgcaagtctgcatgagaggtccccccacaggtgcagctgccagccaacgaatcagaaacagatgaaagaggagagaagaaaacagaggtcaaacacttcagtttacagatgctattccagataaaatcgcaagggcnnnnnnnnnnnnnnnnnnnnnnnnnnnnnnnnnnnnncattccttgtcatttctatcatttgatacatctatacttctgaataatcatga

SEQ ID NO: 54363 - DNA, 729 bp, Homo sapiens
gagattctctcccaggccacaagacatttcctgctcggaaccttgtttactaatttccactgcttttaaggccctgcactgaaaatgcaagctcaggcgccggtggtcgttgtgacccaacctgggagtcggtcccggtccggccccccagaactccaactggcagacaggcatgtgtgactgtttcagcgactgcggagtctgtctctgtggcacattttgtttcccgtgccttgggtgtcaagttgcagctgatatgaatgaatgctgtctgtgtggaacaagcgtcgcaatgaggactctctacaggacccgatatggcatccctggatctatttgtggatgactatatgggcaactctttgctgtcctcattgtactctttggccaaatcaagagagatatcaacagaaggagagccatgcgtactttcctaaaaactgatgggtgaaaagctcttaccgaagcaacaaaattcagcagacacctcttcagcttgagttcttcaccatcttttgcaactgaaatatgatggatatgcttaagtacaactgatggcatgaaaaaaatcaaatttttgatttattataaatgaatgttgtccctgaacttagctaaatggtgcaacttagtttctccttgctttcatattatcgaattcgaatttcctggcttataaactttttaaattacatttgaaatataaaccaaatgaaatattttactgaa

SEQ ID NO: 54364 - DNA, 833 bp, Homo sapiens
agtactgttttgttttgaattcatgcatatcattgaaaatttctcgttttcattttcttagatgacttcttgtctgagacagaaaaatttcctactacagcagtgcagtccagaggttaagatgtattagaattatacaatatcagtttaaaaatctgtatgcataaagaatgcaccactcaacttttttattcataagctaatatttttttaaagttacattaagattttttctcttttgcagctacatttgaaagtgatagaataaagagattttaatgagttaatcactttttcagctgatatattcattttaatggcttttttgaaagttcctttttcatgaacacacccgaggaaatcttaaataggacactttgcaatatttaagaacctaatgctgtttaattttggtacagcttccacattgcatgttcactttagtatttgcaatttgatatatttcatggtggcaaaatattagctctgttttgggacattttaaaatagaactatccttgttcgatagcataggaaaatgttctggtgattgtcagggtctcctaatatttatctcaattcttttataagtctatggaaattatttaattattttaaaacgtacacacttttcttgtaaatatgtcacatctgagttcaaaaaaattactttgaataccttaatatttgctgcatttttttccgtatatataacatgtcttctttcagaatgggaatatatgtgtgcctcccaacatttactgttaaagtgtgttatctttatatgtcaaactggttgaacactgtaatgagaataaactgcacagagttta

SEQ ID NO: 54365 - DNA, 223 bp, Homo sapiens
  misc_feature (1)...(223): n = a,t,c or g
tggggcatgtttttaatccactgtgctgatttatgtcttaattggtatatttaaatttacacttaatataatttctaatatgctagagcttagttctgccactttattttttgtttgggttctgtttttgttttcttcttgccttcctgtgagtttcttgaatattttttagaattccattttgatttatctatatagtgnttttgagtgnatctctctatac

SEQ ID NO: 54366 - DNA, 311 bp, Homo sapiens
tgacctaagaccacttatttgtcccaagtcttgctgctactccttggtgagatcccagaagcagaacacaccatacatgtgacgggagaacatagggtaggagaagaaagactcgtggaatcttacatgttggagctgtttgagggcccaggttcctagcttagcaccagatcatagaggaattctgcttttttcagttacatcaacacttcaaattttttagcctgagctcttcagccggcattccagccagccccacctcctgtgttcccttctacttctgcctcatcaaggctgtgggcgtttccatc

SEQ ID NO: 54367 - DNA, 1361 bp, Homo sapiens
  misc_feature (1)...(1361): n = a,t,c or g
ttttctttaaggtgacaaaaagtgtgggaaagattccacacctccctccccacgcccgccaatggtcctttacctgtccatgtttcagattaaataattagctcaagagatttgcacagaaagcgaattagcccttttctagtcagactgttaagctctcaggcgggcaactcggaaccccgtttcctcaccgaaggctcaggaggccagcccagtgagggatggaggtggctttagagggcgacagttgtgcagcactcatgagcaacagtgcccaggacttttgaagtcacgaagggctcctgaaaccgacagctcaggtcccgcccctggggcgaccaaaaggagtcttgggggcgtgccgccggggtggaattgtggtagcagatttttgggggaggagggcgcaaagcagctagaaacgcacatcctcattctggaactatcccaaggcccccatgcttctcagcaggcctcgggctcagattgggcgggttggagccttccaccccaccttgggttcacccgcccgcaaggcctcgcgcctcacccgatccttctagagtgctggagctccacggagcctccctaaccccccagcagcggggaagggagggcgagggagtggggaagaggcccgttattttgatctttcctgaattcttaagtcccttccatacccaggacatgagcgcgtttaccaggaaccgcagagaggtgtaaagacttcttgcagctgctcacccttcctctccccttactccttttccagtcctccccaccccccagcatttcgtgggtggggactgaagataggttttcttcgttgtcctgtgggtggtattctgattgggaagggatttttttcaattgtttacattctacctgagcagggaaagggggtgccaaaatgaagcatcattcacgtccagtcacatatgcagagacggggcaaacgtttgatgcaatcttgggtctcgctgctcccggggccgacaccgcaggcgatggcctaagacttacctgctgggtaggcccgaacggcagtcccagacttaccctgggcagcggaaacaataccccagagcaccgatcgctcactgcagaactgttcccgctgctagggcacggctgagcgcgggcaccgcgtctctcctcgactcgcaccgcctatgcgccccagcctagccaggaatactgccctccccggactacagccctgctgcgtggacaagggcgaggacccaccggaaacagagacgcgagcccccgcccacctacctgctcctgagccggcctcgcggggagcgggcacctggtggcaggaacacgcgtccggcagacccnaccttctaccttcc

SEQ ID NO: 54368 - DNA, 796 bp, Homo sapiens
  misc_feature (1)...(796): n = a,t,c or g
gccacctcacctggcggtacaaagaatttctgcattttcttccctggcccctagtcctgcaccgatttctccttttcgaatgtattcctcctgccaccttctctgggcaacttcgtgcgactacagaaccactgtcctgaggagctagaggcctcctctctgaccatccagagcccaaatccacagcttccccaaatttcatcagctgccacttgacgacttctccccgtctctctgaggcccggaaaccacggctggaggtggggaggggatggcggctgaggtccattcctcattctcagacctcattgctcagttgcactatttggggcacagaataatcaccaaaagtgagaaaaacgagtttgggtggctggggaggactttgggactcttgatgcaaggcgcaacttgagaaaattctgggtgtgatatttgcacagacaccctcctttcaaaaacagccaccccccaagctattctcagctccacacctgcagccccagctaaggtaccaggtctcctgaggcaaggcagagagaagccttgagccttctctgtgtcttctttcaagaaccccgctgtgtcttctttcaagattttttttttgagacagtttcaagatttttgttttgtttttgagatgggagtcttcactgtgttcacccgggctgaggtgggcagtgggttccaatcttccgtttcactggccaccttccaccttcccggggtttcaaggcgatttttcctggnttcagcctcntcgatagctggggantacaggnacctgccactt

SEQ ID NO: 54369 - DNA, 148 bp, Homo sapiens
cgcccggctgctgtgatagttgagatgtaaaccaaaaataaaattctagcccccaatccgactgaatggacccttcctgttgagcaaggacattccaaagtaaactgaaaagaccagcttaggtcatgatgggaaggggaggtgtcaa

SEQ ID NO: 54370 - DNA, 430 bp, Homo sapiens
gttgatctccatagtgtgaaaatgacttgggccagtttaacttgctcttttttttattttttcactaattcccttttgtttttctctgataattcttctctttcctgagcctctttagagcagcacttacaggattgcctctgtaaagccttattcctgtcccagaaaaggtaacccaaaaagtctctagtatccactaaaaggtaacccaaaaatctctagtatccactggctttctccagtgtggaagctttcccctccacctcccatagatcactggaaaggacccgaggcctcggttctaatccctggcttatcactaactgctgtgtggctttggcttgtcccttagtctctgtgagactgctgcaccctcatctgtcaaagatggaactgaacttagttgagctctgaggccctgtggacttgg

SEQ ID NO: 54371 - DNA, 412 bp, Homo sapiens
ccctcgcccgcctgggcagggcccggcgccgtccgtggatgagccacagaacctcttccaccttccgagcggagagaagtttccattcctcttcctcttcctcctcctcttccacctcctcctcggcctcccgtgctctcccggcccaggacccgcccatggagaaggccctgagcatgttttccgatgactttggcagcttcatgcggccccactcggagcccctggccttcccagcccgccccggtggggcaggcaacatcaagaccctaggagacgcctatgagtttgcggtggacgtgagagacttctcacctgaagacatcattgtcaccacctccaacaaccacatcgaggtgcgggctgagaagtgccagctgccggaggacgtggacccgacgtcggtgacctc

SEQ ID NO: 54372 - DNA, 480 bp, Homo sapiens
acaggctgccgctgaggagctggagctggtggggactgggccgcaatggacaagctgaagaaggtgctgagcgggcaggacacggaggaccggagcggcctgtccgaggtacagcctttccttcataccatttgcaagggatgctgtgaagaagtgttttgccgtgtgtcttgcataattcatggccagttttatgaagctttggaaggcactatggacagaagctggtggacagttttgtaactatcttcgaaacctctgtcttacagacatgtgccttttatcttgcagcaatgtgttgcttgtgattcgaacatttgagggttacttttggaagcaacaatacattctcgaacctgaatgtcagtagcacaggatgagaagtgggttctgtatcttgtggagtggaatcttcctcatgtacctgtttcctctctggatgttgtcccactgaattcccatgaatacaaacctattcag

SEQ ID NO: 54373 - DNA, 461 bp, Homo sapiens
ctctagttcaccagcacatccaaaacaaacattagaaaacaaccacccaaatccattcttgacaaatgcacttttaggtaatcaccaaccaaatggagttattcaaagtgtcattcaagaagctcctctagcacttactaccaaaactaaaatgcagagcaagattaatgaaaacattgctgctgcaagtagcacccctttttcctcacctgtaaatctgagtacaagtgggagaagaacccctggcaatcagacacctgtaatgccctctgcctctcccatcctgcatagtcaagggaaggaaaaagcagttagcaataatgtaaacccagtaaaaacacagcatcactcccatcctgcaaaatctttagtggaacaattcagaggaacagattcagacattcccagtagtaaagattctgaagattcaaatgaggatgaagaggaagatgatgaagaag

SEQ ID NO: 54374 - DNA, 389 bp, Homo sapiens
acagtggacacctaacagcctgagccatgtgtggctgtcttatcccccaagggttgtccaggcccgttctgcagggctgttgtgtagactgcagacatccatacctcaccacagaccaaagatgacctcgtgtcagactgtgggctgatgagaggtagagcagcatgcatcgaggcctgagggtgcagggcgccctctcttggcctggaggaattgctcctaactagagtaagtttccacgagggtcccaggcagagctgcagagctggaaccggaggctccacagtccttgcctgctcatggacctccttcagagcacctttctacagactggactgcccagctccgtggggtggcatctggtttctggtgctattctgccaagttat

SEQ ID NO: 54375 - DNA, 358 bp, Homo sapiens
gccatgagcttcaataccctggtattcagtgtccactcccctaagggattccccaaaccccaatcatctcagctctctgggacactgccctgctagctcccaaaccgagccccaggcaccccagcaagcattaggccaacccgccaccaagctactcccacacccgcagccacccagccccagcccagcagcaaaccttgagtcagcgccaccagcctctgcacctctcctcctctgcctccactctgcccagctgggggaagctcaggcaccacctgaataagaaaccccagagtccttaccgatggtcagcgtgtcactctcatggtcgctgcccaggccagcatcagaactgtct

SEQ ID NO: 54376 - DNA, 658 bp, Homo sapiens
gatctactcgaaagtatgtaagtgcactcacattcttcaacatttcctcattaaagccagatggaattgggcttcttatacttgctattcattcatttaatattattagagtgtctaccatgtagtaggcattttctgtaaatgctggggatatcttgataacaaagacaaaacctttccccacatagatcttaaattttagtgcgaagagaaagacaatgactattttgaagttacgaaggggatttgctgatttgaatgcctacttaggagattcagaagtggttggatttaggtgcttagattaagtcatcaggaatttccaccttctacccataacagtgagcatctgaaacttacaaaacaatatttcctattttacttcattttattttagagacagggtcttgcctgttgctcagtctggaatgcagtggcacaatcatagctcactgcagcctcaatttcctgggctcaagggatcctcccaaagtgctgggattacaggtataagccaccatgcccggccaagatactctatttttaatttacagtttatatcaagacactgagccaggggaatttgaagtcacccatccagtggtcttagcatctttgctcacacactgaatgacttgatgtaaatgactgaatcaga

SEQ ID NO: 54377 - DNA, 349 bp, Homo sapiens
ggtaaatctccgcagtaagtacagttcaacgactgagaacattgtgatgatggtgacctttaagcatctgaattctgatgatacttatttatctataaatgagaatgacaatacttagattattaggataatggggaggactaggggaggactagagtatataaagtgcccggaatcatcctgggtgctgtcttagtgtatcagatatatttcaaaccttagtatttgtggcctttgaatttaaacagttgctgttattagcttcaattgttagagatagtgtcaatgagtggaatatgtcagctagaagctactccttttagattttccacattctgaaaggtaggac

SEQ ID NO: 54378 - DNA, 2033 bp, Homo sapiens
cttggtcccgcagagccttggtacttggacctgaaccttgctccgagagggaggtcctcgcggacgtcagccaagattccagaatgactactatcttgacttacccctttaaaaatcttcccactgcatcaaaatgggccctcagattttccataagacctctgagctgttcctcccagctacgagctgccccagctgtccagaccaaaacgaagaagacgttagccaaacccaatataaggaatgttgtggtggtggatggtgttcgcactccatttttgctgtctggcacttcatataaagacctgatgccacatgatttggctagagcagcgcttacgggtttgttgcatcggaccagtgtccctaaggaagtagttgattatatcatctttgggtacagttattcaggaagtgaaaacaagcaatgtggctagagaggctgcccttggagctggcttctctgacaagactcctgctcacactgtcaccatggcttgtatctctgccaaccaagccatgaccacaggtgttggcttgattgcttctggccagtgtgatgtgatcgtggcaggtggtgttgagttgatgtccgatgtccctattcgtcactcaaggaaaatgagaaaactgatgcttgatctcaataaggccaaatctatgggccagcgactgtctttaatctctaaattccgatttaatttcctagcacctgagctccctgcggtttctgagttctccaccagtgagaccatgggccactctgcagaccgactggccgctgcctttgctgtttctcggctggaacaggatgaatatgcactgcgctctcacagtctagccaagaaggcacaggatgaaggactcctttctgatgtggtacccttcaaagtaccaggaaaagatacagttaccaaagataatggcatccgtccttcctcactggagcagatggccaaactaaaacctgcattcatcaagccctacggcacagtgacagctgcaaattcttctttcttgactgatggtgcatctgcaatgttaatcatggcggaggaaaaggctctggccatgggttataagccgaaggcatatttgagggattttatgtatgtgtctcaggatccaaaagatcaactattacttggaccaacatatgctactccaaaagttctagaaaaggcaggattgaccatgaatgatattgatgcttttgaatttcatgaagctttctcgggtcagattttggcaaattttaaagccatggattctgattggtttgcagaaaactacatgggtagaaaaaccaaggttggattgcctcctttggagaagtttaataactggggtggatctctgtccctgggacacccatttggagccactggctgcaggttggtcatggctgctgccaacagattacggaaagaaggaggccagtatggcttagtggctgcgtgtgcagctggagggcagggccatgctatgatagtggaagcttatccaaaataatagatccagaagaagtgacctgaagtttctgtgcaacactcacactaggcaatgccatttcaatgcattactaaatgacatttgtagttcctagctcctcttaggaaaacagttcttgtggccttctattaaatactttgcacttaagccttgccagtgttctgagcttttcaataatcagtttactgctctttcagggatttctaagccaccagaatctcacatgagatgtgtgggtggttgtttttggtctctgttgtcactaaagactaaatgagggtttgcagttgggaaagaggtcaactgagatttggaaatcatctttgtaatatttgcaaattatacttgttcttatctgtgtcctaaagatgtgttctctataaaatacaaaccaacgtgcctaattaattatggaaaaataattcagaatctaaacaccactgaaaacttataaaaaatgtttagatacataaatatggtggtcagcgttaataaagtggagaaatattggaaaaaaaaaa

SEQ ID NO: 54379 - DNA, 333 bp, Homo sapiens
gagtaaatatatttggtctctttgcctggttcccaacacagagctcctgaatgtcgcaaattcctgagtgataggagcatcttttgttctaactaggacactcttaatgggcttctgggtagcttcaaggtggggactagtcaccaaaaagaccaagccataattagaaatttggaactttcagtcccaccctttgacctctggagattggaaaggggctgaagattgagtttaatcagcaatcagtcatgccctcataatggaacctctatacaaaccctaactgatggctggagtatggggagagttcagagagcttccaggttggtgaat

SEQ ID NO: 54380 - DNA, 800 bp, Homo sapiens
aaatatgagtaagtcgtgggagtagatatgaaacagggttataagcacatctcagtgtctaattttacagaataaatacttctattctatcgcagctcacatgtaaatccaggtaggtatgtccctatcccacttagaataaaatgaacagccaagtggccaaagtttccataactttcctccttgctgacaaatccaacccgaagtctgtgcctcctagggaaaggacaggacaaaggtacaattcagttcctaaagttatttctccctctgggagaggaaaggcactgtcaaagtacaaacccaagtcagcgtgctttgaaagatcatgtcacttgtttgtaataggaaatcatgtcatccagagttttgaaagtaactgtgggggcttgtggtgggttgtcgggggcaggagtgggtgacgtatgttcagggctaggtccgtggctctggtcagggcactgcccctgggtcactctgtgctggcccaggtctgctccatgcctggctgctggaaaaaccagttctcttctgacccacaaagtaatctgacggcggggcaaactcaggatctctctcagcccggagatctgactgcctcttcgaccagtatccaaaggaaaattcttttccgcggtcccactcccggatgtgtggcactccaggcttggtgtccttcctctcctggacaatgacttctactttgctactctgggcagcaggacgtggggttggcacagctctggctccggtggcaaagggcccaataacatctccatctctattttcttcttctgttc

SEQ ID NO: 54381 - DNA, 665 bp, Homo sapiens
cccaaggtggatgtagaagcgggctccggcgtcccactctcccttccatatgggcttagcgtctgggtcactgagaacgtctgaatagggccctgggtccttgccatggatgaatgtggttcccgcatccgccggcgggtgtctctccccaaaaggaaccgtccaagcttggggtgtatttttggcgctcccaccgcggccgagctcgagcccggagatgaggggaaagaggaggaggaaatggtggctgagaacaggaggcggaaaaccgcgggcgtactgccggttgaggtacagccccttctactctcagattccccggaatgtctcgtccttggaggtggtgatacaaacccggacctcctacgtcacatgcccactgacagaggggtgggagaccaggtacggaggacttggaacttgaaactgcaaacttttggcatccttcccagatgcaaagagttgaccagttttatcgccttcgtttacttctctcgtcttcgttaccactgttaatcggcacttaggaggtattgattgccttgttatttacatttctatataaatatgaaatgtaaaccccgagacataaaagttgtgcacgcagcagttaagtggcatgactgagacacaaatctaggcttccagataactgcagctcctac

SEQ ID NO: 54382 - DNA, 357 bp, Homo sapiens
ctaatgtagattatctgatttacactataatggttggacttttagtttgcaaaacactgaaagagggaagtctttggcacttttatggtagctaaaatatgcagttctatgcagagtagtcatggagtgctgaaggaacttagtagataaaatttctgagaaacggtagggagtaaataccaaaagaaagtagagttcattgcgattgtcagaaagtaaaaaagtgggtttagaaaattaggaagttagttttgctgttgactcagcaaattttcagatttttcagatatatggtttgtgaagatttaaaaggcaataaggaaaatctcttattagaataagtcatgtatacccttg

SEQ ID NO: 54383 - DNA, 1226 bp, Homo sapiens
ttttttttttttttttttagacctgtacagtttttattacataaaatatcacaaaattcacaagtacaacactgcttattttcttgcttgaagatcagatctctggtttatttaagatcaacattcaccacagctgaaggaaattaaactgaacctttaaaaggtaccgcatacggacctggttggggttatatacaatatattcattgtagttgagggtataaccatctggattcagaattcctgtgtcacttgctggtcctaatggcactgtactcccattcctgccaaatggaaaaaaagtgtgtcaacatcagtctctggttcagaagctgcaatagagaacgtagtcttatctggccaaaaggagtcttctagtcctcctggttctgagtacttacagggtgacgaagtgggcagaactgggagccatcttgcccagccccttggtgctatgtttaccttgaagcaatccttcggccttaggattggcctctagtagttcattacactgacctagagctacctctgataagagcagcagtcctgtattctttaggcgagaggcaaagcagtaattggcactcttggaagacatgtcagcaaagtagattcctttcccaaacatgtaacctgtgatgggagcttcaggtggggcaattcgaagcccatggctcaagattcccacccagttactcatcctggaaccatgccatagaagcatcctgttatgaaggtcctctctgaaggcttctttctcaccatccttctccacttcaaacaaatccagcaaggtcatggtatagtcgctgtgtgtgggagcatgggtagattgtaggtactgggaaatcactttgaactcataactttcatggtcaagggggcgcaaggcacaatgtaggtttctatagtgttggtccaatgggtgttctgggctttgtagctctgttttcaccagcttaatagcaatttcaatgtctcccaaagcctctagtaattgtattttttctgacagttccttctgtgtccggattagtggaggagtacggagtccaaagtcatgcggaatcctggtgtagaattcattgcatgcttccatgagagctcgtccatgctggccagcccgaatacaatcctcaatcttcttaagagactggtaacctgccttgatttgtgccactgtcagcttcccaagtggggctttcttggtattatacttcattccc

SEQ ID NO: 54384 - DNA, 5352 bp, Homo sapiens
ctttccccttactccgctcccctcttttccctccctctcctccccttccctctgttctctcctcctcttcccctcccctcccccgtccggggcactctatattcaagccaccgtttcctgcttcacaaaatggccaccgcacgcgacacctacggtcacgtggcctgccgccctctcagtttcgggaatctgcctagctcccactaaggggaggctacccgcggaagagcgagggcagattagaccggagaaatcccaccacatctccaagcccgggaactgagagaggaagaagagtgaaggccagtgttaggaaaaaaaaaaacaaaaacaaaaaaaacgaaaaacgaaagctgagtgcatagagttggaaaggggagcgaatgcgtaaggttggaaaggggggcgaagaggcctaggttaacattttcaggcgtcttagccggtggaaagcgggagacgcaagttctcgcgagatctcgagaactccgaggctgagactagggttttagcggagagcacgggaagtgtagctcgagagaactgggacagcatttcgcaccctaagctccaaggcaggactgctaggggcgacaggactaagtaggaaatcccttgagcttagacctgagggagcgcgcagtagccgggcagaagtcgccgcgacagggaattgcggtgtgagagggagggcacacgttgtacgtgctgacgtagccggctttccagcgggtatattagatccgtgggccgcgcggtgcgctccagagccgcagttctcccgtgagagggccttcgcggtggaacaaacactcgcttagcagcggaagactccgagttctcggtactcttcagggatgagtcatgtggcagtggaaaatgcgctcgggctggaccagcagtttgctggcctagacctgaactcttcagataatcagagtggaggaagtacagccagcaaagggcgctatattcctcctcatttaaggaaccgagaagctactagaggtttctacgataaagacagttcagggtggagttctagcaaagataaggatgcgtatagcagttttggatctcgtagtgattcaagagggaagtctagcttcttcagtgatcgtggaagtggatcaaggggaaggtttgatgatcgtggacggagtgattacgatggcattggcagccgtggtgacagaagtggctttggcaaatttgaacgtggtggaaacagtcgctggtgtgacaaatcagatgaagatgattggtcaaaaccactcccaccaagtgaacgcttggaacaggaactcttttctggaggcaacactgggattaattttgagaaatacgatgacattccagttgaggcaacaggcaacaactgtcctccacatattgaaagtttcagtgatgttgagatgggagaaattatcatgggaaacattgagcttactcgttatactcgcccaactccagtgcaaaagcatgctattcctattatcaaagagaaaagagacttgatggcttgtgcccaaacagggtctggaaaaactgcagcatttctgttgcccatcttgagtcagatttattcagatggtccaggcgaggctttgagggccatgaaggaaaatggaaggtatgggcgccgcaaacaatacccaatctccttggtattagcaccaacgagagagttggcagtacagatctacgaagaagccagaaaattttcataccgatctagagttcgtccttgcgtggtttatggtggtgccgatattggtcagcagattcgagacttggaacgtggatgccatttgttagtagccactccaggacgtctagtggatatgatggaaagaggaaagattggattagacttttgcaaatacttggtgttagatgaagctgatcggatgttggatatggggtttgagcctcagattcgtagaatagtcgaacaagatactatgcctccaaagggtgtccgccacactatgatgtttagtgctacttttcctaaggaaatacagatgctggctcgtgatttcttagatgaatatatcttcttggctgtaggaagagttggctctacctctgaaaacatcacacagaaagtagtttgggtggaagaatcagacaaacggtcatttctgcttgacctcctaaatgcaacaggcaaggattcactgaccttagtgtttgtggagaccaaaaagggtgcagattctctggaggatttcttataccatgaaggatacgcatgtaccagcatccatggagaccgttctcagagggatagagaagaggcccttcaccagttccgctcaggaaaaagcccaattttagtggctacagcagtagcagcaagaggactggacatttcaaatgtgaaacatgttatcaattttgacttgccaagtgatattgaagaatatgtacatcgtattggtcgtacgggacgtgtaggaaaccttggcctggcaacctcattctttaacgagaggaacataaatattactaaggatttgttggatcttcttgttgaagctaaacaagaagtgccgtcttggttagaaaacatggcttatgaacaccactacaagggtagcagtcgtggacgttctaagagtagcagatttagtggagggtttggtgccagagactaccgacaaagtagccggtgccagcagttccagcttcagcaagcagccgcgcaagcagcagccgcagtggcggagggtggccacggtagcagcagaggatttggtggaggtggctatggaggcttttacaacagtgatggatatggaggaaattataactcccaggggggttgactggtggggtaactgagccctgctttgcagtaggtcaccctgccaaacaagctaatatggaaaccacatgtaacttagccagactataccttgtgtagcttcaagaactcgcagtacattaccagctgtgattctccactgaaattttttttttaagggagctcaaggtcacaagaagaaatgaaaggaacaatcagcagccctgttcagaaggtggtttgaagacttcattgctgtagtttggattaactcccctcccgcctacccccatcccaaactgcatttataattttgtgactgaggatcatttgtttgttaatgtactgtgcctttaactttagacaactttttattttgatgtcctgttggctcagtaatgctcaagatatcaattgttttgacaaaataaatttactgaacttgggctaaaatcaaaccttggcacacaggtgtgatacaacttaacaggaatcatcgattcatccataaataatataaggaaaaacttatgcggtagcctgcattagggctttttgatacttgcagattgggggaaaacaacaaatgtcttgaagcatattaatggaattagtttctaatgtggcaaactgtattaagttaaagttctgatttgctcactctatcctggataggtatttagaacctgatagtctttaagccattccagtcatgatgaggtgatgtatgaatacatgcatacattcaaagcactgttttcaaagttaatgcaagtaaatacagcaattcctctttcaacgtttaggcagatcattaattatgagctagccaaatgtgggcatactattacagggaaagtttaaaggtctgataacttgaaataggtttttaggagaattcatctacttagactttttaaatgcctgccataaatgaaattgaaatggtagaatggctgaccacagcaatgaccagccctcattagggccctggatgatttttggtctaataacgcatgctagtgttgatgttttttggtcaagagggtatgaacaggaagaattaaatgcagcaggctttattttaaatgccgattcacattactctgttcaagctgcgttgagatgttaaactggcttactatagacttcgtaaaaatggctccagaagagtaacaaactgaaatctttgagatcacacaggttggaaatatgtacataactgcacaaggtgtcaattctgctctacagtgcagttttagtcagttttagttgcataggtttccattgtatttatagtctgtttatgctaaatctggccaaagatgagcattgtccaccactaaaatgcctctgccactttgaattctgtgctaattttgtggccagaatgcggtgatcaaaacgctccatctttttacagtggcataggaagacggcaaaaatttcctaaagtgcaatagattttcaagtgtattgtgccttgttctaaaacttttattaagtaggtgcacttgacagtattgaggtcatttgttatggtgctatttcaattagtctaggtttaggcccttgtacattttgcccataactttttacaaagtacttcttttattgcacattcagagaattttatatatatgtcttgtgtgcgtgtccttaaacttccaatcttactttgtctcttggagattgttgaacgcagcttgtctaggaaggggatgggactagattctaaaatttatttgggaccatgggaatgatagttgggaagaaaactatttgcacacgacagatttctagatactttttgctgctagttttatgtaatatttattgaacattttgacaaatatttatttttgtaagcctaaaagtgattctttgaaagtttaaagaaacttgaccaaaagacagtacaaaaacactggcacttgaatgttgaatgtcaccgtatgcgtgaaattatatatttcggggtagtgtgagcttttaatgtttaagtcatattaaactcttaagtcaaattaagcagacccggcgttggcagtgtagccataactttctgatgttagtaaaaacaaaattggcgacttgaaattaaatcatgccaaggttttgatacacttgtcttaagatattaatgaaacacttcaaaacactgatgtgaagtgtccagattctcagatgtttgttgtgtggattttgtttagttgtgtgtttttttttttttttcagtgaatgtctggcacattgcaatcctcaaacatgtggttatctttgttgtattggcataatcagtgacttgtacattcagcaatagccatttgagcaagttttatcagcaagcaatattttcagttaataaggtttcaaaaatcatgtaaggatttaaacttgctgaatgtaaagattgaacctcaagtcactgtagctttagtaattgcttattgtattagtttagatgctagcactgcatgtgctgtgcatattctgattttattaaaataaaaagttgaactgcacagtcaaaaaaaaaa

SEQ ID NO: 54385 - DNA, 705 bp, Homo sapiens
taggtgtcaacaaacttgtttatatatatatatatatatatatatacacatacatacacacacagtcacattccagtgtgacaaatactccttcaccaggagacagcgctaccactccgggatcttgaagactctctacagagagcctaggcctggcagtcttcacagatgacacccaacagggagcacgtttattaaagtgggaaggggtggggtacaccccagggtgtatactgacagggacctcatgcaggcccagagctctgctgcaccctcttcatcagctcttcatcctgcatagacaactctgtcaactttttgcccatccgctcatggatgtccaggtacttagagacacatcggtccaggcacacagactcgcccttggagagctctgcttccttgtagtgaggaggcacacacttccggtggcaggcactggtcattctgttgtacatatcggccatcatctccacctccagctccgcagccagctgttgggccctgagaggatccatctcagcctagcaccgtggaagggatctccttctggcctcctaatccactgcctgggacggatcacaatgcccacggagaccccaacttctgacaaatactataacgttaccctcgtgccgaattcttggcctcgagggccaaattccctatagtgagtcgtattaaattcgtaatcagtcaagctgt

SEQ ID NO: 54386 - DNA, 981 bp, Homo sapiens
ggggagatgtgaaagttatcatggccacaaaccgaatagaaactttggatccagcacttatcagaccaggttaaatttgctttggtttcatcatggagattaatgtgtttatatatttgtgtttaagtgtgctttgggaggcctataaaatgatacataaaaaagcaaatactgcagtgaaacttaggataatttacaaaaaaataggtcctcttgagatgagggttaaaacagagcatgatatggtctgtgcaccttggccctttgaattccagtcttatgtcttgtcttttcttttccataacattccctttttagcctcaagaacttgctgctttttctggaagaaataattcatgtgatggtaggatttgtcctttttacattcaggtagcatcagaagaaacagtgatttgtttgctgtcttttgtaatgtttttaacacaataggtctgcccagtttcactcaggaattgctcctttcatttatttctgaaggtatcaaagcagagagagtttcttttaaatgaagagaattcaaatgtagaaatctacaaactacaaaaatatatgtttactttttaaaatttagacatccttcccacagaattctgtccgactgaaacttcgtatgtaaggagatggggctgaggcctctgaggccatggccgagcctggggtttggatgttggtgtgacttcaaatctctttgtacccgcaggccgcattgacaggaagattgagttccccctgcctgatgaaaagacgaagaagcgcatctttcagattcacacaagcaggatgacgctggctgatgatgtaaccctggacgacctgatcatggctaaagatgacctctctggtgctgacatcaaggtgagagcctagccgtgtcagcttatttctgggaatgtggccgtcaatcaggaaagagtctatatgtgctcttgggatggtggttggcctggacaggtgggtgtc

SEQ ID NO: 54387 - DNA, 382 bp, Homo sapiens
  misc_feature (1)...(382): n = a,t,c or g
gaaagaattggaaggcagatattacccaatatggggcatgagatattttctttccataaagaataagcactctttttcctccttcataatatatcctattgcaattgtcaatgactttttgatccctaacctgagaactttcctgtcacatgtcacaaatatctgccatagatggcagaagtatgaaaataattgagccaattancagntntactctctggtgcaggnatttgcatgctttttncttattttcaggagtggcggtnnatgcncctnnggntcntnnacctctncnngnngcnctgngncctanntgccgngtcttnncnngttgngtgnngctngtatngnngncctngnnctngntgnctnggaagntacg

SEQ ID NO: 54388 - DNA, 363 bp, Homo sapiens
  misc_feature (1)...(363): n = a,t,c or g
gaaagaattggaaggcagatattacccaatatggggcatgagatattttctttccataaagaataagcactctttttcctccttcataatatatcctattgcaattgtcaatgactttttgatccctaacctgagaactttcctgtcacatgtcacaaatatctgccatagatggcagaagtatgaaaataattgagccaattaaaaaagatatttcaggtgtactctctggggnaggnatttgcntgctnttttattanttnnancgngnngggcggnannntgccnnttatgntncaanntnnnncactaccggacagttctnncnccnnattnnncngagnattntnnnnnncgtntttc

SEQ ID NO: 54389 - DNA, 417 bp, Homo sapiens
ctgactttcccaagaactatacactcatttataccaggaaacagacaagagaacaagaggctgccgaagacaaaacttctctgcaagcacctgtgcacagcaatgtgcgtgggcatctgtgagaagaagagaatctgtgaagtttgagcaagcggccttcccaagatgtaccgaatatctcaactgatgtcaacaccagtagcaagttcttccaggttggaaagagaatatgctggagagctgtctcccacgtgcattttcccaagtttcacctgtgattccctggatggttaccattcttttgaatgcggctccatagatcccctgacaggctcccactatacctgtcgccgaagtcccagactcctcaccaatggctactatatttggactgaagacagcttcctgtgcgacaaa

SEQ ID NO: 54390 - DNA, 1098 bp, Homo sapiens
gacgctggattcagcgtgtccgcgacctcacctttaggtcctgtgaggtcggtggaatcctggggtcctccaaatctaccaggccatctccccagtttcccagttcttcctgcgtgcgggcgagagtggttgggccctcgggaacccactcagagcgaggctaaatttacggagggactttctgttagcagcatgagggcctgtggttagacctatagaggtatttcctttgatttaagccagaaagtcctgagagcggatcggggagcatttgcggatcggtcactttttcctcctttctgagtctcttatcccctaccacagggacggcccaggtggcaggatgtcctggtctggccttctccatggcctcaacacgtccctaacttgtggcccagctctggttccccggctctgggctacctgctccatggctaccctgaaccagatgcaccgcctggggccccccaagcggccgcctcggaagctgggccccacggaaggccggccgcagctgaaagggtgtggtcctgtgcacgtttacccgcaagccgaagaagcccaactcagccaatcgcaagtgctgtcgagtgcggctcagcactggccgcgaggccgtctgcttcatccctggggagggccacaccctgcaggagcaccagattgtccttgtggagggcggccgcacccaggacctgccaggcgtcaagctcaccgttgtgcgtggcaagtacgactgtggccacgtgcagaagaagtgacggctgggggcacagtgggctgggcgcccctgcagaacatgaaccttccgctcctggctgccacagggtcctccgatgctggcctttgcgcctctagaggcagccactcatggattcaagtcctgggctccgcctcttccatcaggaccactattaagccataggagtcctgggggtgcaaagggtgcccctctgtcaacacccttggctcctgtgtttagaggggtggcctgaaggaccttttctgctgggacaagacactgtactgccctctgctgggaaggggttttaataaacagaccctggcgcttgtgatgtaaaaaaaaaaaaaaaaaaa

SEQ ID NO: 54391 - DNA, 501 bp, Homo sapiens
  misc_feature (1)...(501): n = a,t,c or g
aaagcaataattctgaatcaccacacccaagcccattctctcgtttcccatctttaaaccattcttggtaccaacttgaagctccaaatacctggcaggcaccctctggcctctactggatctgtgggccacaagcatatcgacaactgccagctaaatggtcaggggcctgtgtactggggacaattaggccgtccttcttcctaatgcccctaaaacagggagaagccttaggataccccatctatgatgaaactaaaaggaaaagcaaaagaggcataactataggagattggaaggacagtgaatggcctcctgaaagaataattcaatattatgggcccagccacctgggcaggaagatggaatgtggggataccgcaccccagtttacatgctttaaccgcattattaagattgcagggcagtactaggaaattcattaccaatgaaactgcaggggcctttgaattcttgctttncccagcaagcccacaaaaa

SEQ ID NO: 54392 - DNA, 336 bp, Homo sapiens
aaaagaagagtggtaacattctgctaattcttacaaattattttaagcccatgaaacttaatcagtggctatttaacttctagctgattagatgagaactgatgccacttggttctcagctaaagttttgtgaagggaagaagtctgtttcacagacattactactcaagtattgactgactcaaagtgatggaactgatttcaaggagagctgtatgaatgtgactgactcggtggtaccaatccaatcctagaaaaactagacttttgagatgagtcaagagaaacatctttgtttaggaaagatggtataggtttggtttttttttttttacc

SEQ ID NO: 54393 - DNA, 255 bp, Homo sapiens
cagcacacttgcaaaagtatggtcaaaggaaaaaaatcccacatttcaattaacaagtagcatggacatttgatcaacctttagttggaataataatattcatatttgctatgaatccttttaaaaaaaatctttggataaatgctgacagatttccaagaactaccaataaaatacaagagatatccaatgcttgatatatgaggcctagtaataacgatatttctctttaattgatgttttgttttaaaagtt

SEQ ID NO: 54394 - DNA, 483 bp, Homo sapiens
gaggaagttggctggttgcaccgatctgggggcttcccgggctcgggtaaccggagtgctggtatctaatcgtcgctcaaaagctcctaggtgcgcgggtggatataattcccggcttctcgagaagacactacagcctcaaggaggtatatcccgtgccttacctgactgggggctctgagtccagttgtgttgtcttcaacttagacaccatggaggcacctccagtcaccatgatgcctgtcactgggggcaccattaacatgatggagtacctgttgcagggaagtgttttagatcacagtttggaaagcctcatccaccgccttcgtggtttgtgtgacaacatggaacctgagactttccttgaccatgagatggtattcctccttaagggccagcaagccagcccatttgttctcagggcccgacgctctatggacagggcaggggcacctggcatctgcgctacctgggacagcc

SEQ ID NO: 54395 - DNA, 618 bp, Homo sapiens
gcacatctggaaagctgtgttccccgaccccccactcccccaacagcaggaggggtgtaaccccagggaagccacccctctgacatatgtgctggggggaggggcagagccttgcccctaggaatcctgtggcggtgggttgttgactgatgtgggattgctgtgtctcttgtgctgtcggagagctggcaggtagtggaggggccttgggagctcctaggctgaacttggggctgtcctccaaggatccaggatggagggatggagctgggtcactcaaacctaaggcctttctgggtctagcatttattgcttcctggcttctggcttggcttcttttcgtccattctcatctgccagtgtctggactccctgggccttcaggcaggcattttcaggagcacaggccatgtggttggtctggagccctgtgtcaaggagagtgtgcgtgcttggtggagcagggttgctggagtagtgtgaaaaaaagcagatgagctggcctctggagacaaagctgtgtggcaagacttgctggtttagtgggctctgaacaccaagaacagggcccgggagtctgatacttgggggctgaactgaatcctgtggcgcaagatt

SEQ ID NO: 54396 - DNA, 633 bp, Homo sapiens
  misc_feature (1)...(633): n = a,t,c or g
cttatttcaggtttcttttttttccccctttttccacatgttctaacatgctttctaattaccatacttcttattttttccccccttcatttttgccttccattaattttccttttgcaggtgtggcagtttgctagtcgcctcctgctagctattttcccctccttccttagtttgagaaccccagtttttagctggacatgatgcagtcctgctatacagtacatcccagccttcctgaaagccaggtattgtcatatgattagccaatgagatacaaaggaggtttgatgtatgatatctgagaaatgtcctaaaaaggaaggggtaggtcagctgggtttaatattgccatggagctgctacgtcagcaatggattgactgcctacgtcagaaattcttttcagaaagatgtaagcctccatcttgcttaatacgctaatttgcagatttttcttacctgccagcaagcctttcctaactgacgtagtatgtttcaaagttatacattcanttttccgtttcngtaagttgttccattaacttattaggatctctatntttantttccccataaantacatanacttacaatggtcaccttctcatctcaagantagtagtcnggacat

SEQ ID NO: 54397 - DNA, 432 bp, Homo sapiens
ctcccgttcatccccgcccgctccatccgggtcgctgacggctgtctctggactggacagcagtggcgtccgcttttctctaaggaacccgataagaactccattttctgttgatgtggagacatagggtacctccaactttccggggtttcagaagagaattttttattgaaactggaagaccaaaataattacaagcatgttgtgctggggaaatgcatcctttgggcagctaggtttgggtggaattgatgaagaaattgtactagagcccagaaaaagtgacttctttataaataaaagggtccgagatgtaggatgtggactcagacatactgtgtttgttctggatgatggaacagtgtacacatgtggatgtaatgatctaggacagctaggtcatgaaaaatccagaaagaaaccagagtttcg

SEQ ID NO: 54398 - DNA, 526 bp, Homo sapiens
cttcataggtttcctcaaccacctttcctcagctttcttaaaatgggatctacattggctcttcacacccaaatagcagactaatcgtttttctgcttagcaccgtctggttcattgtcttgaactctgccttacagcagcaagaaaattttcctcgacaagaacctcaatctttagttccattgagctccccctctggattttggacttaccagaagtaggaggttctgataccattcaagatggtctttccttcaaagcaggtctgaagaggagactaccaaagcagtgtttacaaacccagagtccacacaaccatattgcatagaacagcacttggctttcacaagcctcctacaggacctggtgtaattggagtgaaagggcagagaccctggaagtggaggtggctgtgtgctgcgatgggaagaaggcagaaggcccaggggctttggacatagagcagggtggaagctgcaagtactgggaaggaagagagtttcacagaaacaaagctttgtcacac

SEQ ID NO: 54399 - DNA, 353 bp, Homo sapiens
cgcttgatccagtggcatatagattagaacctatgattgttccagatttggacctaaaagctgttctcattccacatcacaaaggcagaaaaagacttcatttagaattgaaagagagtctctctcgtatgggatctgatttgaagcagggttttattagctctctcaaaagtgcttggcagacattaaatgagtttgcccgtgctcatacgtcttcaacccagttgcaagaagaattggagaaggtggccaatcagatcaaagaagaagaagaaaagcaagtagttgaagcagaaaaggttgttgaaagtccagatttttccaaggatgaggactacttaggaaaggttgga

SEQ ID NO: 54400 - DNA, 1871 bp, Homo sapiens
ttcggcacatggcgggacgccggtcacgtcgccgccgagctggagaactacgatgacccgcacaaaacccctgcctccccagttgtccacatcaggggcctgattgacggtgtggtggaagcagaccttgtggaggccttgcaggagtttggacccatcagctatgtggtggtaatgcctaaaaagagacaagcactggtggagtttgaagatgtgttgggggcttgcaacgcagtgagactacgcagccgacaaccaaatatacattgctggtcacccagcttttgtcaactactctaccagccagaagatctcccgccctggggactcggatgactcccggagcgtgaacagtgtgcttctctttaccatcctgaaccccatttattcgatcaccacggatgttctttacactatctgtaatccttgtggccctgtccagagaattgtcattttcaggaagaatggagttcaggcgatggtggaatttgactcagttcaaagtgcccagcgggccaaggcctctctcaatggggctgatatctattctggctgttgcactctgaagatcgaatacgcaaagcctacacgcttgaatgtgttcaagaatgatcaggatacttgggactacacaaaccccaatctcagtggacaaggtgaccctggcagcaaccccaacaaacgccagaggcagccccctctcctgggagatcaccccgcagaatatggagggccccacggtgggtaccacagccattaccatgatgagggctacgggccccccccacctcactacgaagggagaaggatgggtccaccagtggggggtcaccgtcggggcccaagtcgctacggcccccagtatgggcaccccccaccccctcccccaccacccgagtatggccctcacgccgacagccctgtgctcatggtctatggcttggatcaatctaagatgaactgtgaccgagtcttcaatgtcttctgcttatatggcaatgtggagaaggtgaaattcatgaaaagcaagccgggggccgccatggtggagatggctgatggctacgctgtagaccgggccattacccacctcaacaacaacttcatgtttggggcagaagctgaatgtctgtgtctccaagcagccagccatcatgcctggtcagtcatacgggttggaagacgggtcttgcagttacaaagacttcagtgaatcccggaacaatcggttctccaccccagagcaggcagccaagaaccgcatccagcaccccagcaacgtgctgcacttcttcaacgccccgctggaggtgaccgaggagaacttctttgagatctgcgatgagctgggagtgaagcggccatcttctgtgaaagtattctcaggcaaaagtgagcgcagctcctctggactgctggagtgggaatccaagagcgatgccctggagactctgggcttcctgaaccattaccagatgaaaaacccaaatggtccatacccttacattctgaagttgtgtttctccactgctcagcacgcctcctaattaggtgcctaggaagagtcccatctgagcaggaagacatttctctttcctttatgccattttttgtttttgttatttgcaaaagatcttgtattcctttttttttttttttttttaaatgctaggtttgtagaggcttacttaaccttaatggaaacgctggaaatctgcagggggagggagaggggaactgttatctcccaagattaaccttcacttttaaaaaattattgtacatgtgatttttttttttcctgttcatacatttgtgctgcccatgtactcttggcacatttcaataaaattgtttggaaaataaacaca

SEQ ID NO: 54401 - DNA, 817 bp, Homo sapiens
cacagtcaaaactcctacaactcttccaagagcagctggtcgagaaaccaaatatgcaaatctctcctcaccaacttctacagtatctgagagtcagctgactaagcctggagtaattcgcccagtacctgtaaaatccagaatattactgaaaaaagaggaggaagtctatgaacccaaccctttcagtaaatacttggaagataacagcgacctcttttctgaacaggatgtaacagtccctcccaagcctgtctcgctccatcctttatatcagactaaactctatcctcctgctaagtcactgctgcatccacagaccctctcacatgctgactgtcttgccccaggacccttcagtcatctgtccttctccttgagtgatgaacaggagaattctcacaccctcctcagtcacaacgcatgcaacaagctgagtcatccaatggtggctattcctgaacatgaagctcttgattccaaagagcaatgaagttggagcagaggctgaaaacacaggctgctgaagttttttggaatgctggtgctaaccacttgctagatttaacttttttttttttttccagaatgagtgctccctttatgagctgcagtgcagcagaaccaaaaaaaaagtttgctgcaattatatagcatcacagtggctctgctaacagccagcatagaagagatttacctacagctttttgcaccactgttctagcctttaatgccttctacttaatattaagctgaccgcaatactaacgtgcccctatatttggcagccaaataaagaagaatcgtgggtaaatag

SEQ ID NO: 54402 - DNA, 370 bp, Homo sapiens
  misc_feature (1)...(370): n = a,t,c or g
ctggcccactccccactgggctccgtcactctgctggacttccgccctcggcagtttgtgctggtggatggggagctcaaagtgacggacctggatgacgcacgtgtggaggagacgccgtgtgcaggcagcaccgactgcatactcgagtttccggccaggaacttcaccctgccctgctcagcccagggctggtgcgagggcatgaacgagaagcggaacctctataatgcctacaggtttttcttcacatacctcctgcctcacagtgccccgccttcactgcgtcctctgctggacagcatcgtcaacgccacaggaagactaccgctgctggccatcctaccaccacgggagctgnctcctttca

SEQ ID NO: 54403 - DNA, 363 bp, Homo sapiens
cgttattccagccagatcaaataaaggatttggaattgaagcacaggccaaaattccaaatcctttatttgatctggctggaataacgtgtggacactttctggtacctttttggaccttctttggtgcaaccctaattggaaaagcaataataaaaatgcatatccagaaaatttttgttataataacattcagcaagcacatagtggagcaaatggtggctttcattggtgctgtccccggcataggtccatctctgcagaagccatttcaggagtacctggaggctcaacggcagaagcttcaccacaaaagcgaaatgggcacaccacagggagaaaactggttgtcctggatgtttga

SEQ ID NO: 54404 - DNA, 1555 bp, Homo sapiens
ctcatctggagcctgaagggtcaagtgctgtctaccatcaacaccaaccagatgaacaacacacacgctgctgtatctccctgtggcagatttgtagcctcgtgtggcttcaccccagatgtgaaggtttgggaagtctgctttggaaagaagggggagttccaggaggtggtgcgagccttcgaactaaagggccactccgcggctgtgcactcgtttgctttctccaacgactcacggaggatggcttctgtctccaaggatggtacatggaaactgtgggacacagatgtggaatacaagaagaagcagggacccctacttgctgaagacaggccgctttgaagaggcggcgggtgccgcgccgtgccgcctggccctctcccccaacgcccaggtcttggccttggccagtggcagtagtattcatctctacaatacccggcggggcgagaaggaggagtgctttgagcgggtccatggcgagtgtatcgccaacttgtcctttgacatcactggccgctttctggcctcctgtggggaccgggcggtgcggctgtttcacaacactcctggccaccgagccatggtggaggagatgcagggccacctgaagcgggcctccaacgagagcacccgccagaggctgcagcagcagctgacccaggcccaagagaccctgaagagcctgggtgccctgaagaagtgactctgggagggcccggcgcagaggattgaggaggagggatctggcctcctcatggcactgctgccatctttcctcccaggtggaagcctttcagaaggagtctcctggttttcttactggtggccctgcttcttcccattgaaactactcttgtctacttaggtctctctcttcttgctggctgtgactcctccctgactagtggccaaggtgcttttcttcctcccaggcccagtgggtggaatctgtccccacctggcactgaggagaatggtagagaggagaggagagagagagagaatgtgatttttggccttgtggcagcacatcctcacacccaaagaagtttgtaaatgttccagaacaacctagagaacacctggagtactaagcagcagttttgcaaggatgggagactgggatagcttcccatcacagaactgtgttccatcaaaaagacactaagggatttccttctgggcctcagttctatttgtaagatggagaataatcctctctgtgaactccttgcaaagatgatatgaggctaagagaatatcaagtccccaggtctggaagaaaagtagaaaagagtagtactattgtccaatgtcatgaaagtggtaaaagtgggaaccagtgtgctttgaaaccaaattagaaacacattccttgggaaggcaaagttttctgggacttgatcatacattttatatggttgggacttctctcttcgggagatgatatcttgtttaaggagacctcttttcagttcatcaagttcatcagatatttgagtgcccactctgtgcccaaataaatatgagctggggattaaataaaaaa

SEQ ID NO: 54405 - DNA, 951 bp, Homo sapiens
ctgaaggtgctcctgctcttgttttcgatgccgggagttttcaatatttaccatacgttgctttttatcaggtcgactgaaagcagtaaacacatttttcatctatgttagagttcaatgtatttaaatttaaaacaattttaaatgttttctccattaatctatgatctgaacactgataaaagatattaaatatctgaattacaatcctagtatatccatataaaaataaaggagtctgtattagtttttttgtcctatagaaagaaaaaatagacaataactctactggcaaaaaagggaaacactcaaaagataacaaagaaaagaaatgtgacaataaaataatgagatgtgtttccattatttttcctcctttcctataaaaatcagtccctccccgctgggctttatcactcagcagaaatacatacacatctctcacaaacaaagcaaaacaaaagtctcaactttttcttacagcaaaagctcacaacacctacaccgctttccttaatgtctatgatcaggcttccgtcactacttcactggaagtccatactgtcatcccctgggccgcccagtttccaagccaagaaaacattttccgcacatcaactttttaaaaagcatgacacatttattccttttacttgagatggcttttggattttcaaggtaccactccccactcctgtccttagccttccctacaaccccatggatgttggtgttctcccaggagtctgataaatatacagtctcggcaaaagagatgaccatagaactaactgccaactaaccctctccacttgaatgtcagtagttacctccaaacacaattctcatctccaattacccttgccccaaaccttgaattccctatctcagtggtactactatccaacaagatgacccaacccagaaatctagaagtcactgttactttct

SEQ ID NO: 54406 - DNA, 350 bp, Homo sapiens
ctgatgtattattattcccattttacaggtcagaaaattgaagctcaggttaagtaatttgttcaaggccatgtggctgataaataagtgtcaagattgggatttgaacacaggcctatctgaccttcaaacctatactattcttctgtcttgccttgttttaacagtagcgttacagaatgtgaatgaaatgtacagaatgaaatgattcactttgttgcaggaaaatcaaggcaggaataagcatttaaatatcattcaaggctgggttagatttaaataggcaaaaatagaggtgaaataatttcatttgggagagaacagctagaaatacagaatggcatacaagt

SEQ ID NO: 54407 - DNA, 327 bp, Homo sapiens
gcagttgaatcagaattgattaggtggaacccaggcctcagtatcttaaacgcttcctgggaaaatctcttgcagtcacgtttaaaaacctttgatttaggcatcagtacctttcttaagcaagaaaggtggaaaaatttgtaaggctttaggtgaactaacattataaaattaggaattctctgtgagtttatttagaaacattttttggttccagtgtgtaaaatatccttcagaactataataggaatccaatatactgttctttaaataccatactatgttcatcctctggcttcctctccatctctagtgaaatccttcatc

SEQ ID NO: 54408 - DNA, 501 bp, Homo sapiens
tttgataccgtttgacatgattacgaatttaatacgactcactatagggaatttggccctcgaggccaagaattcggcacgaggtggtcgctcctggttctgccagctcccctgagagcctgaacccgggcttgagagcctcgccaccccgggtgacatccctgccgtgggcttgggggctctgggtgtgattccgccggtccgggtcccgcagcgaccacctacccagcgcagtcaggggtggggctgggacccagagcgggaccccggctgccgagtccaggtgtcccgcgggcctcgatttggggagcagaaaacgccaggtcttcaagggtgtctgccaccaccatgcctgacccatttggcagcagcctcgtgtgtggtggtctggtgtggacggtggaagcgtgattctgctgagtgtcagtgtgaccactcgtgctcagccgtatctcacaggaggacaggtgccggagcagctcgtgcaaataagcagccaat

SEQ ID NO: 54409 - DNA, 2500 bp, Homo sapiens
  misc_feature (1)...(2500): n = a,t,c or g
aataaataactcacattgatttctctggtctgaaataattttgcttcccctcttcccgaagctctgacacctgccccaacaagcaatgttggaaaattatttacatagtggcgcaaactcccttactgctttggatataaatccaggcaggaggaggtagctctaaggcaagagatctaggacttctagcccctgaactttcagccgaatacatcttttccaaaggagtgaattcaggcccttgtatcactggcagcaggacgtgaccatggagaagctgttgtgtttcttggtcttgaccagcctctctcatgcttttggccagacaggtaagggccaccccaggctatgggagagttttgatctgaggtatgggggtggggtctaagactgcatgaacagtctcaaaaaaaaaaaaaaaagactgtatgaacagaacagtggagcatccttcnnnnnnnnnnnnnnnnnnnnnnnnnnnnnnnnnnntgtgtaactggagaaggggtcagtctgtttctcaatcttaaattctatacgtaagtgaggggatagatctgtgtgatctgagaaacctctcacatttgcttgtttttctggctcacagacatgtcgaggaaggcttttgtgtttcccaaagagtcggatacttcctatgtatccctcaaagcaaccgttaacgaagcctctcaaagccttcactgtgtgcctccacttcttacacgggaactgtcctcggacccgtggggtaacagtattttcttcgtattgccaccaaggagacaagacaatgaggattctcatattttgggtcttaaggatatagggatacagtttttacagtggggtggggtctgaaatattattcgaggttcctggaagttcacagtagctccagttacacatttgtacaagctgggagtccgcctcagggatcgtggagttctgggtagatgggaagcccagggtgaggaagagtctgaagaagggatacactgtgggggcagaagcaagcatcatcttggggcaggagcaggattccttcggtgggaactttgaaggaagccagtccctggtgggagacattggaaatgtgaacatgtgggactttgtgctgtcaccagatgagattaacaccatctatcttggcgggcccttcagtcctaatgtcctgaactggcgggcactgaagtatgaagtgcaaggcgaagtgttcaccaaaccccagctgtggccctgaggcccagctgtgggtcctgaaggtacctcccggttttttacaccgcatgggccccacgtctctgtctctggtacctcccgcttttttacactgcatggttcccacgtctctgtctctgggcctttgttcccctatatggcattgcaggcctgctccaccctcctcagcgcctgaggaatggaggtaaagtgtctggtctgggagctcgttaactatgctgggaaacggtccaaaagaatcagaatttgaggtgttttgttttcatttttatttcaagttggacagatcttggagataatttcttacctcacatagatgagaaaactaacacccagaaaggagaaatgatgttataaaaaactcataaggcaagagctgagaaggaagcgctgatcttctatttaattccccacccatgacccccagaaagcaggagggcattgcccacattcacagggctcttcagtctcagaatcaggacactggccaggtgtctggtttgggtccagagtgctcatcatcatgtcatagaactgctgggcccaggtctcctgaaatgggaagcccagcaataccacgcagtccctccactttctcaaagcacactgggaaaggccattagaattgccccagcaggagcaggatctgctttttttccagagcaaaatgaaggcactaggtataaatatgttgttactgccaagaacttaaatgactggtttttgtttgcttgcagtgctttcttaattttatgggctcttctgggaaactcctccccttttccacacgaaccttgtggggctgtgaattctttcttcatccccgcattcccaatatacccaggccacaaagagtggaccgtgaaacccacagggtgtcctgtcagaggagcccatctcccatctccccagctccctatctggaggatagttggatagttacgtgttcctagcaggaccaactacagtcttcccaaggattgagttatggactttgggagtgagacatcttcttgctgctggatttccaagctgagaggacgtgaacctgggaccaccagtagccatcttgtttgccacatggagagagactatgaggacagaagccaaactggaagtggaggagccaagggattgacaaacaacagagccttgaccacgtggagtctctgaatcagccttgtctggaaccagatctacacctggactgcccaggtctataagccaataaagcccctgtttacttgaaaaaaaaaaaaaa

SEQ ID NO: 54410 - DNA, 1799 bp, Homo sapiens
tttttttttttttttttaaaagggggggccaaattattattattttaaaatttgattacaaccaattttgttggcattaaaattagaggcattaagctggaatggatatataccaaaaccagaaattgagtttagcaaaaatgggaataggagttgttcagtaatttcagattacaaatcaatttagagaaacaaaccccatgcttacattgattgtgccacagatttaaacttcagtagtgcattagtaaactgttcacatttagatcttcaccttgagatttgacagctgtttcttgaaaaaaatctcagtaccttgtgcaaataaaatcggtcttccatgtgccttagcacacacttaaaatttatccattgtatatatacaaaacacctgcaatgtgggcagggcaaaatacatactttcataacaaaactataatatacctctcaagtatgaacaatatacacataatacatggtatacagtatttacaaaatataaaatataatacaagctgtttgtatgtaattttttaaactcatcttttgcaattgtatgttgcaacaaggcaaatttccatttctgtaccaattttctcaagagtccagggatatgggaaaaattatgttttacacacatactgaaatctgaaatctaagtttgaactttgaggagggtttttaagtgtactgccatcagctccctgttttggttggaattttcaacagtgcttcccatccagtgactaggaggctttggaagaacactaggagaaggtggatcactaaactttgccccagcataattttccttttggctcacttcagttagaaatgctgatttcttcaaatgcgaatttttaatgttctcggtatttttaaaaggctttttttcctgcttctgaattctgtcagatgaaacagaatcctgccaaaagttgttttcatttctttttgcagaggtgatcttggttagtggcaagttatatttgcttttctgtctgtttatctttggttgctcatacaagtgtataccatgaacaagctggccatggggaagggcaattttctccgattttcccatctttgattttaaaacctctttcctgaggggggtttggccgggagccgcgggccgcagcggggcaaggtcggggctggctccctccgtgccggctgcggctgcaggaactcggggccaaggcggcggccgggcccgggacctcctgcgctccgctcgggccggtcgcggggctccggccgccctccagactcggccggtgctgctggtactggtggaagcggctgggcagctgccctgcggggctggcccgcaccttcttctttcgccgcttcttcggcgctgcccgaggagtgcctcccgccacggcgaggctgcggttgggcagagctgctggagcgcgaggctggggggtcagacacgggccatctccccctaggaaatgagggaggaagagggtcgggggccagtgcccgggggtccgggatccggggtaaaggaggcggagccgtggtcaccatcgggagggccccaaagtaacctcgggaggaaaagccaagcggcgcaaggcggccacccaggacgagcggctcccgctgcgggacggagacgacagtcatagcgctaggaagcttgtcgctcagcaacgaagagagaaggagaaggtgaatgaagccagtgaagatagggtggcggcgatggatgctgctaggagagcctgagaagatcgcggaacatgactcgggcggcacgaggcgcacgaggcctcgttccgaat

SEQ ID NO: 54411 - DNA, 351 bp, Homo sapiens
gaaacaattaggaaatcctgtacttttgcaattggttcggaatgattcgtacatgacaaaggacacacgaggcaatttggaggggctctcattggcgaaatctggcaaaatttgagtatcaaaaagataagatggtaccattgaatagaaagagaatcgaactccatagggatttcaaagaaaaagaggttggggagggtgcagagaaaaaaaaacaacagcatctttatagaagagtgcccctaaaaaaatgcagaaagagagagtgagaaaagtaccactttgctaccaccaaatgtaataattgattaaggtattttcaccattgagtgggaagttaagaaatgaaac

SEQ ID NO: 54412 - DNA, 604 bp, Homo sapiens
cgcccatatccagaagggcttcaactacacggtgtttgactattgaaaaggccaaacctattaaatgtggaacatttggtgcaacatctttacagcagagatatttagctactggagattttggtggaaaccttcatatatggaatttagaagctccagagatgccagtatattctgtaaagggccataaagaaattataaatgccatagatggcataggtggactaggaattggagaaggagcacctgaaattgtgactggcagccgagatggaactgtgaaggtgtgggacccaaggcaaaaagatgatcctgttgctaatatggaacctgtacaaggagaaaacaagagagactgttggactgtggcatttggcaatgcttataatcaagaagaacgtgttgtttgtgctggctatgacaatggggatatcaaactatttgatctcagaaatatggcattacggtgggagacaaacatcaaaaatggggtaaagtacattctgaggctttttggtttctctgagcatgtttccattcacctctgaactattacaaaaggaaaacacctctagtaactcatctgagtcaacccctctgccaa

SEQ ID NO: 54413 - DNA, 2386 bp, Homo sapiens
gcggcgggaggcgcagcctgggcagagctcagcttggtcccgccgcccggccggtgctccctggcgcagccacgcaggcgcaccgcagacagacccctctgccatgaaccagtccatcccagtggctcccaccccaccccgccgcgtgcggctgaagccctggctggtggcccaggtgaacagctgccagtacccagggcttcaatgggtcaacggggaaaagaaattattctgcatcccctggaggcatgccacaaggcatggtcccagccaggacggagataacaccatcttcaaggcctgggccaaggagacagggaaatacaccgaaggcgtggatgaagccgatccggccaagtggaaggccaacctgcgctgtgcccttaacaagagccgggacttccgcctcatctacgacgggccccgggacatgccacctcagccctacaagatctacgaggtctgctccaatggccctgctcccacagactcccagccccctgaggattactcttttggtgcaggagaggaggaggaagaagaggaagagctgcagaggatgttgccaagcctgagcctcacagatgcagtgcagtctggcccccacatgacaccctattctttactcaaagaggatgtcaagtggccgcccactctgcagccgcccactctgcagccgcccgtggtgctgggtccccctgctccagaccccagccccctggctcctccccctggcaaccctgctggcttcagggagcttctctctgaggtcctggagcctgggccactgcctgccagcctgccccctgcaggcgaacagcacgtcgccagacctgctgatcagcccccacatgctgcctctgaccgacctggagatcaagtttcagtaccgggggcggccaccccgggccctcaccatcagcaacccccatggctgccggctcttctacagccagctggaggccacccaggagcaggtggaactcttcggccccataagcctggagcaagtgcgcttccccagccctgaggacatccccagtgacaagcagcgcttctacacgaaccagctgctggatgtcctggaccgcgggctcatcctccagctacagggccaggacctttatgccatccgcctgtgtcagtgcaaggtgttctggagcgggccttgtgcctcagcccatgactcatgccccaaccccatccagcgggaggtcaagaccaagcttttcagcctggagcattttctcaatgagctcatcctgttccaaaagggccagaccaacaccccaccacccttcgagatcttcttctgctttggggaagaatggcctgaccgcaaaccccgagagaagaagctcattactgtacaggtggtgcctgtagcagctcgactgctgctggagatgttctcaggggagctatcttggtcagctgatagtatccggctacagatctcaaacccagacctcaaagaccgcatggtggagcaattcaaggagctccatcacatctggcagtcccagcagcggttgcagcctgtggcccaggcccctcctggagcaggccttggtgttggccaggggccctggcctatgcacccagctggcatgcaataacaaggctgcagacggtgactggccctggcttcctgggtggcggtgcggactgatgtggagatgtgacagccccgatgagcacctggctggctgcagggtcctacctctgggtttcctggaagtggatttgggccaagaaggagagggagaaaggcccgagcccctgccttcccgggcctttctctcctgggctgtctctggtctggtcagcctggctctcgggaaattcagccatgagcagggaaagaactctcccaaccctggggcctagctgtataggaggaattgcctaagggtggcccactcttgtgattgccccatttcctctggcaacaaaagccagagtgttgtgggccaagtccccccacagggcctctgcagggcatggccctgatttccctggtttgagactcacttcctcatctccctgtcctctgagataatatgagtgagcacttaggtatcatatcagatgctcaaggctggcagctacccccttcttgagagtccaagaacctggagcagaaataatttttatgtatttttggattaataaatgttaaaaacagactcagctgtttctttccttttactactaccagttgctcccatgctactccaccaggccctgtttcggatgccaactggcccactccccaagcacttgcccccagcttgcgaccattggcactgggagggcctggcttctgggctgatgggtcagttgggccttcataaacactcacctggctggctttgctttccag

SEQ ID NO: 54414 - DNA, 454 bp, Homo sapiens
tgatgatgatgatgtctccattgaatatagacaccatgctcacaggcaccaaggccacgggattgaagaggatgaagatgtctcagatggacaccatcatcgcgaccccagccacaggcaccgaagccatgaagaagatgacaatgatgatgatgatgtctccactgagtatggacaccaggcccacaggcaccaagaccacagaaaggaagaggttgaggctgtctcaggtgaacaccaccatcatgtccctgaccacaggcaccaaggccacagagacgaggaagaagatgaggatgtgtccactgaacgttggcaccagggtccccaacatgtccaccatggccttgtagatgaggaagaggaagaagaggagatcacagtccagttcggccactatgttgcaagccaccaacctcgaggccacaagagtgatgaagaggacttccaagat

SEQ ID NO: 54415 - DNA, 1245 bp, Homo sapiens
aaagatggggaggaagagaaggcgttggtcttgcagtcttgtcttaggggtgtggggagtgggggaaagaatattcatgtataagtgggaccccttgcaattccaagcccttgttgttcaagggtcaactgtaataggatatagctatttttcttcctctatcaaccaaatggtaagcatctattttgtagtccactctactgagctaaattatagatccagctatgctatttataattattttcttgatgaataaattttcaatttctcctctgaccatttcagaacatcttccaataactcataaaacaactgaagtaaaattgagtgctggaaaatatattcaccaaactttggtaatttaagttgactaaagtttaaaattaagtctaaaatagtttacacctatactgcataatccaacagttttaatttcagttgaagacatgttactaatataactattattaaaagagtagaggatgtgtaattaaccatatcttctaaaacatggttactaaaagaatatgtaacatcaatattgaccttggtttcttacacaagtgttgctaactcaatagtgaaggagacactattaaattttctgaacccatgagagatactagagatggggagtggaaagtgtttggttcagggatatctgaagaacagaagggcagagatttcttaagtgacgcctcatctacaagctggaaattcctaaaaacaagtagaaagcttataaacaacaggtgatacactcacctcactggttttagtaaattaccaatacagaaagtatccctagtcttaaaaacaagtggaaaatttgaactgattagtcatattcctttgattacactgtttgttacaatatttttctcagtaaacagaaataactaatttttttgttcttcattctttgatagaaattaaaatcttattctgtgaggattacagaatactataactcaaattataaagtagaataaactctttaaataattattcttcatcataaagtgtaaagaataagatataagaaaacaatttatttttaaaatttaatatactaaatgctcaaatatgttctactatagaataagttcttatcttaatttacagggcactaaaaacaattttaaaatgcttaatgttgccttttatattttaattggttaagaatatatatttgtttaatgcaaatcagaatcactatattaaaatgaatgttcttgaaaactc

SEQ ID NO: 54416 - DNA, 465 bp, Homo sapiens
ttttaaccagccacactgtgtgggccagggaaaacagcccaaaggccaggtgaagctgcagttttcaactgctgccttggcctctcccagagccccttaagtcctaagaaggctcagtcaacacactggcactcgtttcatcccactggttgagaaagcaagtcttagcaaagtaatgggggagtcttaccaaaactgcaaaggaaaaaaatatgataccatgaaattagaaattcactgcatttgaaatgaaaatgacttatttctgtacttctataactcacaaatttagcagacatcatttagacatttttgtagtgcaacagatttaaatctggaatttcatggtttgtaaatcactatgtgatactagctataaccatgagcaatattacgggcagtaaatgttgatttctatttcgtttcttgaagttttgtgtggttcatttttaaagtgagattcaa

SEQ ID NO: 54417 - DNA, 949 bp, Homo sapiens
tttataatagtaattatggaacatggacattttaatgaatttcatattgcaatgaagacagtcaacacttagagacaattatatcgatacaataaaaactgattccatggaacacttataaatgcatacattttcctccaaagaaatatgtttttcacagacttaagtaacaaatgatttacataggattcttcagattccaaaatatgtacagagtttttgtctctacagaaactgatgagcagtggttgaaaaagagttgctttgcccaacagcatggctcttatgaaattctgtatcatatacagttttcagtaaccacacattttccgtctatcattaaatgaaattctggacacatcagcatacaggacaaaactgttcccacttccaaacactgtttcagacgagatcacgtgtggttgacagtatgacttaatttagccacacacacgtgcgcacacacacacacacacacacacacaccatccccgatcttgtctgtgactcctgatcaccacggctgcagcagcagtggatgagctcacattagaagacgacacagcagcgaacagcaaggtgccccggctcctgagagctctgcctgagcaccacagggctgcgcccccaaggacatgcaggagtccagtttctgaggtccctccagtttgccagacaaggtgagcagctgtggcagtaaagggcaccagtgtgcctggaactcagtggccactaggaatattgacttttaaaagcttcaaaaatgtttaatctggcagagatctggttcttaagtttgatttggctatttgcagccatttttcaatgttcctaaccatcatcctaagacacccagactttcaaattaaactccgaggaacccaagcaggtggcctgtgcagtggccccagagcctcccacactgcacatacaaagggtctgagcccag

SEQ ID NO: 54418 - DNA, 430 bp, Homo sapiens
gcggcggagaaggcagggaggcagccacggtggcggctctgggggcagctcttgtcttcggggagaaggcccttggagccgggctggcatcggccttctcggggtgagcgaggtcaccatgccagcttcccagagccgggcccgtgcccgggaccgcaacaacgtcctcaaccgggctgagttcctgtccctgaaccagccccccaaggggggcccggagccccgcagctcgggcagaaaggcctcgggcccatcagcacagcccccacctgctggtgacggggccagagagcgacgccagtcacagcagctgccagaggaggactgcatgcagctgaacccctccttcaagggcatcgccttcaactccctgctggccatcgatatctgtatgtccaagcggctgggggtgtgcgctggccggcggcgt

SEQ ID NO: 54419 - DNA, 376 bp, Homo sapiens
tttgaatagactgtcagagctggaactctttcattaacatctctggcacctttagttttagccctgaacattttatcttaaaattaaacattaccaaatgccttagtttatttcatttattaaatttatattcttatttgttatttatatcagcttccaatcagaagactatacaacctcctagggtaagttaaagtttattaaatgaattgtgaatgatcatttgagggattagactgaggaacttggtaattgagatattttgctatctgttttgtctcacgtcaaattaagagaatgttgaagtcattgcatgacctttgcatgaatgggtccagttctattttaaaacctgtgtttggtcattttagtgtca

SEQ ID NO: 54420 - DNA, 845 bp, Homo sapiens
aatgctactggccttggtttaattgtgacttctacagggatattaatattacttcactactatgtgtttagtacagcgattggattaacctccttcgtcattgccatattggttattcaggtgatagcctatatcctcgctgtggttggactgagtctctgtattgcggcgtgtataccaatgcatggccctcttctgatttcaggtttgagtatcttagctctagcacaattacttggactagtttatatgaaatttgtggcttccaatcagaagactatacaacctcctaggaataactgaagtgaagtgatggactccgatttggagagtagtaagacgtgaaaggaatacacttgtgtttaagcaccatggccttgatgattcactgttggggagaagaaacaagaaaagtaactggttgtcacctatgagacccttacgtgattgttagttaagtttttattcaaagcagctgtaatttagttaataaaataattatgatctatgttgtttgcccaattgagatccagttttttgttgttatttttaatcaattaggggcaatagtagaatggacaatttccaagaatgatgcctttcaggtcctagggcctctggcctctaggtaaccagtttaaattggttcagggtgataactacttaggcactgccctgggtgattacccagagatatctatgaaaaccagtgggcttccatcaaacctttgccaactcaggttcacagcagctttggggcagttatggcagtatgggcattagctgagaggtgtctgccacttctgggtcaatgggaataataaattaagtacaggcaggaattt

SEQ ID NO: 54421 - DNA, 309 bp, Homo sapiens
ggaagatcaaggatgacactggaccagtggccaaaaagccctcttctggcaaaaagggggctacgacacagaactctgagatttgctcaggccaggcccccactcccgaccagccagacacctccaagcgttcaaagtgaaggccgtgcagagctggtcactgaaatgagcctgataggataggctggagcataaaactctgcaagggctcctctatcctgtggtcctgagctgtgtgcccttctcagtctgaggggcctaacctagagcaggtttccatagtgagaaaattcaatgtagcagactact

SEQ ID NO: 54422 - DNA, 549 bp, Homo sapiens
tccttgccgctggcccagtcactatgtagtggaggggcagacaccctcccgcaaattctggaaggttcttagtctcgacctagggcagtagcccccaggactcctagtcgccggcttcaggtcactgccggctgaacggagctgccgtcgccatgtttggctgcttggtggcggggaggctggagaaggaagccaacatccttttggagccatgaatattgtccgaactccatctgttgctcagattggaatttcagtggaattattagacagtatggctcagcagactcctgtaggtaatgctgctgtatcctcagttgactcattcactcagttcacacaaaagatgttggacaatttctacaattttgcttcatcatttgctgtctctcaggcccagatgacaccaagcccatctgaaatgttcattccggcaaatgtggttctgaaatggtatgaaaactttcaaagacgactagcacagaaccctctcttttggaaaacataatttgaataaaataatttttaatggaaaaaaaaaagtcgagc

SEQ ID NO: 54423 - DNA, 408 bp, Homo sapiens
gacaaggtggcaattaaaggtgcttctcccattgaaacttcatccaaacatttagcttggtcagaagcagagaaggaaattaaatttgattcacttccaagtgtctcctctatagcagagcattctgttttgtcagaagtagaagccaaagaagttaaagctgggttgccagtaatcaaaacatcatcttctcagcattcagataaatctgaggaagcaagggtagaagacaaacaagatcttttattttctacagtctgtgactctgaacgtttggtttcatcacagaagaagagcttgatgtctacctcagaggtgttagagcctgaacatgagcttccactcagcctatggggtgagataaagaagaaagaaactgaacttccttcatcacaaaatgtgcacctg

SEQ ID NO: 54424 - DNA, 385 bp, Homo sapiens
gttgagcagtgctggagaagtaacgaaacagacagtcttacagaaggaagaggagaggagtcagccaactaaaaccccttcatcttctcaagagccccctgatgaaggaacctcagggacagatgtgaacaaaggatcatcaaagaatgctttgtcctcagtggatcctgaagtgaggcttagtagccccccagggaagccagaagattcatccagtgttgatggtcagtcagtggggactccagttgggccagaaactggaggagagaagaatgggccagaagaagaggaagaagaggactttgatgacctcacccaagatgaggaagatgaaatgtcatcagcttctgaggaatctgtgctttctgtcccagaactccaggtg

SEQ ID NO: 54425 - DNA, 382 bp, Homo sapiens
gccaaaccagtttgaagaaactcaaaaagctagaaggcagaggttacaataaaaaatctgatctgaaactgccggtggcaataattgggcagagtaatcaagacaaatgttgacaaaagggccagggtcctttggcttaatccttggctggggatttttgcacaaagctttttgcacacaagaaggtaaaatagtctgaaggtggagaagctactgaaactagaaaattaaaaatgcaaaagttgatgggcttctgaaagttggtgtatttgaacattgtatctgattagatgtttcccccacctggtactgtaaaacagatggcatgtaaatctgcccttcaagcagtattaatttggccatgcttaattgagaaccagta

SEQ ID NO: 54426 - DNA, 420 bp, Homo sapiens
ggagaacgtggaggtcttcaccgctgagggcaaaggaaggggtctgaaggccaccaaggagttctgggctgcagatatcatctttgctgagcgggcttattccgcagtggtttttgacagccttgttaattttgtgtgccacacctgcttcaagaggcaggagaagctccatcgctgtgggcagtgcaagtttgcccattactgcgaccgcacctgccagaaggatgcttggctgaaccacaagaatgaatgttcggccatcaagagatatgggaaggtgcccaatgagaacatcaggctggcggcgcgcatcatgtggagggtggagagagaaggcaccgggctcacggagggctgcctggtgtccgtggacgacttgcagaaccacgtggagcactttggggaggaggagcagaagga

SEQ ID NO: 54427 - DNA, 1127 bp, Homo sapiens
tttttttttctctttttctcctttgggttcatctcctgtttcttgtctaacaccaggatgaccccagttttgacttctttccatttggccttccaccattgtccctggtaaggtgaagtgaggtctttccagttggaaggcattagctacaggtcgcggcggggggagaggaggtctgctgctcatgagtggctcttgtgaattattttctggatcagcaccaggaatgaacacatacaagtcatcatactggtcttcagaactctcactgccaacctctagtgggctgtgtttggtctccatgcctgatccattctgttttccttccccttccatttcatttgcctcagctccatctgcactctgcccgtatgtcttcctgctttcatgatgaaatgctgggttctgtgtggaaggaatatatgtggaaaatgaggcaatatcctcttcataatcattttcttgctcattatttatgtcaatttcttggattgaaaagtcttcgaagattttcttgagttctttgtgaccatgcctttcagcaatatgtgcggggtctgaaccctccatatttttcatcttagatgcccaggttgctcctgaacattgaagcaaatgaatagccaggttctttaagccaaattttgctgcacagtggagaagagttggaagttctttgaaatgagtatatttgttttgagaacaaatttcagtttgaagagactggaactcataatatggtatctcatgtttgaatatggatgtaaggacaccatcaagttcttcaatgctattctggcacaaactctctcctgaatctgccattctgaataggcattcctttgcctttgctgttgggtagtacttaattttggttgtagctttaacgattccatcacagtagacattgacatggactgaaccagcaggaaactctaaagctttcatgcaccagactttcttattccaaagggctggccgtgttctaatgcgcttattacttgatgtaaattcaacctctacagtatcaccaattacttcatctctcaaaattatgaatatttcaccaggattctcacatggaatttcagtgggaagcaccactgctagtggtatggtgtttcttg

SEQ ID NO: 54428 - DNA, 2709 bp, Homo sapiens
gggggaggtgagtgcctggcctggtgcggtccctctgctgtgcacagatgtgcagacgtgggccttggcatggtcagtgcacgcacagcgccaggcaagagcggtgagcggggcgcctatgcctccttcgggagagacgcaggcgtgggcggcctgactcaggctggcttcctgtcaggcgagctggccctcaacagccccgggcccctgtccccttcgggcatgaaggggacctcccagtactacccctcctactccggcagctcccggcggagagcggcagacggcagcctagacacgcagcccaagaaggtccggaaggtcccgccgggtcttccatcctcggtgtacccacccagctcaggtgaggactacggcagggatgccaccgcctacccgtccgccaagacccccagcagcacctatcccgccccttctacgtggcagatggcagcctgcacccctcagccgagctctggagtcccccgggccaggcgggcttcgggcccatgctgggtgggggctcatccccgctgcccctcccgcccggtagcggcccggtgggcagcagtggaagcagcagcacgtttggtggcctgcaccagcacgagcgtatgggctaccagctgcatggagcagaggtgaacggtgggctcccatctgcatcctccttctcctcagcccccggagccacgtacggcggcgtctccagccacacgccgcctgtcagcggggccgacagcctcctgggctcccgagggaccacagctggcagctccggggatgccctcggcaaagcactggcctcgatctactccccggatcactcaagcaataacttctcgtccagcccttctacccccgtgggctccccccagggcctggcaggaacgtcacagtggcctcgagcaggagcccccggtgccttatcgcccagctacgacgggggtctccacggcctgcagagtaagatagaagaccacctggacgaggccatccacgtgctccgcagccacgccgtgggcacagccggcgacatgcacacgctgctgcctggccacggggcgctggcctcaggtttcaccggccccatgtcgctgggtgggcggcacgcaggcctggttggaggcagccaccccgaggacggcctcgcaggcagcaccagcctcatgcacaaccacgcggccctccccagccagccaggcaccctccctgacctgtctcggcctcccgactcctacagtgggctagggcgagcaggtgccacggcggccgccagcgagatcaagcgggaggagaaggaggacgaggagaacacgtcagcggctgaccactcggaggaggagaagaaggagctgaaggccccccgggcccggaccagcagtacggacgaggtgctgtccctggaggagaaagacctgagggaccgggagaggcgcatggccaataacgcgcgggagcgggtgcgcgtgcgggatattaacgaggccttccgggagctggggcgcatgtgccagatgcacctcaagtcggacaaagcgcagaccaagctgctcatcctgcagcaggccgtgcaggtcatcctggggctggagcagcaggtgcgagagcggaacctgaatcccaaagcagcctgtttgaaacggcgagaagaggaaaaggtgtcaggtgtggttggagacccccagatggtgctttcagctccccacccaggcctgagcgaagcccacaaccccgccgggcacatgtgaaagggacccaggctcatgctctgaactctggctgagaggatgctgctcaggagccagcacaggacaccccccaccccaccccaccatgtccccattacaccagagggccatcgtgacgtagacaggatgccaggggcctggccagcctcccccaatgctggggagcatccctgggcctggggccacacctgctgccctccctctgtgtggtccaagggcaagagtggctggagccgggggactgtgctggtctgagccccacgaaggccttgggctgtgcgtccgaccctgctgcagaaccagcagggtgtcccctcggggcccatctgtgtcccatgtcccagcacccaggcctctctccaggtctccttttctggtcttttgccatgagggtaaccagctcttcccagctggctgggggactgtcttgggtttaaaactgcaagtctcctaccctgggatcccatccagttccacacgaactagggcagtggtcactgtggcacccaggtgtgggcctgggctagctgggggccttcatgtgcccttcatgcccctccctgcattgaggccttgtgggacccctgggctggctgtgttcatccccgctgcaggtcgggcgtctccccccgtgccactcctgagactcccaccgttacccccaggagatcctggactgcctgactcccctccccagactggcttgggagcctgggccccatggtagatgcaagggaaacctcaaggccagctcaatgcctggtatctgcccccagtccaggccaggcggaggggaggggctgtccggctgcctctcccttctcggtggcttcccctgcgccctgggagtttgatctcttaagggaacttgcctctccctcttgttttgctcctggccctgcccctaggtctgggtgggcagtggccccatagcctctggaactgtgcgttctgcata

SEQ ID NO: 54429 - DNA, 362 bp, Homo sapiens
cggacgcgtgggcggacgcgtgggcgacagaagagattctgaatcacttattatagcatattcccagtcttaagagaaaattttgcatcttcccttgcggtggaggtgggagagtcttactcagtgtgagacggctgttggggtccgagcctcaacttcaaggttccccaaaggcaggagggaggcctgcgtgtgccctggccctgcagcaccggcactgacttgggaggcggggagcctgcgcacgtagtgtggggggcccagtctctacacagctgtccagctgtccttgccgattgctttaggaggttcactcatctttgtaacccttcctgtcttggacagcagtagtgcctgtgacc

SEQ ID NO: 54430 - DNA, 333 bp, Homo sapiens
gtgctttatttactgttactggtttattttaaagtatacaattagtaatagccaaatggaagtgatccataggtcaagggtcgaaggtggaggacagagctcccatgccctctctgtgtgtgccatcttcctagcatatcagtgtgttcaccaattgagaggttctctgaatctcttaggtaaggtttttttataacctaatctcaagcacccacctctcctgacatatgggggtggagttaaaagttcccaccctttagtcaagtgtttggtctttctggtgactaacctcatcctgaggctatcagctaccctcccacacctaccccatat

SEQ ID NO: 54431 - DNA, 695 bp, Homo sapiens
gttatacagcagcaggatgtgaccttgcccatgggcagcactgaggcgtgggctgtggggccctcaccacgggtcccgcctgagctctctcctgtgcctcccaggcctcctggttgtgttcgcacctgtggtcctggggctgaaggcaattaccttggctgcactcctactggccctggctacctctcggaggagccctgggcaagaagatgtcaagaccacaggcccagcaggagccatgaacaccttagcatggagcaagggtcaagagtgaggggtcagccccagagtgaggaccctctgagttggagaggagccagggctcctcaaccatttccctacctccagtcccagcctctaggtgcccccaggcctcatgacaaactcctagatccctacatctggttttggtccacctagtgaaattcccttctttgcacggggcttccctataaaatgtctccctttctctttttggcctgttcaagacctccttgcttttcagtccctggctcagtctctcctcaacacccttgcccctgctgcagccctttttggtgcgccctgcccctttccccacctcgttacatccttcttggcctccaacatccaactcagagtcttcttcccaggagatgtctgtaagaatctctgaactcaaccagccagaccatctgtgcccctccatctacacc

SEQ ID NO: 54432 - DNA, 835 bp, Homo sapiens
cgctgtcccgctcttgctacggtggcctggaggagtggcgaaaccggaacagagaatttatcacttctgggactcacagtcgtgatgtctttcaagagggaaggagacgattggagtcaactcaatgtgctcaaaaaaagaagagtcggggacctcctagccagttacattccagaggatgaggcgctgatgcttcgggatggacgctttgcttgtgccatctgcccccatcgaccggtactggacaccctgggccatgctgactgcccaccgtgcaggcaagaaacatctgtccagcttgcagcttttctatgggcaagaagcagccgggaaaggaaagaaagcagaatccaaaacatcagaatgaattgagaagggaagaaaccaaagctgaggctcctctgctaactcagacacgacttatcacccagagtgctctgcacagagctccccactataacagttgctgccgccggaagtacagaccagaagcccctggtccctctgtctccctttcccctatgccaccctcagaggtcaaactccaaagtgggaagatcagtagggaacctgaacctgcggctggcccacaggccgaggagtcagcaactgtctcagcccctgcacccatgagccccacaagaagacgagccctggaccattatctcacccttcgaagctctggatggatcccagatggacgaggtcgatgggtaaaagatgaaaatgttgagtttgactctgatgaggaggaaccacctgatctccccttggactgatacccttttcccattcattcacaaataaattacaatgggtgctgagaacttaaaaa

SEQ ID NO: 54433 - DNA, 552 bp, Homo sapiens
gtcgactttttttttcctctcccaggtgcgcttccctgcttgatctgtgtaccctgctctttctccttcattccgcagcctcctttgccctgtgacctgcaggtactggacggtccctagagaggataccgggacgctcctgaagccgcgagatgagccaccatcactcatgttcttgaatgggaactgcctggagaccctgaagaagaaggagcctgaagaaggaggcggcggcggcgatgccacccagggaaaatgggcttgacgaggccggcccgggagatgagaccaccggccaggaagtcattgtcattcaggacacgggcttttctgtgaagatcctcgcccctgggatcgagcccttctccctgcaggtgtccccccaggagatggtgcaggagattcaccaggtgctcatggaccgggaggacacgtgtcaccgtacctgcttctcactgcacctggatggcaacgtgctggaccacttctcggagctgcgcacgtcgaggggctgcaggagggctctgtgctgcgtgtggtggaagagcagta

SEQ ID NO: 54434 - DNA, 1591 bp, Homo sapiens
ctcgtttaaattgaactttattaaaataggtgccagttttcctctctcctagttccactgatgagctagcccagaactatgtaactttgagccaagtttccaaagatggtaaagctaacaacagcaaagtagtaaggacaaatcggtcacttttggtaatgacacacaaattaaactttcaaaacatgtgcatagctttattcatctacttagatctaaccttttcacggagcttcggcaaaattcgagtgtgcaaaatgcatttctaaaacgtaatgcaagcaaagctttcacatttacactggcaggaaatacagagagaaactaacaagtcacattagggaaaattcagatcttttttttttttaatgacaagaattgcacagtttattattttgagacaattgttgcagacataaatatttaaaattttctaagcaaggtgcttttaacaaaatttttaaagttggaaagagctgataacttggatcatagctcacacagaattccaaattaaagtggactccattatctccctatattttgcaaacaatgctttgtataacacttctttaaaacactaaaagagacagcaagctgaaacttttttcaaagcacacaagaaatgtttacttgaagaaggtgctgaggggagaagggagtgaagaatccttttactatttcccactacaggacagccactaacagactaagaacaaaaaagatacaacaaaaaaagtaaatcacttccccagcttataaaatagttccagtttcgcaagatctgtaactttaaacagagagcaccagttgggcaatagaatgagcatttcatactgcataaaaattagtgaggtggtaagaaccatcgactatctcaggcattactacatggcgtttcccaattttttttttttaatatacatgcaaggcacattgatataaaaatagatctctggccaacaaatatattaaataagcaaattaaaattttgggctttgcgatattggcaacatcaaaatataaccagatagctttggccccacacatctttcctcattccctcccacctcatttggtgtttcccacccattattttgggttcaatcaccttcaagtttgggtatgtgcttgagaaatgacttttcttcttgtcaagtagcattcactaaagttttcctttgctaagtaaaaagacaagagaaacagctggagttttgattgatttgatttaaactaaatctgattggttcagggcagcactatttcccctctatatacaaacaaaaaataagtccccagcttacatagacaaatgttttctaaaagatcagcaacaaatcaatgacaccacgtcctttaagccattcttcccaattcctctttctgaggcagagagagggaataatagaaacaaagctaagatttaaactattttcagtagtagaagacatttaaggccaaaaagtgtactattaacagaattcttatattcctaagttattgtccttcataggacaatatcagctaagaattagttacttgtattgattccctcccaaaaagaattttataattcattcactcttg

SEQ ID NO: 54435 - DNA, 1189 bp, Homo sapiens
  misc_feature (1)...(1189): n = a,t,c or g
tttttttttttatgatgactacttatttatttctattttatatgcggggaaacagctcagttattactcaaagccacacttaccaaagccagaggtaaactagtacaagtcttttgattcttagcattatattcaataaattcactaggtattctctaactgtacttttgatgggatattgaaatctttaaaggagaaattccatgttggaaccaagcaaagggtggaatttgacaaagcagcccaaccactttggcttacaaagtcctttatttagttcctaccctcttcatctgcatagtaaatcatagggttcccccccacccccaccacgaatagcagttaatcatggctattctccaaaaagctaggtgcaaattaactttatggctccagtctatctaatctgaatgaataaacaacctaaaggtttggggtaaaccacagcacagaagaagcaccagatctaggctccaggctggtctctgccattgctaacagggacaccaattccacagaatcatcagattttaaatggctgtttttgtatgtaccagataaaactagtgcaattttattgctgctggtacttttttttttaaattttgggatatacattttcaattggctactgtaacaaactaaagggaatttacaatacactgtcgtactgttcataaacttcaaaatgagagtagtgccatggaagaaaagagatccagttttaataccactttatggccaataatcagtatttattgtttctcatttgtcaggcaccattctaagctcttttaaaatattcagtcttaacaatcctataggccgttatctccgttttacaaaataaagattgaaataatttatccaaggttgcagagtcactgctgcaatcaggacttcaatgttctgctgcactgtcttcatcactgctttactgcctctcagatcagatgcacgccactacctagcacacaagaggatgtgtgaacacctcctactcattcaacctgaccttgtccttggctcttctccctccggtcttaagattccctccttcacccctccctccatttggcagatctccagggttaattaaacctttctacctctacccaaacccttgnttcctctgaactgggttccagcctttaaaatggccctattccccacatgttaaaaacttaag

SEQ ID NO: 54436 - DNA, 471 bp, Homo sapiens
gcaacataaacagcagcgggaagcattgatttctattcatcctgccctaaaaagatcaggagtaagagctttttagaaatatgtatttagagagaagtacctatctattttgtgatctctcaagaaagtaattatgggtgacgttctccttttgttcatgtaccaggatttgtgaaatattattcacacaccgacccaccatcccacgggcctggcctctcttgtacaggatatgcaggaaactctgtatgtgtctgggacccattattaagagttatgggagttcatcctaggatgtctgccttatagttatctcttcttgcactgagacattacagatatcatttgggggctactatatatcttctgtaaaattacttttatttgttgagaagaatgcatactaagtcaggaacatgccttaatttgttttgttttgcattgagtagaagggctaaactgtataccctc

SEQ ID NO: 54437 - DNA, 413 bp, Homo sapiens
ggaaactagcattcgaataggttatgactcatcccctgtcacataacagtaactggcagagccagatgtaccagtcaggactctcctggtgacaagaaatagacccatctcaatctggcttaagaaaaaaggggaaacttattggttcacataactgaaaaccaagagtaatggtttcaggcatagctggatctaggggaccaaatctgtgtctcttaagccctcagctttgctgtcttttctgttgacttaattctctgataggcttcccccaggtggtaacagagatacataaagatgcttcctagcagcttggggcttggcatttatgagttagcagctgtagagagagaacacatctcttcctggtagttccagcagtagtcccaggctgattcccactggaccaatgg

SEQ ID NO: 54438 - DNA, 768 bp, Homo sapiens
  misc_feature (1)...(768): n = a,t,c or g
cggcagtgccatctggtgggtggcaagtgggtacaaagacaacgctgaggggtagtgactcctgtagcagcagagacgccttggagtttaacccccaccaaccagagcgtgggctggtaaagatgaaatcttgcaagttttttttttttaaatcatggtacctgttttaaaatgagaagttattattcatactgtgttgctcatttgacaaaataaggtaaggatttcataatcaggttgtctgggtttcaaagctgtttttaattgactgagttacctacaggcacccaatctagaccctaattctgtggttggtgttcctctgtaaatttcaagacaagtagtgatgtcattttctccctgagctgtagggtggacctggacccctcagagatgctcgactgcagggtcctggggtccctagagtggtccctgcagcaacccctggcaatgagctgcctgatgatgagtcccaaggtacattgttctactgttttatacccaggtagaagttacacagcaatttagcaatgttgttaacagacatacagnnnnnnnnnnnnnnnnnnnnnnnnnnnnnnnnnnnnnnnnnnnnnnatataaacgtgcaattaaaattcaaagtttattttttatcacaagcacctttgaaatgtacgtggaaaacgtcggctgctcgtgagaatcatgtgtgacttacgttccttatgttttatggaactctcggaacagtgttttgtttttgtttagtttttgttttcgtttttt

SEQ ID NO: 54439 - DNA, 466 bp, Homo sapiens
  misc_feature (1)...(466): n = a,t,c or g
ttgnnnnncctttggannancagctatgacatgattacgaatttaatacgactcactatagggaatttggccctcgaggccaagaattcggcacgagagaatctccagagaaaataaaagtacagacaacaccaaaagtagaagaagaacaggatttgaaatttcagattggagaactggcaaataccctgacaagtaaattcgagtttctaggcattaatagacaatccatctccaactttcatgtgctgctcttacagactgagactcgaattgcagactggcgggaaggggctcttaatggaaactaccttaaacgaaaacttcaggatgcagcagaacaactaaaacagcatgaaataaacgccactcctaaaggctggtcctgccactgggacagggatcatagacggtatttctatgtaaacgaacagtcgggcgagtctcantgggagtttccnnatgg

SEQ ID NO: 54440 - DNA, 823 bp, Homo sapiens
  misc_feature (1)...(823): n = a,t,c or g
ggtcgacttttttttttttttttttaaattaagagacagggtgtctcaatgttgcccaagctggagttcagtggctagtggctattcacaagaacgatcatcgcacactacctcaaactcctgggatcanagaaatcctcctgcctcagctttcnaagtcgctgggactataagtgtgtaccacagcatgtcagctctctctctccttcttgacctaaagcctagcataaaattagctaagtagaatgtttccaaagatggctgcatcagtatctcccatcccacataatttctgtttgattttgccattcacccataaaatggtgggatctacctcccctccttgcaaatttgagctggccctctgatcctgtctaagatctgaagccagatattaaggtacttcattaatttccatgtttgtcctctatgcaacctagcaatcaagccagaagtcaaaacatactgacatagtttggatgggtccccacccaaatctcaccttgcattggaataattcccatgtgtcaagggtggggccaggtgcagataactgaatcatggggatggttccccccatactgttctcggtggtagtgantaagtgtcatgagatttganggttttatgaatggnagntnncctgnacangatctcnntgngccnngncaatatgtnagcccnnacacatacacacacacacccctacacacacccatgtaaactatgaaaatcaaggaagttgaaggcaaacaaggcaattaaaaaaaaatacgaagtactcttcagaaagtactcctcatcacaatatataaatatgttt

SEQ ID NO: 54441 - DNA, 355 bp, Homo sapiens
gaacgattgggctgagcagaggacgacatgttgcttttcgtggagatgacaaaaccgagccccagaggttaaagtaactttacttagtaaaagtaaagtagtttaactgggatttagatccaggtcatgctgatgtcaaatcatggacgggatgttagcaattcaggcctgtccgactccccagcaggtagcatctaaaggaactggtttaaatcctaatgccaaagtatggcaagaaattgctcctggaaatactgatgccaccccagtaactcatggaactgaaagctcttggcatgaaatagcagctacatcaggtgctcatcctgagggtaatgcagagctctcagaagat

SEQ ID NO: 54442 - DNA, 552 bp, Homo sapiens
ggtacttctcctagttgcagtcaggcttcatacgctattgtcctgcccgtaagttcccgttttgtgtgtggttagagcagccagcgggtacagaatggattttggaagagggagtcaccactggacctccaaggaagccacgtgcagacatctacaaccttcgatctcctgacgagtttattgttggccaaaaccaggctttgattgaaccaggatgaatgcgggtgttggaagtagaatatatatatacatataaaattggttgggagccacgtgtaccagtgtgtgttgatcttggcttgattcagtctgccttgtaacagaaactggcgatggaatatgagaggagccctctggaaagaaaaggacagaccctgtgctttcatgaaagtgaagatctggctgaaccagttccacaaggttactgtatacatagcctgagtttaaaaggctgtgcccacttcaagaatgtcattgttagactttgaaatttctaactgcctacctgcataaagaaaataaaatcttttaaatcaaaaaaaaaaagtcgac

SEQ ID NO: 54443 - DNA, 329 bp, Homo sapiens
gtgggcaggcatgggaaacaagtaggaggtgaagtcatcagacataaatattgttgaatgaggagtacaggtactgaagtcccaatttaggaaagcacaaagtggtagactacagatccagacacttctgtaattcaagaaaggaagttggctttgtccaaacttatataagtgatatggtttggctatgtccctacccaaatctcaccttgaattgtagttcccataatccccaggtgttgtgggagggacccacgtggtaggtaattgaatcatggaggtggttaccttcatgctgttcttgtgatagtgagtgagttctcaggaga

SEQ ID NO: 54444 - DNA, 387 bp, Homo sapiens
cttcacatgaaatattctgtctccatctccacttgctaaagttgtttccatccttcaagactcaaataccacctacctgatgaatcatgagctgattttcacttctgtgccagagaccctcccatccctcctgcctttgaacatccatagcatgtaatttatactgcttttccatcacttatggtggagaacttgtattcctgacacttgcctaccttgatttgtccaccaatttgattgtaagtgtcttgaggtcatagaagtaaaagcatgccttgttacccagagtatgggctgtctgcctttgctatcagaagccgccttaattgtgaactgcattgaattctcaacagagcaggacctgtctctgtaatttaatcttttcct

SEQ ID NO: 54445 - DNA, 1276 bp, Homo sapiens
tgttcacatgggttctttagaaggaacatagtcaagtgtgatggattaactctatatagtctttctcctcttgtgcgtgtaggaaatctgacctgcagtgtcagttgatgtgacaagagataaagaaagcacagtattttaaaatctaaagcagattcctttcttagaaaacaataggaaaaaattatagatggatgtctttgctgaaatctaacaattagctcatattccatgagaaagagtggcctaagaattatttcatgttacctagccttctgaagctactcacttgatgtgcctagcactttgaaactaaccttttctttctttgttcatgacagtttaattccaaatatttactattttctcttgtaactgttagaacagttccttttgacattaatttttgcctacatatatatttttaagttgagaccaaatcggtgaagtgttgagcaagtaacatttatgatgtgtgtatattggaacaaatgtaaaagggttacaaagattagaaacagagtcataaaaaatggcttgatttataaaggcattacttttggtgctttatataatggcatatattgaactaaaaatttgtatatacagtatgtcagcatttcttagtaacttctcttgaatccatttttaatatctaatattgtacaggttggggagttacattcttcaggccaatactatccagactatataaatttataaaataaattgaaaaattcattcccctgtattcaagaccaaagcacataaatgctaatgtagggctcagaggggaaatacagttctcctgcatatttgagaaaatgtgaagtcctttcaagaaaatctaataaacataataatcatagcctgctgacactaaggaaaaaggacctcattcactctttcttttatgcagtgatttactggtccctactgatttccaaattggatcacgatagtaaattatccatgctggtacctgtgaaagtaagccctgggatccatatttgttttgtgttctgcttaaatcagcaagaatgataaatttgatggtgtgaaattggaagtatcaagggctttctttggtgattgagggaaataatgtctctacttgtaatttattgtgaccctttttcactgtatatgctttgtatgtctaatatttatttcaatgcaaattcaattgttccttcatctgtattgttatatctaagattttattgatgttaaaatctaattgtggaataaaaatctctctggaatttagcagata

SEQ ID NO: 54446 - DNA, 872 bp, Homo sapiens
ctcaatattcatagaagatgaagaaataagtctgacaacactaaagaaatttcttaatatactattattagaatagtagaggataaaagataatgttatccagttacaaaggaatttggatgataattataacttaatgttagagatggtaaagctgcacttacttgaacagcccaaaagcattaaaaatctatttccagaggaatgttttgctatgtagggaaattttgaagtagtttttgctaaaaaattatttctagagttgtgttattcttagcagtaatcttggctagaaatgtttttgtgatttatgcgattaaacgaaatgataaagataaaaccatattattaaatacctatatatcacagctaagtaggagaaagggagacctttttattttgttcaggtaggagtatttcttgtgtattttagaaacaattatttttcccattatttcttatgagattagttgtttcaagtaggagacagaaaagttctgttttgttggaaatgtaggttttagatgtatctttcagtcagctctcagtcactagactatttcatattttttgaaatgtttttgaaaattatgactagcccattttttgtcctttattcaacatacttatcctctgaacacataaataagtgaataagataaaaatatctttaccttattaatattatacatacttgaaaaaaatttcatttagaaacctagttcagaatctgagcaaatttacaagtgacctctgtaataaatggtattgataatcagagaatgtatttcagaatactacagtacaatatattatgaagcatgaccactttattttgaaacttagcaattgtattgctgggggtttattgt

SEQ ID NO: 54447 - DNA, 154 bp, Homo sapiens
attgaatgtaagattagtgtaagatttcaagagaagaagtgtagtattcagctggatctcgagtttgggagagaagttgaggccagacctgtggacttggtagatgtcattgaaactatgggagtggatgagatggtccaaaggatatgtagat

SEQ ID NO: 54448 - DNA, 541 bp, Homo sapiens
ggcaaaagctgtgcctcacttctgcgggttgaaccctttgtatgtgcccagtgccgcacagatttcacccctcactggaagcaagaaaagaatggtaagattctatgtgagcagtgtatgacctccaaccagaaaaaggctctaaaagctgaacacaccaaccggctgaaaaatgcatttgtgaaagccctacagcaggaacaggtaagaattctgactgctcactggccacctgtcccagtttgttttttccaaagggtcgcgccttctagtttgcaggagtggttcatgtgatccctacaggtccacaggttccctttttgtctccttatcattgtgtcctatttccatttgagcgagtattctgattaaggaacatggtaaaatataatggctgaggttaacagaaagggacagaaagcttgggactcttggcttttccatagcactctattctcatcttcattttttcctaaaacaaataataggattttggtgggaggaatttatatttgtgctataaatctctttgaaacagtta

SEQ ID NO: 54449 - DNA, 2313 bp, Homo sapiens
  misc_feature (1)...(2313): n = a,t,c or g
tgcttttgtacttcataagcacttcaaattctcacatacaatgtgtctccctcaaactttgttatgaggtcagcacattacccatctcacatgaaaataaataataaaaatactccaatctccaactaagtttattcaaattataaaagctgtgtcatagaaatgacaattatctcctttatcttacgaagaccatcagaaaattctagtttgaatacacatggatgtcgtattacaatgatgcttctccttgcttttaaatttaacttagttagtatttttgctgtttaagagaatatttaagtctgaagcccaaggacagattaaagtggtatatncagctcnnnnnnnnnnnnnnnnnnnnnnnnnnnnnnnnnnnnnnnnnnnnnnnnnnnnnnnnnnnnnnnnnnnnnnnnnnnnnnnnnnnnnnnnnnnnnnnntcctgctcattttcttgaaagctgttgttaaatgtttgcaccttgcattgtatatgcttagaaaaaaaaacaagtcctggttacataatcagaataacaggagttgacgagcaaaaggataacccatcaggattataaaaaaagctttattagtgcatatatacaaatttacaaggtcagaaactggagaaatacaaagagctttaaaacacaatttgccgtttcctcagtttaaagtgacttttacctgattgtgatacaacagaaagtacagaacagtaaactgctttttaaatactggaattttatggagaatacattcacataaagaaaggaggtgaattttgttttggaacagggttaagacaatggagacattaatacatagagtgtcttgttgtatttactgccacatacttgaggggaaattctcaaaatcaaggatatgaacacctgctgctgcctgtatgccacctagtgtgcgaaacgaccgagctaccagttctagaacttatgagaactactctaaagagtgtggccatctatcagcacgaggtaaaccacttagacctcagcacttcaggggtggccgactagagaaaagaggccagaaaaagcttcagacaattccagtcaagcaaggtagaatgcagagctgccttctgaattgcacttgttctggaggagaagttaattcttcacttttgtcagggagtcctctacagaagtgttatactcatgagccacatgttcttcaagactgatgaggttaatacacctaacatgctaagtttgccagtttgagaataaaggcagcatggtcaaagcaattccaatcacctcatccctttgcaaaaacagaaaaattacatttcacaaaagtgaaaactttgtatgcatacactcttgcccaggaaatttataagatctcccccataacatttatagtttatttgacaataaaactggttaagactttgaactgaacacaaaacaaacaataatacaaaaaagttttaaaaacttaaaaactatgtgtttggagccattttccttctcttcagccttgctctccaatcctcaggaagggcttcaaaattagcatttctctctgccatgccactaaccagctgctgctgtttccactcttcaattcgcttctgtgcagttgattcccgatcctcttcactggaactagaattgtcctcttcatctaactcacgctggatactctgccacttttttaccaaagatggcattttggtcttactcttctttgccttgtctttccttcctttttttgtcttttcaggtggtggcattttgggagctggtggtggtggaggagggggtggaggtgattctggaggtggaggtgggggtggtggcatttccaagggtaatggaggttgaagcacaggaacatttgactgaaggagggtccagaatggagtaagtggcatgagtgatgaagaagaaacttgaccagaaaaggattctttacaaagagaacctgtggaagtttcagaggattctgttgaatttgaatcagtgccagttttgtctttcaaggtctgtttggcaagagtctcatctctattttcttgtgcttgggctttcttcttcttcctcttcaccatctgggaaactcccactgagactcgcccgactgttcgtttacatagaaataccgtctatgatccctaaattacaagaaagaaaacacatgttttaaaacccgttctcctacaaagacccttccatttggtcctgtcccaggacagcagtctgctttcacagggacgaacctcttaatggactgctattcanaaaggcaacaaagagctttgacaattgagaatggagaaccaag

SEQ ID NO: 54450 - DNA, 317 bp, Homo sapiens
  misc_feature (1)...(317): n = a,t,c or g
ggagagctacaccatgagcttcaataccctgataacataaaattaaaaaagcaactttattggaaatatctctcttaaggaaatggatggggaagtgccaggattaaaagaggctttccctaacactatattggtattttaaattatccctttgtaggccaggcccggtgnnnnnnnnnnnnnnnnnnnnnnnnnnnnnnnnnnnnnnnnnnnnnnnnnnnnnnnnnnnnnnnnnnnnnnnnnnnnnnnnnnnnnnnnnnnnnnntntactaaaaattccaaattagcccggnttttgnnggtccccccttnnattc

SEQ ID NO: 54451 - DNA, 453 bp, Homo sapiens
  misc_feature (1)...(453): n = a,t,c or g
ctagttctagatcgcgagcggccgttctagaggatccctcgaggggcccaagcttacgcgtgcatgcgacgtcatatctctctccctatagtgagtcgtattataagctaacttnnnnnnnnnnnnnnnnnnnnnnnnnnnnnnnnnnnnnnnnnnnnnnnnnnnnnnnnnnnnnnnnnnnnnnnnnnnnnnnnnnnnnnnnnnnnnnnnnnnnnnnnnnnnnnnnnnnnngctgcatatgcttgctgcttgagagttttgcttactgagtatgatttatganaatattatncacaggagctctnggnngnncctcaatcctgcatcccccatagttaagaaaatcatcgaaaagatgctgaacagctttcccgagcacctactcagggcacccattttctcattgcagtgacaaatccaactgaccanaangggaangaagctcactggtgg

SEQ ID NO: 54452 - DNA, 1909 bp, Homo sapiens
gctttccagccccaaccatgcataaaaggggttcgcggatctcggagagccacagagcccgggccgcaggcacctcctcgccagctcttccgctcctctcacagccgccagacccgcctgctgagccccatggcccgcgctgctctctccgccgcccccagcaatccccggctcctgcgagtggcactgctgctcctgctcctggtagccgctggccggcgcgcagcaggtgggtaccggcgccctggggtccccgggccggacgcggctggggtaggcacccagcgccgacagcctcgctcagtcagtgagtctcttcttccctaggagcgcccctggccactgaactgcgctgccagtgcttgcagaccctgcagggaattcacctcaagaacatccaaagtgtgaaggtgaagtcccccggaccccactgcgcccaaaccgaagtcatgtaagtcccgccccgcgctgcctctgccaccgccggggtcccagaccctcctgctgccccaaccctgtccccagcccgacctcctgcctcacgagattcccttccctctgcagagccacactcaagaatgggcggaaagcttgcctcaatcctgcatcccccatagttaagaaaatcatcgaaaagatgctgaacaggtgagttatggtttccatgtacacaggcgactggagccgttggtcagaaatactggcatgtgccccctaaaaataaaatcaggaaaacccaggggttagttgaaggactagaaattgggattattgttttcacaattaaggtttcctttacgataattactgctctggtgccagaggatattcccaatgcctggcgtccccaccctggttcttccttcgttccaatgaatgtaggtaaaactgccttcatttgaggcccagtaggacaaacagcaacaggttctggctgtttttaatccaatagtacagtggagaccaccgccccaccccacccccattcctaaaagagcatcccaagcttagaggtccctgccacacagcacagctgtcataggcagtagccacttggttgccaggctggggaaactgcattcggagaactctagaggctggaggagcagggcaggagaagagtgttgtgcaatcagctttcccgagcacctactcagggcacccattttctcattgcagtgacaaatccaactgaccagaagggaggaggaagctcactggtggctgttcctgaaggaggccctgcccttataggaacagaacaggaaagagagacacagctgcagaggccacctggattgtgcctaatgtgtttgagcatcgcttaggagaagtcttctatttatttatttattcattagttttgaagattctatgttaatattttaggtgtaaaataattaagggtatgattaactctacctgcacactgtcctattatattcattctttttgaaatgtcaaccccaagttagttcaatctggattcatatttaatttgaaggtagaatgttttcaaatgttctccagtcattatgttaatatttctgaggagcctgcaacatgccagccactgtgatagaggctggcggatccaagcaaatggccaatgagatcattgtgaaggcaggggaatgtatgtgcacatctgttttgtaactgtttagatgaatgtcagttgttatttattgaaatgatttcacagtgtgtggtcaacatttctcatgttgaaactttaagaactaaaatgttctaaatatcccttggacattttatgtctttcttgtaaggcatactgccttgtttaatggtagttttacagtgtttctggcttagaacaaaggggcttaattattgatgttttcatagagaatataaaaataaagcacttatagaaaaaaaaaaaaaa

SEQ ID NO: 54453 - DNA, 360 bp, Homo sapiens
cccagacagtgtatcggcagctgctcctggggcgggaccagctcaggctgaaattactggaggattctaacatggatacaactctggaggcagacacaggggcctgtcctgaggtcctggcccggcaaagagcagcaactgcccgcctgctggaggtgctcgcagacctggatcgtgcccacgaggagttccagcagcaagagcgagggaaggcggccctgggcccccttggcccctaaggaaatgccagagctagcccggaaggaggagcaagagccagggggccctcttcagcgcatcctgccccgggagtctcctgtctccttggacctctttgattctgtggtttggaggctccca

SEQ ID NO: 54454 - DNA, 1099 bp, Homo sapiens
gtttagagaaggacagtcagaggagtggccacctgtttgttgaaaattgggcttctgggaaagttgctgcacaagtgtgtggcaaggtgtgtctgagatagcttgacctgctttcacctggaatgatttgatctggcaatagagttccttgccattcctggttttatggaaatcagaggcacaggaagttgatctgggtgttctggggaattgagacaagcctctgccatagtttgttagtactctgtgtttggatgctaactccagtgtgctgagttgagacatcagcaagtgctgggcctggaatgtcagaagcagcaggtcctatctgactcctgtacgggatgaggaagcagagtcttacggaaagcacgctccagacaagctcggcagacacgaaggtctactcaaggtgtcaccctaacagaccttcaagaagcagaaaggacattcagccggttgagggcaagagaggcaagctcaggagcagcctcgtgagaagcccacagacactgaagggcttgaggggagccctgagatgcatgagccctcagcagttccagcaacagaagctggggaagggccaagcaagccctggggcaggagtctggatgaagagcctatctgtcatcgcctgaggtgcccagctcagccagacaaacccaccacgccagcatctccttctacgtcaagaccctcactctacaccagttcccacctgctatggacaaatagattttcagtccctgattctgagagttcagagactaccacaaacactacaactgcaaaggaaatggacaaaaatgagaatgaagaagcagatttggatgagcagtcctctaagaggctgtccatccgagagaggaggcggtccaaggaacgacgaagaggcacaggcatcaatttctggacaaaggatgaggatgaaactgatggctctgaagaggtcaaagaaacgtggcatgaaagactttctaggttggaatcgggaggtagtaatcctacaaccagtgattctttacgggtgaccgggcttcagcaaagagcccgtcgggaggccgggaggcccgcctagccaccctgaccagccgtgtgg

SEQ ID NO: 54455 - DNA, 346 bp, Homo sapiens
tagagtttcatgaggccatagaccctttaacacctgaagatgctgcagcagtgcccccttaacacctgagaagagtgtaggaatgttcccataactgtttgcttgtcgttgcagtttataatgcagttatttggttgccctgatattcttgaataaagtgggaaaacctgagggcaagagctttgtcttcttcatctggtacatagtagattctcagtaaatattgaacaaaggattcctattccccacattggaattttccacattcttttttcccctccaaaaatacttgagttttagcttttatagtacttttaagtataatactaatttcaaaaatactggg

SEQ ID NO: 54456 - DNA, 563 bp, Homo sapiens
gccgaacgcagcttccccaaggtgcaggcgcggtgaaaccatcgagacggagggccagagagtcacggcggttttcgtaacaccccagggcctgtaaggtttggtgtttccctttcaagatgccactttcagactttattctggctctgaaggacaatccctactttggggctggatttgggctggtgggtgtgggcacagccctggccctggcccggaagggtgtccaactgggcctggtggcattccggcgccattacatgatcacactggaagtccctgctcgagacaggagctatgcctgggtttgcttaagctggctcacccgccacagtacccgtactcagcacctcagtgttcgagatttcgtaacctttcagcatgagagtggccgcatttccactaagtttgaatttgtccccagccctgggaaaccattttatctggtatcgggggaaatggattcgggtagaacgaagtcgagagatgcagatgatagacttgcagacggggacttcttgggatctgtcaccttcacggccctgggcactgaccgaaagttt

SEQ ID NO: 54457 - DNA, 756 bp, Homo sapiens
cacttttatttctttttcctttatttcactggctggaacctttcatattgtgtggaatagtagtgataagaggggacattcttgccctcatcccaacctctaggggaaactatgctttcaccagtttgtatgatgattctgattctgtaaggattggtaggtgatcttgagttgaggaagtttcccatgatactgctttccatactgaccgcagtatttcagattcccacaaaatgtacgaaaatagtttctccacatccttgcttgtgaagcaggttcactgcacactggttgccaatgtgtctgagttgagtgagagataatctcacggacacacagtaagttacatgaagtgaatttgttacatacagatcggcagatacctgggattcatgcattctgctccccaaggctcaggaaaaccacccagtgcagatgcagtctctctgtatgtgttcaacttgcatcacagctgtgggaggctggaaggcggcccatcctgggtttcatgctccagggatgcatggcacgttggcttttctttcttgtccatttattttcggtttttttctctttctttcttggttttctttctctttttcaacttctctttcttttctctttctctttactctctctcttctctctctttctgcttccagggtagatgggacttgaaattcattttaatagaaggaattttcgtggatataatctacaaccgattttgctctgcgcaggtaagatccgttttca

SEQ ID NO: 54458 - DNA, 1119 bp, Homo sapiens
ggcatgaacaggacctgcaggtggctggactgagtgtcccccaggcccagccaggactttgcctaccccagctgtgttgtaaaccaggtccccctcctgacctctgccccactccaggaatggagctcttcccagcctcccatctgactacagccagggtggggactcagcgggtataaagctagtgtgaccctgctcttccagctcctgggccagctctggaagggctgtatttgggcctaatcctcagcaaatgttctaccactcgcaggggcaaaggtggtgagccacgggacgtccaaggggaggctggccccagcgcgcccatactgcctgcctcatgccccattctcagcctggctggcctttgcctttatgaatctgagcccctccatctgcctatagcaataggcacgggggtgaggaccctcacactctcatttgagcctccctgaggaggggagccagggaggcacctgaggcctatctgtgccttagtcacttcagctatgagccaaatgttccctttcctgggaggggagaggcttcttactaggtaagagacaggtttcctctttccttatttccttcagctgtgccaacacaaaaaacaactttggcacaggtggtgggcagggggtagagagatttcagcttgggttctgcactaacagcctccaagccccctgggcacttctgttgccctgagagtgtcccagggggattcagagtctccagaaagatatggctgggccaactctgttgcttacctggcctgacccagtcggagcctgacatggtggagggaaagggagacaagtggggctgcactcggtccagaggccagctaggagggaaaccgcagcttcctggggcttgtgtgtgaagattcctgacttaggggtggcttttgtttacaagatgcaagaggggaaacctgtccccgactcatcgagacaacatgcccagttatcagggagtcctgtgtcacaaggtctgtctctgccattgtaagcaagtgccttgggcgagctggcctctgccccacagtctcatctgtacaccgacagggttgatgcctccctcacagggttgagaacaagagccagttggccaagt

SEQ ID NO: 54459 - DNA, 1076 bp, Homo sapiens
  misc_feature (1)...(1076): n = a,t,c or g
gctttcctaaaaagaaaaagttatagttttgggacatttaatttggtatagctgattattggctttatttgatgaatattgctttgtagctttgaaatacgacagtgttccaaatcccatcaacaaaatgctgtgaacaacaacaacaaaaaataaatcaagaaggcatagctgtctgaatccccaattattgaggcacactccttggcctgcagaaatgtgattgaagtaaggagtaatttgggaaatggagtatcatttgtgcttctctctggagtacttactgtaacagatgcacacgttatctacttcaacccttttataaagcaatatatagaggtcttagatgtataatccttgagatgccatttgatcagatgccaatttgtattcagagctcataaaaacaagtccattcttatagtttgtttgtcactgagacggtgcctgatttaatatatttaagctgcttaacttgttttccaagagataacaccaactgttccagcaataatttgttttttaattcagagatatgggatatgatcttctaaggaggttgcattattttgacctgatttatttattgtacaagagcccaagtccctgaattatattcttaataagtgctttcttgcattcatttcagtttagtctcaccaaccccctatgaattaggagaattattgtcattttacacatgaggaaagtgaggctgagagaatccaattagcttgtacgatatcactccataagagaagcaaatctgagagtaaaacccttaccccttattcttaagaatagtgcttgtttattcagtacaaaaaaaatgctgaaaggcagcgttttttagactctaaacattctgattttgaaggtgggtgttggaacgactgatgatgttttttatatcatcaattcagccaatggatgcgaacttaaaatctggattcacagaaccgtgggtcacatttccccatcaaaatccccaaggcgggtcccaagttctctcctctacggttcattgcaggaaatactttggaaatagggtctgccagttntacaataggcngtga

SEQ ID NO: 54460 - DNA, 294 bp, Homo sapiens
ctaagttttcctccaaagtttggggcagaaagcaaaagaaaaataacagtgttgcagtcacccctaaaggtgaaatgcttgggtgtgggggtgtcactgaccaaagggaatgtttctagaatgttctagaatagaggatgcttcacatctgacccagagttccagaggactacactatggagataaaagaagaccactattcagggcagaagtaaatattactgtggtttcattagcagtaaaggtcagtgcaccagcctccccccaattccaactctgtaaaaaaaaaaaaaa

SEQ ID NO: 54461 - DNA, 477 bp, Homo sapiens
cggacgcgtgggttaatgggtaaatgtgtgtttggataaatatctgaaaattttatccttaagtatatataattatttgcctcttatatgtcttaaagctatttaaacaaggtgttaaatgagccaaaacaattaagtaattagaacagtacatttttatcagtctgtcatatgcaatgaatgtatgtaatactaaaaaatcatgactacttttatcaaagaaaaaccacacattaatcctattaatcatgaaagcgtagcattgtaaattaaaggttttctttgaggctcttgaaagtgatcccattgctttcctgttttaaaaatattttatgctctttatttccacttctgtgaatgtgatatttctattttgtgattatgttactgaataaacaaacttgctacataaaattcttagcaattaaaaaaattctgattctgccatttgctcaaatgtaatatacccttttaata

SEQ ID NO: 54462 - DNA, 490 bp, Homo sapiens
cccccgtcccgggcggtcctagtgccggcgacagtggctccgacacgggcaggcccgggcgcgggagtggggattccggtgaccccttgttgaccctgcgggaattcctctgcactgtcgtcggtgctgggcctcggggcgtcgagtgcggtcgaggtcgggaggttttggtgcttggagggaggatacaggtttaggcccgacaaacacttagagcttgtgtggccatcttgtctttctaacggtgccatttcctccctgaggcgtggaggactggccagcccccaaacctccaagcccatcggctggatgccgtggataagcgaggggagagcgactaggccctgtctgcgggtaccttcggcgaggagaggcgacgaaggtctgcaccagcgaggcacggacaggcagcagggggtagggtatagggttggaggccgccgagttggcccggggatgaggagcaaacctgtggcttccgtggtctcag

SEQ ID NO: 54463 - DNA, 947 bp, Homo sapiens
ttttttttttttaagaaacaattgttttactgtacatgtgaataacaagaaatggtacggggaatgtgaataacacgaaatggtatggggaatgtgtgactagtgaagcatattttaacttttttattactggaggaacagagctaaaggcctaaagaaggccttacagtatataacagtaaatagaagagtaacatctttatacaataaactgttagaaatgataagtgtaaagttgtgcgtctctgcggctcctgaacttgaagattattatgaatagattggaccagcattatatattaaaaactttgatacttagaactttccaactttaaaattcagaatcataaatggtgacaacagtagtagtattgaaccaaaaatagtcaagtaaataatgtctcagtaaagcaaaagcattatcttctcaaatacaaaaaatacaaaattcatttcttttcttgaccttgaaaatttctgttttccaaatacctaggaaaaatgaataccttctgcgttgaatccatgtagcaatctgatgaagtcatctatgtccatggaacgggcccgtttgtcactaaaacctgtgctggttaggatttgctgtattttatctgctatgctgaaatcttctggtattataatattatggactgaacagtgaattctgtagtttttttccaagagttgttgcactgcacttgatttaaatgcagcagagagtgtcttgtttttcctaacaaaggttatccttactagaccatcccattcctgaaaattgatgggtggtggtggattcttaggttctatccttacaacactggattccaccttgggcggtggtctgaagttattctttcccactttcattagatggtccacacgtgccaacagctgtgtattaattgagagtctgcagtataacttatctccaggttttgcaacca

SEQ ID NO: 54464 - DNA, 666 bp, Homo sapiens
tctctgttataaacaaggcgcatggacatctctatgtattttggggtacatatggaaatgtttctctggattagattccccaaaatagttggttcagaaggtatgtacttataaagtgttgatgagtactatcaaaatgacctccaatagttatatagtaagatgttataagagattttgaagactttttgctatatttaagcaatttctacacaatatttaaagccatctctttgcccctctggtaattgtgaaagattgaatatttgtatctttcttttaggaactatagatttagcttattgtgacattctgtacagagacttgaagaaaggtcttgaaggacttgtgcttgaaagccttcttcatctaatctacctaacaaccccctatgatctggtttcacagtgtaaccctgattggatgatatacttcaggcagtttagccaactcagtccagcagaacaaaatgtagctgccattcttggagtctctgaaagctttattgggaagaaagcatcaggccaagccatcggaaagaaggtggacaagaacgttgtcaacaggctatatctgtcttttgttctttataccttgctcaaagagaccaacatttggactgtatctgaaaaatttaatatgcctcgaggatatatacaaaatctt

SEQ ID NO: 54465 - DNA, 615 bp, Homo sapiens
gggagaagacacacagtggggaaagcgttctttcaatatgcagatgcttcagggagaaccaaactatttcactggtattcccccgtaccaccggaactggtgcttggagcggaagggaagtgagatcagtcgattagtcaccaacaccatcatcagcattgccagagaggtcgagagcagacatcatggaatcagacagcttgctggcgattttatctgcacgtttctgcatcttcttcttatttttcagggcagatgccagagcctggccctgttgcagggggtccgtctccatgatcctctgcagcactgagcggcggtccactgagcagacatccaccatactgttgctcttagggcggtggtccacattgcgtttagcccaccccatctgatgacggttcggattggtgcaatacccagtgagatctccaatcttatacacggtggttttattttcaatggcatctgctattttcgtcatcggagaatggagcaacttgatctccatttcaagtgggtccgtgtcacccaacagctcatcagattctccggtggccaagcattccatggtgtcttcattggcctgctcagtatcctcgatgtcaaagacct

SEQ ID NO: 54466 - DNA, 1269 bp, Homo sapiens
  misc_feature (1)...(1269): n = a,t,c or g
ctggaaggctgccatggctagcccagccgcctcctcggtgcgaccaccgaggcccaagaaagagccgcagacgctcgtcatccccaagaatgcggcggaggagcagaagctcaagctggagcggctcatgaataacccggacaaggcagttcctattccagagaaaatgaagtgaatgggcaccttcgacctcccccagaatttgtccgagatgtcatgggttcaagtgctggggccggcagtggagaattccacgtgtacagacatctgcgccggagagaatatcagcgacaggactacatggatgccatggctgagaagcaaaaattggatgcagagtttcagaaaagactggaaaagaataaaattgctgcagaggagcagaccgcaaagcgccggaagaagcgccagaagttaaaagagaaaaaantactggccaaanaaaatgaacnttgaccgnaaaaacaagaaggacccggtcagcccaaggagcaggggtccagcagctctgcggaggcatctggaacagaggaggaggaggaagtgcccagtttcaccatggggcgatgacaatgtttgccacagcctctgcctggaacctggctcgtgctgtgaccagaagggaaaggcggctgtttggctctttctcccccgcaaggacctgctgacccgctggatggagagcaaaggagacccctcccgagccgctcacagtcctgtatttggcaggtttgggagcctgaggggccatctccctgacactcagaggcactgccttgcagacaccatccgtgctcctggtaaagggggacagagagcctcaccttgccacatatttgaacagtgatgagtttggggctggtttctgggaagggaacgtttatttagtaaagagcagaacacccttgcgttttgttgggacatgtggaccgtgagtcgcaaacactctggagaaggctgagatgccaccattcccacggggactgaagacacattacgtggacctggtcccaggctcagtgaggagatggcctcagctgtggggctggtccatgttgcccactcactccagtgggaagtggggaccacgccatagagggtctgctcccactgcagctcccggtgctctcgtgttctgggaaggcctgggtgtgtgcacaaggaggcccgggccagggacttcaccaggggctgggtcacaagggcacagggtgtgtggaaagcgctgtgggggaagagccggtcaccggagagtgagcaggcggagac

SEQ ID NO: 54467 - DNA, 805 bp, Homo sapiens
cacttaaccaagccattacatcttaaaaacaaaacaagtagcatacattttgtaattaacattgataaacactgtgatttttttggttaagactttttcattgatctgaattgcttaaattgcatatattgtaaaataggatcagatgtatattttaaactaatttcaatggattttcctcttgaaatgctttgtctactcagttataaaatattcagatacaagttttatctcaggtgaatactcttgtattgtttttgctttggtgacatgcttataaagggtcatcctagttacattctttgttttttaagtgtatttcattgagaatctttccatttagtctgatttttttcctaatattctagcagggctggggtggtataaagccctcctgacaagccttttgcctacaggtttacctgaaaatgagctacatatggtcgtcattttcttcaaactctcaaaataggaaagtggaaatttttctcccctatataaaattattctgcctagcagaaatgccagaaataaattaattgcatcttagtctaaatttaagtcctttgccatgaggaaaaagtggttttttgcttcatatggtaaatctatattattcatattgaatgtattaacagataatggtgcaaaagcattcttcccaggggaagagtgtatcatgcataactgcaatttaagtccttcctttgataatacttcaaaacatacacagctttgcttactgaattattttttgcaataatacaagggggggaactaacttgctactagtgttgttaatgag

SEQ ID NO: 54468 - DNA, 2123 bp, Homo sapiens
gctatgtatatacgtgtttattatatgcttattacaaaagaaaaagtcttttgccttattttagggcttccatgtaaaacctagttaaaatacaaaaagtaaattagagaaaaattctgcttaggtagtgaaaattgatagcaacttataagctgtatccttaaaaacctagtcacagatatagaattacgtaaagataaaatgataagcctacttattggcaagaaacaggttaggccacttaagcagcatgtttctaccactatacaaatacatcggcaggtccaaacattaaaccaccattcgattgacaaccttttatttttcaacttaggtaacagtccaaaatcagtgtagattggcgaaaaactaggcaaaaatagcaaaaagtgcagtttaatttagcaaaggctcaagacagtatgtggaaggaaggtgagatttccctcctactgcggcaaggcaagcggcagttactgcccgacagtaacgatggtgtgcgcacccccgatgagaatgctgctgcaacacagactgggacgccgcctcccccattagacctgccagctcattcgtgaaaatctaccaggaacacatcaatgaaaaaaatatgtcaaatatgagttctctgttataagcaataaaatcacaaaatcaactcagatttgaaatttagggtaagctaggacaatttcctactttttaatatatagatattttagatttgacaatcgtttccacatacactcagacaggcttacagaagaatttcaaatatcaaatagagaagctgttaattcacgcacgttatgacttcagttaattcttccagtgtttagacttcagagctgctaataacactaaactcaataccgtgtttgttgagtctgtcaatcaactttgttttggaaaaagctgctccaggtgtgaagaccccgcccgccttaggcagatgagaagcatcacttagaagagtcatggctgcctgaaccatagctatgggggtagccacatagcccagcctctggtcctttcacctgagtacaaattttgatatttggtttgttcttatctgtaccagtgccttggctgtatccttgaccaaagaatgtcagcgtgaatgaggcagcatcaatctgtttttgtgttgggccttgttttgaaaaatagccaaaggagaagaaccatgggaattttatgagaagttgccttccaattccaaacctcacaaagaacaaaaagaaaagtcctgcaaacatcagcttaataacagaggtgatgcctccccacagttacatacgcagcatactgaactggtgattcctctaaattttcatacaagtaacgttgagtcctccttacaacagacacatcagatcccataaaaggaatggaataacctttgagttcccgacaataagaaattggccaccttctcttcaattttggaccaatgagcgggacaggtttcagatttgatacatttcttagttttctcaaattactctgatctccaaaaccataaattgctgacttccaggtaccatcatgaatgctcaacccctcaggtcctgaatgtatagtcaggaaactttccacagcagtcaaagtaccattcattttatttctggtatatattactcccagatctgctggaatggagtcaaagccgctgcttccaatgatataaacccctttgtctgcagctttctcatgatacttcagttgcattagttccagaaactgaggttctccactgatgtcgatacaactggctccattttcaatacatgcttttattacaggttctccataaaaccgatatggtcctacgcaattgaggacaactgttgcctgtttagccatttcatcaagcgaggctggattagcaatatcacagatgatgattccaacttcagatgacagtgttggtcttcccagcttcagggccgccttctccagcacccgctgcagcttctcccgggagcggcccgccacggcccagggcaggcgggagctccgctccgggtccacctgctcccggggccacctcctcggtcacgaactggccggtgaagccagacgcgccgaacaccaccaggtggaaaggcctctgctcggtc

SEQ ID NO: 54469 - DNA, 876 bp, Homo sapiens
attggtgccaggcctcactaacacaggggctacctgtctcttattctcagcacctgtgtcctgagatacgctgcctgagacagagagagtccctcattaacagcctgtgtggctgtcagctttttgcctaaattgtgattcagatgcttttgttctctctcctttcacttattgccacagttgaggaaaagtgtcagattaccctgcagcaagacaagccaaggactgggagggaaaaaaaaaccactctggaggcaactgagaaaatcactgcttttggataggaatcagtagggtggctgttttccctttgttgaatctactagagtgacaggaaggactcccagccctttcagtaactatcaggagccctgaaacggtagaggcactgccatccttgtgggatactcaaagcccacagggcttttccctccctattgcatcttctgatgctccccacacctaccctccacctctccacctctgtggtgttcccatttgtgtgtttcccatctgtggagccagactgagcaatagcttagcagcgagtcagggacagctgccactttccacagagccacaggatgggcagagcagggacccagggaatgaatagccagtggacaaacagtcttgagctctgttcagccagagtgatgggccctgccagttaaggggctgtgtcttcatccttgaagacagatgtgcaatattgaccctgcctctccccagggctttgtggaaagattagttgagggctttagtgagatcacactcagagtggggcaattccagcatttatcctggctgccgtttcattgcatttgtctgtgaagtaataatttttgggccagaattgctccagtttgcatttgg

SEQ ID NO: 54470 - DNA, 354 bp, Homo sapiens; identical to SEQ ID NO: 42226

SEQ ID NO: 54471 - DNA, 654 bp, Homo sapiens
ggctgctctctgagggttctgttggtggagaatctgaaggctgcagatcctttctagatggaagcttagaggatgcttttaatgggcttttacttgcattagaaccacataaagagcagtataaagagtttcaggatctgaaccaagaagtcatgaatttggatgatattctaaaagtaagtaccttttcagagaaattggattaggtttggagagaggtgtcctaagccaacattctatttaagatgaggtatcatttaaaaaaaaaatcctgtccaatcacaggattaatagctcatcatcattttaaatggcactaatatgccagtagtgcatattaagttttattttccaaacaacagatcaacttatctaaattgattaggatttaaacaaagagctctagagaatgttgaaattcccccagtccccaagttaatcattttaatcccatatgtgaagtaaaggcactttgatgattacagtctcacaggcgttactggataggatccctctcagggggtcgggaaagcagggagccctttgcctggttggagtcagagttatccgtcccattgtgagagccatgagccactgcctgctggaggagactacctgctctcacaattggccaaataaccaagcagaatctca

SEQ ID NO: 54472 - DNA, 1017 bp, Homo sapiens
ttttttttcatccttagcaactttgtttggttagtactgcataactcacagcagattccaaggcacctgccttgaacattgctacatgctctaggcattatcaggaacgcagccagggtgcctgcaaagttgtctccagtttctgggtaagaggaccatcatccatattgtctgtggctttgtgtctgagttgggctactgagcctgtgacttcagaccccttgtctgcctgatggatacattctgtataatacgttaccatcacaatttcatgaatgtaactaatgaagatctagcccttccatgcctcctgctgaactatgtcacctgtgataataaaacctctacacatagcattttatacaaagcaagtcaaacagcaatgatagtggcaagtgatgtatttggcttaaagaagcttgtgttactgaagttaacgcagaagtctggcctccgtttgtgggattattaaatatatatcctacgggatcagagtcatctattagaaacagtgatagccctgggtataaataaacatttctttagagtttggcgtcagtttttcaatgtccatcctcaaatcagacagtctgtttgaggggtcagttttcagggtgcatctgcaccgagaggcttgaggcagcaatgacccctgggctgcagttcggttgcaggcgctggtggcgggcagtccaggttggagggtggagatgggccaaggtcacagatgctgcagggcttcctgtccttgctctgtgtaaccgtcatcgcggtgggtgtttgcccactgtccaaaggactcctggatgtgcacgtttctctgtgtgttggccaggcgcttcttatctcgggagaagaagctaaacagtcgcttgatgcccgactccggctggggggaccgtcctcgggtgggcgatgggtgggggttggggtattcggttttcctcttccatttcttcactcttatagtaagccaagctcctcctgcagcaagaacaccttggacttgagctcgtt

SEQ ID NO: 54473 - DNA, 373 bp, Homo sapiens
ctgttatcacatatactaacgtttgagacttttaattttgactttagggtacatgtatcaatacagttgtcttaactttctaagatgtttgatataaaacactgtaaatcacttagtttaagtatgaagaccatttttgtttcctcttaagagggtttttattacacttttagtctaagaagtgttgctgctgaggccttcagatgtatattctaaatttttcttttttctttttattccttttctttctcatactggtggtcagaagaaggccttatgatttagtagaattgagcaatattgataaagattgtagatacaagtttatttttagatttcttagacttgtaaaattgagaaagataattaaccc

SEQ ID NO: 54474 - DNA, 5712 bp, Homo sapiens
acagagtgtattccgtgccaaacctcagaaaagtgttcctggagagggatctggtgagtttaagaaggatggcgaattctctgttcccagctcaaatgtccgtgaataccagaaggctcgtgctaaaaagaaatacattgagcataggagcaatgagacctctgtaattcactctctgccttttggtgaacaaacatttcgccctcgagggactgctctatgaatgtcaggagtgtggggagtgctttgctcatagctctgacctcactgagcaccagaagattcatgatagggagaagccctctggaagcagaaactatgaatggtctgtcattcgcagcttggcccctactgaccctcaaacaagttacgcccaagagcagtatgctaaagagcaagcgcggaacaaatgtaaggacttcagacaattttttgctaccagcgaagacctcaacacaaaccagaaaatctatgaccaagagaagtctcatggcgaggagtctcaaggcgagaatactgatggggaggagacccacagcgaggagacccatggtcaggagacaattgaagaccctgtcattcaaggctcagacatggaagaccctcagaaggatgaccctgatgacaaaatctatgaatgtgaggactgtggcctgggctttgtggatctcacagacctcacagaccatcagaaagtccacagcaggaagtgcctggttgacagtcgggagtacacacattctgtaattcacacccattccatcagcgagtatcagagagattacactggagagcagctgtatgaatgtccaaagtgtggggaatcttttattcatagctcattccttttcgagcatcagagaatccatgaacaagaccagttgtattccatgaaggggtgtgatgatggttttattgccctcttgcccatgaagccacggaggaatcgtgctgcagagaggaatcctgctcttgctgggtcggccattcgatgccttttgtgtggacaaggcttcattcatagctctgcccttaatgagcatatgagacttcatagggaagatgatttactggagcagagccagatggctgaggaagctatcattccaggcttagccctcactgagtttcagagaagtcagaccgaagagagactctttgaatgtgcagtctgtggagaatctttcgtcaacccagcagaacttgcagatcacgtaactgttcataagaatgagccctatgagtacgggtcctcctatactcacacctcatttcttactgagcccctcaaaggagctataccattctatgaatgcaaggattgtggtaagtcctttattcatagcacagtcctcactaaacataaggagcttcatctggaagaagaagaagaagatgaagcagcagcagctgcagcagcagcagcccaggaagttgaagccaatgtccatgttccacaagtagttctgaggattcagggcttaaacgtagaggctgctgagccagaagtggaggctgccgagccagaagtggaggctgctgagccagaagtggaggctgctgagccaaacggagaggctgaagggccagatggagaggctgcagagcccattggagaggctggacagccaaatggagaggccgagcagccaaatggggatgctgatgagccagatggtgcaggtattgaagacccagaagaaagagctgaagagccagagggcaaaagctgaagagccagagggagatgccgacggagccctgacggtgtgggaattgaagcacccaggaagaaggtgaagtatcaagagcattcaggtaggaagaaccatactatgactgtcatgaatgcacagaaaccttcacttccagcacagcattcagtgaacacctgaaaactcatgccagcatgatcatatttgagcctgcaaatgcctttggggagtgctcaggctacatcgaacgtgccagcaccagcacaggtggtgccaatcaagctgatgagaagtacttcaaatgtgacgtctgtgggcagctcttcaatgaccgcctgtccctcgccagacaccagaatacccacactggctgagggcatggggtaaaggttagaaaaccttcacctaggacttgacccttaccaaaccacagagaatccaaaccaatccatgataatgtcagtaggagacttaaccttagtgtgttacacacctgacttaacatctctaaactcagattgaaaagagaccgaatgtgcagattccacagtcttaagctttccccttcagatgtcagtgtctgcatgtgggaaagccatagcacacatcttacctttccaagtaatcagattgagaaaaccctatgagtattccagactacagagtttgcccaaatcaactgtaaatgacacttgtgtaacgtatatatagtgtttcatgaggtgtatataaaatagcaaattatgacagaacagtgatcacatatatttggatttatatgatatacagttacagtttactctgcagaggtaccttacctgggtattctttgaattttttttttttttgggaggaggaagagagcaacaaatttgattatatttttaagtgtcttaggatcctgaggaaagatttattgtgccattatttgaaccctgtcaatatctttttgaggtaattgttttgtttcttaccccttaaatagtcttgtgaagctgtaggcatgatagataacatggcttttactccttactgtttgaaaagataagtactttagcttctttctgcagccatttcatctgcgccaacactttggaacctaatactgtgtaaggctttacaatatacggattggctttttgtgacccagattgattggttgccacatgttatgtttgttgaagtggttctcatgcaaaaatattacacatttgtgttctgggtttttttttttttttttaaccaactcaatatgtgtttgatgatagtgaattgataaaacccgaagcttttccctgtaaatcttacatctttgcctttaaagaatgggttacaaccatcactagatcacagtagtgcctaatgaaggttgagaaccgtaggagaggctctcatgctgtaaataatgttgcaggctaataacctttcatcacttcctttgtgcgcttcctgccttaagtgacaagtagcaacatggcttgggtcccctgtgcagcatcagcttatgctgccacaagtcagtttgcaccctaggtgcccaggagctagtatccttagatctttctatcgctaacttaattctcttcgttatttatctgaccctctaactccatgtctaacttgcattaaaaaaaaaaaaaattctttacagtcaacccaagcttaacatggactcaggttccccagcagccttaatttgttttgttaacatctgttccttctttttcagctctcctagagtatttctgagtgttgtgttcatctaatcttagtattcttttaattacaaattgacctcacagcttgaggtttcttgtgtcttattctgtggactacctgtgctcctttgcttcccctcccctcgcataataactatattaagaaattttttttggccttgagttggctggaaaaaaaatataaaatttaaaaaatttaaaaaaaaaggtttgcaaaatgtaagtgtagatcatttgaacaagcaaaattaaagtacccactgggggaaatgtgtctgaatcttactcttctggatctgcaggattagggcttggaagtatgtcaaagatggagggagtgtcaaagtttaggaagattgtagagctgagagcaagaagcagaaatgagtgagtcaaagaagggagtcctaatacatcaccagatctaggaggggagaggagacagacagaagaaaacaccagaggcaagaactgtagaaggccaggtttctgagaatgaattgagcggggtgtcctgagcagtttggaaaaggagtttttgatggtatggtgtaggtgagggctggctgcataggaaggactgaggttggaacggacatcgggaaagctgaggggcagtgaggtttactacatgggaaaaggactcttgaaacggagaatcagtgttgatgtcagggtgaactttgtgggtacattacttggtgttaacattgttggcagtggtagcccctttttcagaaagcaacttgctgtaagtcagggtgtccgttccaaccttcagctagtgaaaaggtagtaacaaatggtaaacaagagaatgattgtttaaacctatctgtggacacttaatgcaactgtttaaaaatgataatcacgagttatgtagcaacgtggaaatatatttacagaacattaagtggagaaagcaggacacgaaagtatatttatactacagttataactcaacagttcatttatatgctgttcatttaacagttcatttaaacagttcattataactgtttaaaaatatatatgcttatagtcaaaagctgttgtggtgttgttgttgtaggcttatagttgagcattattttcttaaatttcttgaatgttctttatggtagtgttactaaaaagtttatgatcacattttcattgtgaacataatttgaactcattatcacacacttggaaaatacagaaaagtggaggaaaaaaaatcatatccccaccatccaaagacatatactcttcctcttatcttgttcattcttgtttctgtgcacaggtttatgattataactgtgtcaaaatgtatattcaaaatagctgttacattacctttgtggaattatggttaaatactttcactttaattttttcaaatgttccctataataatgtcctgataacagtgtattatgtgtgtctccattggtgtgcataatacatacccagaggaaaaattagaaaataaagtaaattattttaaaaaattacctatattcccaacacctaacaactactgctaacatcttgatctgtttcctctatcttgtttcagtgcacacgcttgtgataacagtgttaaatatgtgtgcataaagtcttaaatgaaaagatgtggaaaataactaaaatagtgttgtcattgtgggaatttggttaaatattttgtctcaaattccttaaataatctttggtgttttggtaataaattttatgtatgtattttcccattacaaatataatacatactcatacaaaactttggaaattcagtaaagaaaattcacacatattcccaacacccaacaacaattaactgttaacatcttgatctgtgcactagtctgtgattattagggtgttagtgataagtatgcataaatgtcaaagatgggaagaaagatgaaaaacaagaaatagttgtgtggttgttgtgggattatggttattttgtttcggtttccttgaaaggtcatcattctagtgttttggtagtccacctttactacatatatttccattatatatgaaatgtgttcattatagaaactttgaagttacagaaatgtagaagagaaactcacccatgttttcaccatccaaagagtgtggttaacatcttgatatattttcttcatcttgtttctgtgcacaggtttttggtttgttaatatggttgtggtcattctatctgtaatagtgtcaacaataaaaataaagttaaaaataaataaaaaaaaaaaaaa

SEQ ID NO: 54475 - DNA, 171 bp, Homo sapiens
cagagaaagaaatatctttgctatttgtataaaaatggaaattttaacagcttagcctctagagagttactgaacgtggttaccttgggaatgtaaatagaactgcaaattaaaatgactggccacttcaactgggtaagggaaacagctgcaataaagcttcgtgaatat

SEQ ID NO: 54476 - DNA, 676 bp, Homo sapiens
attctatcccggtccacagctcaggaaccatggacaagagtccaaggaccagaggcatggagttttcattagaaggttctgaattcatctaatggctggttatttttacagatgccaagtttacaaaacatacaagtgcacagacaggtgtgggaggtagctcgaaatatacagagtgttcgcaacactagagacgtcttctggctgccatcaggggactcggaggtagggtaggcttggtgaggcccgtggcttgtgtccgtggcacagcctcctgcaaaggggctgccctgctcccctgttcccatggtgccaggccgtgctccccaggtgcctccggggtgctgaagatcttttcatagtactcgatcagcagttcagtgaacatgttcaggggcacaagggcactcagggaggagaccccctgggatggccagatcaaattcagcccgaagacacaggccaggttagagctgttcattttgttgaagatgctctcccgggacaccgcatgcaggaagcccatgaggtagcggaggacgacgtagttgtgctctgggaggctccgtaagatctggcggcagccagtgacacgcaggctgctctccacacctggaagggcatggggctccctgctgagctccagaggggccaggggcagcgaggtgatcccgag

SEQ ID NO: 54477 - DNA, 392 bp, Homo sapiens
agggacttcctttccccaaattaaaactcattttgaggtgtttggttttgtcttttaatttttgcaacttcaaaattgatgactcagttctagtgtactttatcctcgaacttgtttaaaataggttactttcttgaaataaataataatataatgaagagatcatgacttggatttgggtgggggaattaaataccttttcaaaattgccatcagtatcatcttggatgaagaaagttcagtggttaaaagcgtcttctgaagtgtggtcatagtcggtgaggtttatttcagtttggcttctcattttaattttcagatgtatatcatatatatgtgaaaagtactgacaaaaataatttatgaaataaacacagtagggcatgaggttg

SEQ ID NO: 54478 - DNA, 855 bp, Homo sapiens
  misc_feature (1)...(855): n = a,t,c or g
tttttttttttttttttttgagggttttctgttatttctttattggggtgggggtggggtgcatcattcagatctttgtgctggtgcctacgtgcatacaagtacacacacacacacacacacacaggcatgtgttcacgtatgtatacatatacacacaaggccagagctctagtgtgctggaggaggggcaagctctttttccaagagggtattagaaagaggttgattccagaggatgagtggtctctgaggctatagccccccactgggtgggcagccagctctgtgagaatgccagggtgcagctgacagcgctggaggcctgggggactggactctgagaggagcttgggcagacacagcagcctccggccccaacactgccctgggttggcaggcccagccctggtcctgacaggcaggtccttgagctcctcgggaggagcgtgacgacccttagtgtttcatgggaccactcggtgggcccttcctccgtgccaggcctgtcagaggacagacctccggtccaggtggtccccacgcccgnttccgcttggtgccgcacttccaggtgcttgttctggaccttctcaaagtgctgcagcagctctgcgtagtcgatgctaggggagtcagctttctgggacttgggggctgcntntagactgtctctgggaagagggagcagaaatgctcagtgtcagggatcagctcacaggggggttactgctggagggcagtggggtcagagcaaggancacaggctggtgggctcgcctctgggcgtctgtctcaggcctggcaactcttccgtcatggcgggccccagagctgggaagcccctgagcattc

SEQ ID NO: 54479 - DNA, 839 bp, Homo sapiens
ttttttttttcaagaaaaaaaaatcactttaattgaggaacactttcagtttgtgacaaaattatgctgtgaatcaggtgttgcaaattatggcccactgcctgcttttgtgtaagttttattggaacacagctacattcagtccatggctgcttttagaatacaacagtagactttaacatttggaacagggaacagaaaccagagccatacagctaataaacttgaaaatatttacaagttgatgctttacaaaatccatctgctgacccctgctctgtaccattgttctcttctgatggtctgtttactaaaaaataaaaacttcacaaacatgtaaaaaatagatttgccatttaaaatgtgcttttcaagtttgactttttaggatgcaattaattcactaaatacagaacttaactaaggacaaaaatttaaagatcagcattctttcccttcccatcacgctcaacttaacatgaagaactgtaaacatcctaagcttacaacaaacctatctagttagacttcagttaaccacttacacatccccctcccccatgaactatttggaaaaagctgcaggcgtaatattggatccctaaatactttattctccttataccattatcagacccaagtatcatctaatagtccataatcaaactgcctaaacagtttctacactgtctttttaactatttcaaactatcaaggttcgcattttcttccttagaacttttagtctttttcttccccaaaatatttgagtccatgccagttgcctttagttgtacccaaataatggttggctatttcctaaaggagtactcttaaat

SEQ ID NO: 54480 - DNA, 437 bp, Homo sapiens
ctgggaaaaacatgataccatgttgcttctcgagttgttttgttttagtctttggtctttgctagtagctaataacacgaactagtgtttatcaagtgctttttacacagaagggcttgggctgtgttctgcattttcttgtttaaccctcttaaaactcctataaaatggtacatatttttctcccaatttacagtccctttaaagcaaataattataaaaatccctatacatgtcacacagctagatctgggatttcaaatcaggccatcaaacaaagagtttatgtacttagtaagttttctgttctttttctacaatagagtcagatagcaagaaattaccaagccaggaacctgaaacaaaacggacatcatgtggggctgggtgggtgcatgggctttgcagactggactttcactccagctcttttaatg

SEQ ID NO: 54481 - DNA, 638 bp, Homo sapiens
gagtactgttctcataaaactgagaggagaaaaaaagtgaaagaaagcagctgctttaagaatggttttccaccttttccccctaatctctaccaatcagacacattttattatttaaatctgcacctctctctattttatttgccaggggcacgatgtgacatatctgcagtcccagcacagtgggacaaaaagaatttagaccccaaaagtgtcctcggcatggatcttgaacagaaccagtatctgtcatggaactgaacattcatcgatggtctccatgtattcatttattcacttgttcattcaagtatttattgaatacctgcctcaagctagagagaaaagagagtgcgctttggaaatttattccagttttcagcctacagcagattatcagctcggtgacttttctttctgccaccatttaggtgatggtgtttgattcagagatggctgaatttctattcttagcttattgtgactgtttcagatctagtttgggaacagattagaggccattgtcttctgtcctgatcaggtggcctggctgtttctttggatccctctgtcccagagccacccagaaccctgactcttgagaatcaagaaaacacccagaaaggccttaatgacct

SEQ ID NO: 54482 - DNA, 993 bp, Homo sapiens
cgtattgttacctaggggtggtttcttttcctgcagtcgcgatgtgtgattgcagatggaaaacaaagtattttatgcctacgtttctaagatagaagaaatggacttgttgaaaagaagccagtttgtaaaggacacagtaggagaatttaaggtaccaccaccagagagaggttgagagtgcgtttgacttttggttttgtcaaacgcgaggttttccgtttccttccggggcaagttgaacctgtccagcccccgtaggctgtgggtcaaaagtgccggtcaaaatggaagtgaatccccctaaacaggagcacctgctggcgctaaaagtgatgcggctgactaagcctactttattcaccaatatcccagtaacatgtgaagagaaagacttacctggagatctctttaaccagctgatgagagatgatccttcaaccgttaatggtgcagaagttttaatgttgggagaaatgctgactttaccacagaattttgggaatatatttttgggagagaccttttccagttatatcagcgttcataatgatagcaatcaagttgtaaaagacatattagtaaaagctgatcttcagacaagttctcagcgtttaaatctttcagcctccaatgctgcagtggctgaacttaaaccggattgttgtattgatgatgtcatacatcatgaagtcaaagaaattggaacacacatcttggtatgtgctgtgagttatacaactcaggctggagaaaaaatgtatttcagaaaattcttcaaatttcaggttctcaaaccattggatgtgaaaaccaaattttacaatgcagagagtgacctcagttctgtgactgatgaagtatttctggaagcccagattcagaatatgacaacctcacctatgtttatggagaaggtttcactggagccatctattatgtacaatgtaacagaattaaattcagtcagccaagctggagaatgtgtgtcta

SEQ ID NO: 54483 - DNA, 381 bp, Homo sapiens
ctggaccacatggggttcaaatagtggcagaggtaaagaagaataattagcttagcctacgctcagccatctattcttggagccaccagtggagtcaacttttcctggaatcccttggtttcccagtagaagtcaggggctgttgcatagggaggggaggccaccaacaaacaatgtgaaatggatttttggaaaatgcctctggctgtgttgttgtcagataataatcagtttaccttacctgtatgggcagaactctagaccaagctgcaaaccaaaaacttagttactaaaaaccagttatctttgttctttgaactgttacttgtggttaaaattaaacttataaacactaaagctgtcatacagttggacatccag

SEQ ID NO: 54484 - DNA, 402 bp, Homo sapiens
atttttttctttaaaaatttctattctaacacaacttggttgatttttcctggtctactttatggttattagacatactcatgggtattattagatttcataatggtcaatgataataggaattacatggagcccaacagagaatatttgctcaatacatttttgttaatatatttaggaacttaatggagtctctcagtgtcttagtcctaggatgtcttatttaaaatactccctgaaagtttattctgatgtttattttagccatcaaacactaaaataataaattggtgaatatgaatcttataaactgtggttagctggtttaaagtgaatatatttgccactagtagaacaaaaatagatgatgaaaatgaattaacatatctacatagttataat

SEQ ID NO: 54485 - DNA, 533 bp, Homo sapiens
  misc_feature (1)...(533): n = a,t,c or g
ttttttttttttttcagtctttaagaaaagctaaggcttgtttggctttttgtttatttttaggtttttggtgtcctcatgacctaacctcatcccagtgagtagagactgggaggggagagcagcagctggagggcaggctgggagcgcttgtgagggagaggagctatggacgtctgcttctctgccaagggagagagtgaggtaggcctgggcccgctgacttcagggtgaggccacagctactgcagcgctttttatttatttatttatttactgngaatggnagctttgtnctntaacccnaagggctggagtgcagtggtgnaatctcgggcncactggnaacctctgnctccctgggcttgcagtgattctcctgcgttcaagtaattctcctgcctcggcccttctgagtagttgggattacaggcatatgccacccacacttgggctaaatttttttgtattttttaagtagaaatggggggtttcaccaatgtttggccgaggnctgggtcntcgaactcctg

SEQ ID NO: 54486 - DNA, 1110 bp, Homo sapiens
  misc_feature (1)...(1110): n = a,t,c or g
agattttttagtatgataagtgagaatagcaacagatgaaaagtctcacgacccatttttatatcttcgatgataaccttagaaaaattctgctcgtggaagcagattgaactgtcatttatcccctccttcttgtaataatgttaccttcagacgcttaaccatacgttctttcttttttctttctcttttcctctctatttttctggctctccttttcttnnnnnnnnnnnnnnnnnnnnnnnnnnnnnnatccttatatgcctgtgttactgcaaatctccaattcaaatggaggtgtatatgcctttacttagccaatttaaaaacaggactcaaaatgggagatgtgctgctgaatatgtgtttctttttcttcagtgccatactttgatagcttccaatttgttcactgatataaatgcaaattgggaaaataattaaacctgtatgctgttgatgctgtcagatgtttctgtagcttgctgcttagcataactgagggatgagtaatggaataaggatatgatgtgtaattccactgttgctgtagatggtgacaatctcagttctgatatgttgatgtttgaaagctatttaattgtaaagaaattagtcatgtagagacatgatgtggataaagcatttctggcatttctctagcaggttctagattgaccagtgtcttgcacatgagattatgcatattttttaaggggctgatacttttggttggcctcactgtgtttttcctgatcctgtgggaaagagaaaggcatcccagaagtttgacttgtttttcttttagaatctgtctctgcaggaaagaaaagtcattttaataaaaaccaaaataatttataataattgttgcctttccctccccatcctctccactaagccagcaactaaatgtattcagaaaacaagttaatcaaggagggcagaagaatttttttttaaactgtaagaaaatgttcctaagtttagatttattacctgtcatttagggcaaaaatccagtgtccccagcacatgatgacccaactttgtctcacagttgcaagtgtgttgaaaataaagttgctttgtgaacttaaaaaaaaaaaa

SEQ ID NO: 54487 - DNA, 413 bp, Homo sapiens
  misc_feature (1)...(413): n = a,t,c or g
gatttgtctaactctgccttcacccaaacagctggtatatgtatttggactgaaataggatgaaaaagtggtcacgggggtcagagtgtagcagaccagtgaaaaacaaacactagcccaggacataagccctgcttacaactttgaaacttgcctgtgaatttgataagaactagaataaaccataaatgaaaactgatagctctgagagtggcaggatgatgggtgaagtttttaactctggggcgttggtacccttgttttacaggtgagggtatgaagatgcagagatgaagcagtttgcctaaggatgcaggatttcaactcctgtgctcagcttccagctgttctgttcccattgttctacactgaggccagccctgcctgggtttcactaagtactcnctgagtta

SEQ ID NO: 54488 - DNA, 599 bp, Homo sapiens
ttcggaacggggaatgagtcttcctggtcccgacagttctcctgcatgtccttgtggtggccagtctctgttctttgatgacgaatttgctttctgagtagagtctggtcacctggagctggtttggtggaataaaggacaatggggttctaggatgtagctgggagatacaagctgtgagtactctaataatgagataagttttcttatgcaggccccagttggtcctgaagtccttcctcaaagaggcgatcctgaaacctacaccaagtgacgtgagcatcaggagaatgcgccgtgcagcagcctcccagggtgagtatgtgatgggctggcattcgtttggaagcttagatactgggctggtcattaaaaccttggcttaccttacccgtttggggctcgatgggtgctaaagcagttctgtttgtactttctcgaaaaatggaaggctgtcaatttaaattaaatttatattggtccaaaaaaggccgggtctaaaggatttccattcctcagaggcagacagcaagggggaccctttctccccttccttctcttcaagtgcttgcttcccagcccactggacatgcgtgtcc

SEQ ID NO: 54489 - DNA, 127 bp, Homo sapiens
  misc_feature (1)...(127): n = a,t,c or g
ggccaccccgtctgggaaagtgaggagcgcctcttgccggctgcccgtctgggaggggaggagccgttctcccggcgccatnatnttggnaagngggagcccttttgccgnttgcccgtctgggaag

SEQ ID NO: 54490 - DNA, 2184 bp, Homo sapiens
gagtagatgaaattcccaatatgtgactgtaatttacctacaaaaatggtaatgtcatgtgattcaacctaatctaacttaccactatatctataaaacagtagatacttaaaatacttagaatttttttcttcatttttctctttaagatcctgataacttaagtgactctctcttttccggtgatgaagaaaatgctgggactgaggaagtaaagaatgaaataaatggaaattggatttcagcatcctccattaacgaagctagaattaatgccaaggcaaaaaggcgactaaggaaaaactcatcccgggactctggcagaggcgattcggtcagcgacagtgggagtgacgcccttagaagtggattaactgtgccaaccagtccaaagggaaggttgctggataggcgatccagatctgggaaaggaaggggactaccaaagaaaggtggtgcaggaggcaaaggtgtctggggtacacctggacaggtgtatgatgtggaggaggtggatgtgaaagatcctaactatgatgatgaccaggagaactgtgtttatgaaactgtagttttgcctttggatgaaagggcatttgagaagactttaacaccaatcatacaggaatattttgagcatggagatactaatgaagttgcggaaatgttaagagatttaaatcttggtgaaatgaaaagtggagtaccagtgttggcagtatccttagcattggaggggaaggctagtcatagagagatgacatctaagcttctttctgacctttgtgggacagtaatgagcacaactgatgtggaaaaatcatttgataaattgttgaaagatctacctgaattagcactggatactcctagagcaccacagttggtgggccagtttattgctagagctgttggagatggaattttatgtaatacctatattgatagttacaaaggaactgtagattgtgtgcaggctagagctgctctggataaggctaccgtgcttctgagtatgtctaaaggtggaaagcgtaaagatagtgtgtggggctctggaggtgggcagcaatctgtcaatcaccttgttaaagagattgatatgctgctgaaagaatatttactctctggagacatatctgaagctgaacattgccttaaggaactggaagtacctcattttcaccatgagcttgtatatgaagctattataatggttttagagtcaactggagaaagtacatttaagatgattttggatttattaaagtccctttggaagtcttctaccattactgtagaccaaatgaaaagaggttatgagagaatttacaatgaaattccggacattaatctgggatgtcccacattcatactctgtggctggagcggtttgtagaagaatgttttcaggctggaataatttccaaacaactcagagatctttgtcccttcaaggggcagaaagcgttttgtaagcgaaggagatggaggtcgtcttaaaccagagagctactgaatataagaactcttgcagtcttagatgttataaaaatatatatctgaattgtaagagttgttagcacaagtttttttttttttttttttaagcacttgttttgggtacaaggcatttctgacattttataaacctacatttaaggggaatttttaaaggaaatgttttttcttttttttttgtttttcgagggggcaaggagggacagaaaagtaacctcttcttaagtggaatattctaataagctaccttttgtaagtgccatgtttattatctaatcattccaagttttgcattgatgtctgactgccactcctttctttcaaggacagtgttttttgtagtaaaatcactggtttatacaaagctttatttagggggtaaagttaagctgctaaaaccccatgttggctgctgctgttgagatactgtgctttgggagtaaaaaaagaaagttatttctttgtcttaaagaatttttaaaaaattagtcatgagacttattcatctttccagggaacatactgattggtcttaaaagactagacagttaagtaaaaggtggctggaacatctatttttctacaaaactggaaaaatgaacctggttctagaagaatgtacaccaaaataaaacatgtgaagcagtaaaaaaaaaaaaaaaa

SEQ ID NO: 54491 - DNA, 773 bp, Homo sapiens
ttttttttttataatatccactcgattttaattatgttaccttttattattttacaatgtatttcaaaaaatgctgttacagttgtcttaactactctatatgatctggaataaagaactcttagaattagaacacacaaacatcaagctgtaatacctacttgtcctgaaacattactaccaaagggatgtagtttttaaataagcagatgtgtggcaatgcaaaataaaatacaaatttgttagaacagtaaagtttgctttaatggctatagaaagaaggtggttttattttcttttttaaacacatctggttctggcagcaagttatattatgcatttagagcaataggtgccctgaaagttattgttgctttttttgttttttttttttcagtttgtgcgtgtcacttgaatcagaaaccaaacacatgtaaaaaaatatcatcctcaatgccccccattaactctctctccagaaggtgacaatgttagtgaactcaagactctcactgatgatggtattttacaatgaaaacacaaggaaaccctttgaggtccaattttcacatcatattctccaaatagtaaaatagcagctctacatgttgatgaaaagaaatttcaatttcttcctatttgtttttactcatatcaacattaatatgtatctggatttattaatttccaaaaagaaaattttagttaccaaatatttcagaaatttaataaagcattacatatatgtaattagcacttatctaccaaaaaaa

SEQ ID NO: 54492 - DNA, 1476 bp, Homo sapiens
aagaaaaataacacagctactcctcactgcaaaaacatatccatgcgtagaatcaacaactccagtcatgggaccaggaggagctctgggacgcagacacattccttggatgttgattttttttatgatctagtaaaggaataggtaaagtctttgatgtcagtgaagtggcaacatagccaaaaagttgggtaccttttaggaaatgatgttgtaagtctccttaatgtatcctgaggtaagtttcctactggcagcagattttgtaagaattacttttaagaatttcattctttttgtatggtcatggagctccaaccatttttaataggaaagtcttttgtaaaattgttgtcgttttaatgtcatttctgtctttataacttgatcaagaatgattggaaggcaaacaggtttacaaatcaattctgtgacttttaaaaagttgacaatgttgtcagatttaaaccagtgtggctagtaaaaagcagctcactcaatgtgggtgggctccctattcctttacgctccccctatccctaccccacaagcctttcgattataaaatactaccaatcttgttataagattactgtggagtagtcaagtactccccgggccttctgagctggtggaatattttatttcagactgaaaacagagagcactctccttgggaagggaaagcggagcttggctgagtgagagatggagcctcatggtgtacaactgagggtagttaactcatcacttctcccaagcactcgatcccagctttcacccactggtgttgctttgcttgaactgttcaagccttttatagccttaccataagtatttagatatggtgtccttttctgtttttggggggggagttttgttgtgtttttttaaagtaagtgcttaagtattaactttggggttgtcccctctgtatgtttcgaaggggttttggttctttttgcttctgttttcttaaacatgttttccactcccacttgggcattttggaagctggtcagctagcaggttttctgggatgtcgggagacctagatgaccttatcgggtgcaatactagctaaggtaaagctagaaacctacactgtcactttactgagatttctgagtatacttttcatattgccttaatgtagcagtaatgtgtttatgcatttgtttctttgcacagacattttgtcaaatattaaaactctacttttttatggcacatattagcatataagcctttattccaagaggtatttattttttcacttgtaaaaaaataatgtttccacgtaaagaactctgttatatcctagaggactctgtcttttatattcgggataataaagactttaaagcaaaaaaaaagtagagttttaatatttgacaaaatgtctgtgcaaagaaacaaatgcataaacacattactgctacattaaggcaatatgaaaagtatactcagaaatct

SEQ ID NO: 54493 - DNA, 604 bp, Homo sapiens
caaaatggaaggtcctggccttaagtcaaattccagatagtgctttcaatatccaaagcttaggccttgtttacttatagtaatgctatatttttctttatctgccctgtgatttcgcttcgtgtccttcaaagtttttttattgtaattttaaaggaaaaaaacaatgtatttttatttgataactaggcaaaatcatttgccattttttatttcataaatatttatttttctatctcatacaatgatcagttttactttaaaaattctgcatttctcttgcctctcatgtacttcatccagttatttattattgtaaaatgttaactggagatactgcattcaaaaaaaagtcggaccacttaacacttaccaggaatgttagtgtttcagctgttttagtaagggaccaagtaagctatcaccttgtgatagctaattcaacatctttattgaaaatttgttactttttttaaaggtttttaaaagattacaattttaaaatattttatgtttattttatttttgtgtaaagcaaacacttttaaaataatatcagagtaattattaccctatgaataaggagatacaaatgaaattcact

SEQ ID NO: 54494 - DNA, 437 bp, Homo sapiens
gtttttagtgaaattttccaaagtgatttacaaaactgtttggtttataaggtgtggtcaccgaagtctttttgtttccttaacaaatgttaagctaatgttttgacagtgattttctggtatgtcaggagccaatcaaacaggcaaatacaagaaaaacaaaaagaaaagcaagtaatcattgtccagcaaaatatgtctgtaggccatgcagactggctttgtgctgggttctttaaagccggcacaaagtgtgtgttcactcttgcactgagtgaagttcaagttcactcttgcacagagcttgcactgaggggagggatcggccaaggtaaaagtgtagggtcttcttatgacatttgtcagcatgtggcttaacctatgaatacgtgtgactttgtagactctcccatgtacgtgaatgaggcatgcgccac

SEQ ID NO: 54495 - DNA, 172 bp, Homo sapiens
aaaattcttaactttgagtgcttataacggcctttctccatgttagcctacttaatcctgaatagccttgttttacaaatgtggaaaccacactttagagaagcagcatgctcaaatcacatagatggtaggtgggaaggtaggcttgtttttcaacactgtaagatcttgg

SEQ ID NO: 54496 - DNA, 404 bp, Homo sapiens
cggacgcgtgggcgcgcaggacgcagaagggcagtggagccaggtgggagaaggagaagcacgaagacggggtgaagtggagacagctggagcacaagggcccgtacttcgcacccccatacgagccccttcccgacggagtgcgtttcttctatgaaggaaggcctgtgagattgagcgtggcagcggaggaggtcgccactttttatgggaggatgttagatcatgaatacacaacaaaggaggttttccggaagaacttcttcaatgactggcgaaaggaaatggcggtggaagagagggaagtcatcaagagcctggacaagtgtgacttcacggagatccacagatactttgtggacaaggccgcagcccggaaagtcctgagcagggaggagaaacat

SEQ ID NO: 54497 - DNA, 1294 bp, Homo sapiens
  misc_feature (1)...(1294): n = a,t,c or g
ttttttttcataggttcttttaggtttttattatgatctcttgtttttatacctgaataacaattttccccaaaggaatgatgatatgtaatctttattctaaaaaggacacatagtgtattgatagcatctggtcagtggttatcactgactatcttcaataacaattactcatctaagaaactcttccttttttctttaaaatcgttggtgctgatccagacaagccctgggctgctgctcctcatcctgataggatctagcttctagactgacccctctcaagaacaaaatacagggagggacttgttctggattccctttgggcaaatgcagctgcaatactcagcaggcttggcctcaacttccagggcttttgttttttttcttttaaatgtatactattaaagttggattattaatctaatatttgtgtttgccttggggactaataaacctcacaacctgaggatcacctcagttaaaccaaggctttgtcatcacagagctactcagcagaggtctgtctcagctgttccttgaactaaggaaggagtcagtcagctaggagagaaaagtccttttgaaagcagacagcatcatgtaccttgctgactcagctacatacataaggcctcaagccttgctgccagttcttaaaggaactgtgttctcttttcacttttcctggcttatggggcagtagagggtttccgacctcaaatgccaataccaggtaggtagaaggaccttaggctcaactgctggctcctcgtaataacacacactgtattctgtggtgggtgccactctgctctgcctgtgtcatgtcacctttcctaatccagcacatcctcgcccaagaaaaccctattttggggtcattcattctattcttatttctctcttatttgttctgatgtttcagttggacttgattccancgcaggctctggctccagaggaagagatgggggctttgtgaactgggatgttcctccagcacctgaggggagcgtcctgtatgcagctgctgaagacattgcctgtcctagagcttgattagagcccagaggctgctggaaactggcaggtttgctggttgaagtggtctggtgctttgatttgggatctttaactggtttggtccagaccagtgcctccccaacctggagagcagctcccaacttctgagccatctccaccatctcagagtcaaattccagagagctattgtccttgagtaggctgactttcttctccatctcctgatattgggccagggcgttcttcc

SEQ ID NO: 54498 - DNA, 1136 bp, Homo sapiens
  misc_feature (1)...(1136): n = a,t,c or g
acctttttctcaaagcaagattcccatactaactatgtacttcaatccatatcagaaggaatccccctctaaaatgaagattgttctatatccagttggtgttggtattaggagatctgcacatcccacaccggtgcaacagtttgccagctaaattcaaaaaactcctggtgccaggaaaaattcagcacattctctgcacaggaaacctttgcaccaaagagagttatgactatctcaagactctggctggtgatgttcatattgtgagaggagacttcgatgagaatctgaattatccagaacagaaaagttgtgactgttgggacagttcaaaattggtctgatccatggacatcaagttattccatggggagatatggccagcttagccctgttgcagaggcaatttgatgtggacattcttatctcgggacacacacacaaatttgaagcatttgagcatgaaaataaattctacattaatccaggttctgccactggggcatataatgccttggaaacaaacattattccatcatttgtgttgatggatatccaggcttctacagtggtcacctatgtgtatcagctaattggagatgatgtgaaagtagaacgaatcgaatacaaaaaaccttaaagccaggcctgtcttgatgatttttggttttttttcattgtcctgttgaaatccaagtaattaaacatttaagagccacaaaattgtatcacttttataatattttgcagtaaaatataataccatcttctctgttaatacataattgctccaagcttcctgtaaactataagaatatatttagtttacagtatatggattctatgaaaaaatgtccacaacacagtaattggtcacttgttaagaaaaatttatccttgtaagtatcttcaaagttgatatttggaactttattccaaaagtagtgcatgtggagaaagaatctagactttcttgtatacatttttctcttctccagtaataaacaattacctttcatttatactttgataacctgtatttaatttaaaaaaaaacataaaaatgaggaaccaagtgaaactacggatataaatattaaantggacgagatgacctttcanaaaaaaaaaaa

SEQ ID NO: 54499 - DNA, 898 bp, Homo sapiens
  misc_feature (1)...(898): n = a,t,c or g
cttgggcccatcactgtatagacatgctaccactggtacttcctttctccctgcgggccaggcactgcccttttcaggaagctctcttaaaatacccattgccccagacctggaagatataacattcagttcccaccatctgattaaaacaacttcctcccttacagagcatacaacagagggggcacccggggaggagagcacatactgtgttccaatttcacgcttttaattctcatttgttctcacaccaacagtgtgaagtgcgtggtataatctccatttcaaaaccaaggaagcagcctcagagtggtcgagtgacacacctcacgcaggctgagtccagagcttgtgctcctcttgattcctgggttgactcagttccaggccngatcttgcctgtctggctcagggtcaaagacagaatggnggngtgtagccnccacctgatattcaggctactcattcagtcccaaatatgtattttcctaagtgtttactatgtgccagttcctgtaacaggtgtggggacacagcagtgagtaatcaatacagacaaggttctgcccttatggagctcacactccagtggcagacaaacagaccataaataaggaaacgatgaaataagatatatacaaggtgagtgtgacttcccttctaaccccctctgctctgtcctcccctattgcgctctcaagaccagagacccaacagcagtgatctcagggcagacagccctccactccagctctgagacccttttctcaggacctctgtaggcagcagagagagaggacagaggggtaagatgaggggttgagggaaggttcttcatgatccacactttgggcttagtatttctcaggaagagctatggcccagaaacaacaggggg

SEQ ID NO: 54500 - DNA, 332 bp, Homo sapiens
tggacgcgtgggctttcctgtatatagatcactattgggcaggtcagcaaagatctcttacagtgtaataataatctatgatgcttcatttagcagaaactctgcttaaaagaatcttcataatagtaagtttaggttttaaaaacttgtttcataaatatacatatatcctctctagtagtctggccaaaagaacagattttgttattgataatttgtagctggtaattttccacattttctatccactgtaatttttatgttgtcactgaagtgcctgcccagtactgtatattacagtctctcacaaacactgggaaaagggactgtca

SEQ ID NO: 54501 - DNA, 1095 bp, Homo sapiens
tctcaggattctttagatgcgttcatgtcagaaatgaaatcaggcagttcattagatggtgtgtcccggaagaaacttcacctgagaacttttgaactgaggaaagaacaacagagacttaaagggttaataaaaattgtaaagccagcggagattccagaactaaaaaagactgaaactcagactacaggtgcagaaaacaaagctaaaaagcttacattgcctctatttggtgccatgaaaggaggaagcaaattcaaattaaaaactggaacagtagggaagttaccccccaagcgtccagaactccctccaactctaatgagaatgaaagatgagcctgaagtagaagaggaggaggaagaggaagaggaagaagagaaagaaaaggaggagcatgaaaagaaaaaactggaggatggaagcctcagtaggccacagccagagatagagccagaagcagcagtgcaggaaatgaggcctcccacagatctcacacattttaaagaaacccaaacccatgaaaacatgtctcaacttagcgaggaagaacagaataaagattatcaagactgtagcaaaaccacttcattgtgcgcaggaccctcagcatcaaagaatgaatatgagaaaagcagaggtgaattgaagaaaaagaaaacacctggtccaggcaaacttccaccaacactttcttccaaatatcctgaagatgacccagactactgtgtgtgggtcccacctgaaggtcaaagtggagatggcagaacccatcttaatgacaagtatggctattgattgcttcagaatcccaaaagaaaaccttgtggaccatgtgacatggaatatttgggataatgtatcaaattgaatggccagagaagtttagatgattatttgtaagatctggtgactggcttttcgttctgtgttcttggcttcctaaatttatctgcccatatgattctcatgcatttgatatttatgtttaaaagtgtttatatatgtatgtaaaaagggaaccatatgttttgagaatttgtaaagtgagagacatgatcctattaaaataagaaggcaaaaaaaaaaaaaaaa

SEQ ID NO: 54502 - DNA, 1779 bp, Homo sapiens
  misc_feature (1)...(1779): n = a,t,c or g
gctcgactttatttttttttttttttgtctttcatagagtttatttgaaaagatgctgaatttattcccaagtataattttaaaaagctgtttaggacccaaacatatttaaacatctcttacacatacagaatttcagtttacaaatattccagaaggcattttcttaagcagtgaaccatgcagaatactgttgctaaacatcgtttctgccttcctcgtgttctcttggtagtttttactgtttggcttgatcctgctgaggaatgtgcttaccactggaagccagatgcagattcggcaagtgtttcttgcctcttacaaggcaccgcgtgtaacgtcctgaccagctgttggtcatttgtggcagaggggtgtggctgcttttcgcctgcatctcgcgtgctttaggcagatcagtctggagtgcaggggaggatgaagacaggtggacttgggctcatctttcatcagttaagtagccaattatctaacttgtatttctggaaactgaaaaggaaagtttctagaaaccgtaagaacaatttaagttgggatttagaatagctgacacatttttagatgggactgaaatgagtaagaaaggttctccaagatgtatgattttaagtccttactcccataaatcttcattaaacacatctcagttttggcctgactcactggggtgtcaagcagctactcaccctgcctcaactacgtaagctgcaccttggcaggaaagggctcacaggttacagatagagcttgatgagctcatcgctgactgctgagggtgtcagcacgcccaggtctgtaaacagcagagtgattaaggaaggggcagtgtagtcgacccacggatgctcctctttgaggtcttgtccagtctgcgcgaccttgagagtgtctgccttatacttaaacttatctgggacgtcttgctggtttagtggaaagagccggacaaacttgaaactttctgcaaccacatagaaaggtttgttctgtgctttggcacacacagcccatctggttggttccaatcttgttaataattcctccgttttcaacaactccttcagcaccaactatgacaagatctgctttctccatgatgtagccgacagcagcatctagcaccacagtgacagggacgttgaggtggcagagggctttggccattttcttacctgacaaatcaggctgtgactctgtgacgtatacactaaatcgcttcttggccgccacggctgcttccaggactctcaggaccactctggagtaggcgtgagtcaatattgtcgctccatctttgatgaaagtatggcacagatctgcaattttgtttcttgacagtgatattctcctgagaaaaagttctccccgctcaatcatgatctttttacatttggagtaatcggagtattccagggaggcaagactgatgaagcggaggaagagctccccgccagaggacactgccacagaggagtccacaccacacagggtttctatggcactggtgagattcgccctcagaccctggattgtctcccctttatctctcttcaagaactccagcaacgtccggatggcagccactgctgaggccatgtcaggatcttctttcatctgagacttaaagtattcaattaactccttgtcgtccatggcgtcctcctgctgcggagccccaggggacccgagccgcccgcgctgtctcganggggttccgcggccgcgccgcctgcgagccagtctgacagccgctgcaca

SEQ ID NO: 54503 - DNA, 360 bp, Homo sapiens
gaaaaagacacccgagaaacttgacaacactcctgcctcacctcccagatcccctgctgaacccaatgacatccccattgctaaaggtacttacacctttgatattgacaagtgggatgaccccaattttaaccctttttcttccacctcaaaaatgcaggagtctcccaaactgccccaacaatcatacaactttgacccagacacctgtgatgagtccgttgacccctttaagacatcctctaagacccccagctcaccttctaaatccccagcctcctttgagatcccagccagtgctatggaagccaatggagtggacggggatgggctaaacaagcccgccaagaagaagaagac

SEQ ID NO: 54504 - DNA, 431 bp, Homo sapiens
cccagcagtgactccttccacttacaaaggggccccatcccccaaagagctcctcattccaccagctgtgacttctccttcccccaaagaggcacctactcctccagctgtgactcctccatcccccgaaaagggcccagcaactccagcccccaaagggactcccacttccccacctgtgactccttcctccctcaaagactcccctacttccccagcttctgtcacatgtaaaatgggggccactgttcctcaagcatctaaagggcttccagcaaagaaaggccccacagctctgaaagaagtacttgttgccccagctccagaaagcacgccaatcatcacagctcccactcggaaaggtccacagaccaaaaagagttctgctacttcacctcctatatgcccagatccctcagctaagaatggtt

SEQ ID NO: 54505 - DNA, 234 bp, Homo sapiens
atgtaaattaatgctaactatacaaaataatcgtattaatgccttgtggggtttaaaatatatgtgcaattaaaatgcataacgataataactcaaaaggtggaagagtataaaattgtcaaccatgttcaaagatcctttttctggaacaaggtgaagttactaatttatacttataatgaaagagttaatcacaatggaagattattaaatgtcatggatgcccatgcaacc

SEQ ID NO: 54506 - DNA, 397 bp, Homo sapiens
gatttttggtacattaattgcaagctgcatgacaaaatttgtttttctggcaacaatctgacattattagtggaattccacaccaacagggcttgtgagcttccatttcatcttactgtaacttcaattttatggcaaaaaaaggtacaaagtttaaatacccctttctagtaatgccaaagacatacagtgttttacattctctcctttataggtaacaaaataatgtttagctcagtaagtactgaaataatgagtgaccaatttgaaggatttttagattatttaatctttgcttatgttgctttttcacatgcttaatgatggaaatgaaatgttaaatcaacaaaataagatccagtgtttcataacatttttataagtttggtaaacttta

SEQ ID NO: 54507 - DNA, 1443 bp, Homo sapiens
gacgcacgcaagcggctccagggtacgtccccgccacgccgcatcgcaggatcggtgcgtggtgacgtttcgccggcgcgggcgccatcccggaagcgcgagcaaggccgccagatgtgcaggcagcggaggaggagaaagagatggacctcccggactcggcctcgagggtcttctgcggccgcatcctgagcatggtgaacacagatgatgtcaacgccatcatcctggcccagaagaacatgctggaccgctttgagaagaccaatgagatgctgctcaacttcaacaacctgtccagtgcccgcctgcagcagatgagcgaacgcttcctgcaccacacgaggaccctagtagagatgaaacgggacctggacagcatcttccgccgtatcaggacgcttaaagggaaactggccaggcagcacccagaggccttcagccatatcccagaggcatccttcctggaggaagaggatgaagaccccatcccacccaagcaccacgaccaccattgccacctcagaacagagcacgggctcatgtgacaccagccccgacaccgtctcgccctccctgtagccccggctttcgaggacctgtcccatgtccaggctgggctccccagccatcaacgggccgcagccagatcagattgacgaggagatgacgggtcgaatagccctgcctgcccggtgccttgagggggtctcagggcagcagcatacaaggtggcagcgggtaacccctgccttgttctgtcatccagggctcctttgctgccccgttctgtcacccagggctcctagggggacaaggctctctcccgaggggtgtggaattcctgggggggtctttaattctggctccttccttcctcagaacatctctattctgcaagacccctctgccatgccagggcacgcccattccagctggagtcgtggggctgggcacagggggaatttttccagagctgagcctgacgtctgctctgaaagaatgcttagaaggttcccagacaccagagccagatgtcccccaccaccggtcaggacctccttggaggtgcacaagcacggtctcctctgagttcaccccagcccacccccgcacccactaattctgcttttcctgccccttgctccgtaaaagtatcaaatactttctccttggtatctcaaggaggtttctgagataggtagaagtcttgagacggaggctggccatccattcagccctgagcgtgctgagttctgtgtttctctgaatagaggtgtggaacctgaggggccagcaggcctctctgaaggcctccatggagcaaacggagccacctcgggaaagagtttaatggaatatttttgtacccgatgtttacagatgctgttgggaagttatcaataaaaagacaccattactaaaaagggaaaagtacaccta

SEQ ID NO: 54508 - DNA, 6103 bp, Homo sapiens
  misc_feature (1)...(6103): n = a,t,c or g
ggtggtcggcggggaggcccccgcgctttaaaataatgcccgcggcgcccgcgcgaccatgcaatggcgagcgctcgtcctggggctggtgctcctccggcttggcctccatggagtattgtggctcgtcttcgggctggggcccagcatgggcttctaccagcgctttccgctcagcttcggcttccagcgtctgaggagccccgacggccccgcgtcgcccacctcggggcccgtgggccggcctgggggggtatccgggccgtcgtggctgcagccgccggggaccggggcagcgcagagcccgcgcaaggctccgcggcgtcctgggccggggatgtgcggcccagccaactggggctacgtgctgggcggccggggccgcggcccggacgagtacgagaagcgctacagcggcgccttccctccgcagctgcgtgcccagatgcgcgacctggcacggggcatgttcgtctttggctacgacaactacatggctcacgccttcccccaggacgagctcaaccccatccactgccgcggccgtgggcccgaccgcggggacccttcaaatctgaacatcaatgatgtactagggaactactcattgactcttgttgatgcattggatacacttgcaataatgggaaattcatccgagttccagaaagcagtcaagttagtgatcaacacagtttcatttgacaaagattccaccgtccaagtctttgaggccacgataagggtcctgggaagcctcctttctgctcacagaataataactgactccaagcagccctttggtgacatgacaattaaggactatgataatgagttgttatacatggcccatgacctggcggtgcggctcctccctgcttttgaaaacaccaagacagggattccatatcctcgggtgaatctaaagacaggagttcctcctgacaccaataatgagacatgcacagcgggagccggttccctcctggtggaatttgggattctgagtcgactcctgggggactccacatttgagtgggtggccagacgagcagtgaaagccctttggaacctccggagcaatgatacaggattactaggcaatgtcgtgaacattcagacgggccactgggttggaaagcagagtggcctgggtgccgggctggactccttctatgaatacctcttgaaatcttacattctctttggagaaaaagaagacctagaaatgtttaatgctgcatatcagagtattcagaactacttaagaagagggcgggaagcctgcaatgaaggagaaggagaccctccactctatgtcaacgtgaacatgttcagtgggcagctgatgaacacctggattgactctctgcaggcctttttccctggactgcaggtgctgataggagatgtggaagatgccatctgccttcatgccttctactatgccatatggaaacgatatggtgccctccctgagagatataactggcagctgcaggcccctgacgttctcttctacccactgagaccagagttagtggaatccacatatctcctctaccaggcaaccaagaatcccttctacctccatgtaggaatggatattctgcagagtctggaaaagtacacaaaagtcaagtgtgggtacgccacgctgcatcacgtcattgacaagtccacagaagaccggatggagagcttctttctcagtgagacctgtaaatatttgtatctgctgtttgatgaagacaatccagtacacaagtctggaaccagatacatgttcacaacagagggacacattgtatctgtggatgagcatcttcgggaattgccatggaaggaattcttctctgaagagggagggcaggaccaagggggaaagtctgtgcacaggccgaaacctcatgagttaaaagtcatcaactccagctccaactgcaatcgtgtacctgatgagaggaggtactccctgcccttaaagagcatctacatgcgacagattgaccagatggttggtttgatttgatctgctctctgtgaggcctcatcttgaaccagaccttaacgaccaaacccagaccatgccaaagtccagtctgaaatgaaaggggacagaagtcttgctgtccatggtggtgtaggaatttctgtgcaacacctcaccacgtctggttaatccttgcacacttcagtgtttctctcctgttcaataaaatgccctgttaaggggtataatttgaagtgagaagatacatggaaattgccctcttatgacatgttgatgttataagcacaatagatggggcatctttggattgatgttcacagctttatacttcagaacctaagtctcttcactttgctggcacctgctatactggagtattgctatgtctttaaaaaatttttttttattatattttatttttttgagacagggtcttgatatttttttgggacagggttnnnnnnnnnnnnnnnnnnnnnnnnnnnnnnnnnnnnnnnnnnnnnnnnnnnnnnnnnnnnnnnnnnnnnnnnnnnnngctacttctttgttagaggattgagaatgaaatttctgcaaaagggcccatggttcatttggtatccctatttaattgcattgaaaatgtcatcctttctgttgttagataattggggtcttcccctgatatccaaccgtgattttggatcacatgggagaaaaagtcatccagtttttcatgtttgcctcaagtaatctttacagtgttacaaattatttgcttaagaagaatggtcttaaccagaattcttaacagatagtctcttaggttattatgttatggtctaagaggttaactgacatcttttggatggtattttgcattttgaatatgaacttacctgaggaactcccatagttccagaatcaggtgccttttagggagagaacaatacctaagattgtctgagcttccatctttctcatatttcctaagcaaggattctcacttatgaccatatttgggttagagttctgttttgtttctgttttctgtgtctagtgccaattagctaaatcagggagaaagaaatgatcacatgacttttagcatccttgagccatttctctgtgtaatacaggctttagattagtgccttatattggttttggtttggggcactggatgtcgcagctactgctatggtttcaggaggcctgtttagccacatggtgagaccgtggtgaaagggggatggaaattgcttggccagtctttgcctttcatcctgtaaaagtaagcatgtagaaggaggaagttgtgctaaaatgcctttgtttttttgttattattttcttagccagaacatctctctttgaactcacactgatacacacctgctactcttacacagtgcagcagggctgactcttagtctggcttccatgaagcgtcatgggtggaaacgcattctagtaaaaaaggtaggaaatccctaaaacttccagcctcacatagcacggttctcacctgtcactgttttcccacctctaaggatttcatgtacatcttttcaaagctagaaataagcactgtctaagtttatgttgcatttttagtcaaaagggagaaatcttattccttcttgaaaattttaagtgttatggttttatatagttcagttctttgagatttttgaaaagagtattttcagtaataaacgtgccatctctatctcttaaacatttattacaacaattgttttaaaatagaaaaaataaaatgcttctattttaccttttttcatttcagaagcattattctgtttattaacagtgtcccatctactgaatagaaaactttgagaataatatatatatatattttaaatgttttcactgactcattgaaaatgttaattacacacacatgcatgcatgcacacacgagcatacttgtacctttgtctctgggcaaacaggtgggactgttagtgacccatttgggaaaatagagcatctcagagaaggaggtgagttcttcctgcctgtgatttctcttggcgctcccctcctctcccgctctggcttctgccgcggcagccgtgggtaagcactccagngttctcttaatgaggcactttgcctgtcactcgagcaagcctgggtgttccttcctcctcatgctcctggaatagggaatagggatctcatgcttgcaaactacacaatgctgcaggtgcttcccaggggccacaggctgtcaggaaacgtgttttatgttaagtcacaaacccacttgacttctgggtactggaattaataccagtgggtgagactgagggtgagtgagttagtacatattaatcctggttgttgagcttccagactaccccgtccaaagtttgatgctatgtagtcagtggtttgtggggctggatgccagaaggttctttgagccagtttcaaaggttacttgtttttttttttttttttttaagtcagaatgttaacagctgtgatatatcctgcagggcttttgcagtttcttctgttctgtgttctgaaatcctgggtagagaatggctgaggaggagattaccagagaagttgctttgctcagtgctttgccccaggattgcctcaaatctgagtggacttcatcctttgcggcggctctgagcctggcccatcttcctattcccacgtgtagctagtgtctagtgtcagctttgctcaatgtggtggaaacattttgcagaactgttgtagaaagctgccttatagttggcttgacaaagcataattctctcataacaaactttcaaatcattacagtagcttagctactttagttgatgtgaccgaggaatcccttctagaatcataggtggcaagggagggtttgctagctctccatttgcactggccattgtgaaaaaccagcttctgtattcaaatctttccttcatttttttaaattttttttttggcagcgcttgtgctggaacttactcattgtaactgaatcctcagggcttttcttgttttagatcatggactgtgcacgtgacacttaaataattttctatgtatttaaagaaaaatgcaccaggatggtgtctgtgcaacgtgactattagaggagcgtctgtagaagtacctggtttggtcagtgcagttgtgcaatctgagggccttgtttcctcctcccctttccccttctccccaccaaaggaaaatatccctcttaatgatttcgtagttcagtttactgaatgattaccacctgtaattcctctttggattgtgtagactcaacatgagacattcctttctgctttctggagggcaccaggggcctttctctttgataaattttttttgtctgttgacaaaaacaaaaatcttttttcaaatgtagtgctggtgaaaaggtagggctgagtgattaccttagccacagggtcgtgaagcaggaactttagaagaaaatcctgagctttcctgtccattcccagcatccagctcctattctagtgcctcttccctgcagggcagggancccccttgggaaatcgaggaggtgggacgggctgggccctgtgtcccaggtttcacagggctcagggttatgctcccgcttgaatctggacgtgaatctggtaaaaatatcaagtacctgtggaactccctgattctataccctcttccttctttctgcaaggcagaggaataatatttttaaaggttattttgttttagttttaaatagcaaaacacaagctgcatttttatttattttgcataagaaaggtaaatctttttacaaaaaaaagtatagagttggaaactctgggaaaacttacggaaatacacaaatgcttctctgtaatgtgcaatatgctttgcaactgtagatgatattttatgtttaatctgtaaataagaaatgtatttaaattaaaagggatctttttgtaaaaggaccaaatgttcttttataaatgtaataaggaatatcttgctctttaaaatttattaggatttttatgagtaatttttattaaaagatttctttttttgagttgtaaaaaaaaaaaaaaaaaaaaa

SEQ ID NO: 54509 - DNA, 365 bp, Homo sapiens
ggaaaataatgattaatctggctgggaagcaggagttcatttggaggaataggagaatgttattccccttttatgtctttagatatttgctagatactaaggatataaggatagcttaaatatagcataaatggaaattcaggagaagggcatatacaagaaacagtttcttgaaaaatttgatgaaacaatgatttgataaaataaagagaaaaagataatatgaaagttttgcatttatatgaggctagtgacagaaatggaaaagctgaagcaggagacctttgtgaagcaaaatgatcagtttagtttccgcagttggtttaagccatgcacacagggagcttcatctttgtgtgttttat

SEQ ID NO: 54510 - DNA, 801 bp, Homo sapiens
atttatcacaaatattacacatcctatgttcttgaatgtgcacacttttttctcaataacaaaatatatcttaagtcagtttttttaatgctgtcaaaatttgtagaattttctttgagtatggcatgatctcttcccaaatgcattttacagttttttgtgtgttctatagactatagagtcaaaatcaagagtattttgagaggatcagaagcatttaaaaatctatttttttctagtatctttcacagatctaaatatttagattctctttgcctttttctccatggaatacggtggtatcaaattactaatacagtatataaacttcgtttgcattggtggaattcatttagatctctcaagtaatattattttagggctatataaattgtgtttttagtgtaaaatgttatttgataatgtgaagttaaatcccttttagaaagtgactgaaaatggtaaaggaactcatcagaatcttagcgttcttaagttctctgataatttagtatattttattaatgatgtccaacacctctaagattgttgagaaaacatgaagaattgaggttactcttctcaggtgacactttaaatattaaaatcagaggcttcctgaacaaaacaaattgcaaaatagcgataatggcatgggagaggccagatgcaggactctggtaaatttaacttactttgaatatctatgtaaattttagttcatgcatgttcttacttaatcctggtgtttttgctcttagatgttagagtttaataaattgtgatacgcatatatttttt

SEQ ID NO: 54511 - DNA, 772 bp, Homo sapiens
acaccaatggggcttctactaggtggcgtcaagtcaacatatatgtttgatctgctgttggagacgagaaagcctgatcaggttttccaatcttataaacctggagaagtgatggtgaaagttcatgttgttgatctaaaggcagaatctgtagctgctcctataactgttcgtgcttacttaaatcagacagttacagaattcaaacaactgatttcaaaggccatccatttacctgctgaaacaatgagaatagtgctggaacgctgctacaatgatttgcgtcttctcagtgtctccagtaaaaccctgaaagctgaaggattttttagaagtaacaaggtgtttgttgaaagctccgagactttggattaccagatggcctttgcagactctcatttatggaaactcctggatcggcatgcaaatacaatcagattatttgttttgctacctgaacaatccccagtatcttattccaaaaggacagcataccagaaagctggaggcgattctggtaatgtggatgatgactgtgaaagagtcaaaggacctgtaggaagcctaaagtctgtggaagctattctagaagaaagcactgaaaaactcaaaagcttgtcactgcagcaacagcaggatggagataatggggacagcagcaaaagtactgagacaagtgactttgaaaacatcgaatcacctctcaatgagagggactcttcagcatcagtggataatagagaacttgaaccagcatattcagacttctgat

SEQ ID NO: 54512 - DNA, 2831 bp, Homo sapiens
tcttttttttttttttttttgagtgaaatcaagtgcagtttttatttaagaactggaaagaataatcagtatctgtgaaagaaaatccaatttagaatatttaaataaacatttatgtaaaaagaagagtagaataattactccgttcagttcctctccttgcaatgggataggctgcctctgctgcagatggctgggtcttccaaacccatgacaagtgccacggcctctgcagcagtggccccagagagtaggcacttcccagcatgacagagaggccgaggccttctaaccttgccaaaccactacaaaagcaaaactaggggtggggcaagcccaactacctaaggcaggaagaaagtgcagtgaagggacagtggtgtgctgtgcgtatcgtgggggtactcctaaagcagctagctgttggcgagatcttacaaagcctgatcgggctaacgcagcttcctggtttaggaacattttccccggtcgtatcaatcccccaggttggtaaatgaacagaagggatgaataaagcctactttttaggctcaaggagcagctcgtgaaggggtggcaggtgcgctgctgccttgttttctgtcctgctaagaggctcaccccgcgacctcttctgtaaactgccactcagcagcggcctgcaagccctcacgaaaggcttcactctatgctgtttccaggtagctttgttctgacagtacctattttccacttcagaatctccactttaaaacctgcaatggaaaaataaatctcttgacagttttttaaatcgagaaaattggtgatgtggccttggcagcaaatacccagaaagcctttacctcattaacctgattctccacgggccctgccactgctaaatttataaagctaaaaataatctcaagatcatggaactaaaaagaagtcaatcacttaccaaatcctgtccttaaggagttcatcttggctgggcgtggtcgtcacgcctgtaagcctctttggtatatataacaatgaaaaaattcattaagccatgaaatctagaaataagtcatatttctgagttgataaaatgcttttctgaacatacattttaggtatctggcacaattaaccaaatgtctgcccatttttgtgtagctttcatacagtacagatttcattgatgtcgctcccacatctgagtattaaaaacatttgacattgttcttctcagtcctcacaacacccctgtgaggtaggtggtattgaccccattccacagatggggaggtctaggcacggaaaggtttagtggctcctcacaggccgcgtggtggggcagcagagtggtgctctggcccccgcgccgacgccgccttcacattcacacttcttcagtgccaccgcaacactgcatggcaggatctcacgctgaggccaagttcctgtctagtccagaatgaagccagcgtctcacctcttaaagcttcgatgtgtgactcaaagccaacttactctcccaaactttgcaaaacaaacatactgacttgaatcttaagttggggactaattggcagtatttaagattatttttgagagtcaatctgcttggatttgtagttgtatatgctcaaatccctttggaaaacagtttgaaatgacatgagggacaatgtaattttgagaacagaacacagaaaacaagagttctgagactggcattgaaattgagaatataagctatggtaaaatgagaatcaaatcccaaataaacggagagcagcacttctcaatgtttaaggccacgcacagggcaggcattcagtaagcacttcttggatcaaaagaaactgatgctcctttgagccgcctatcactgacaacaggagctgagacccccgggaaagccagccagggccatgatccccttggcctggggccacggtcacacaaagccactcagccaaatcgtgtagagttatctaggcttacttgctgcaggataaaagttgaactagaacaccaagcattgagctaggaatacccctttgaatgtgtactgctacttataaaaaataggtatgtagctatgattaaatagatgaagggccaaagcatcctatgaggaagtatttttaaaattgtatagatgttcatgcagtgggggacagaaataaagaggttaaagcggtctgtgtttttcggttaaatgaaaggttgtaaatgcatttttaccgctgataagaaggggtacctgctacccctttctgctgtggagtgttgctgaggacagagtccatctctcccagcgagtcctggttatcctttacttacactctggcctcgggggcagtggcgtgtggcctcggtcctccccaggtaactctggagggcgctgtggaatattgctgtgatttgccccttactcgtctttcacccatgttccgccttgattcggcataaggacagactgctccagtggggccttgggtcctcaggccttctgaccgcttggtcttgagtgacattccagaagagtgactaatgacataaaacgattaagaaaatccatgtggcagcggccaaccggaaacagttttgtcccaggctgcacagggtcggaggccccaaggtcaccggggccactgcccgtcacaggtccaccttgaccccctttatgaaaggcaggcccgtgggcaccctcttcttatactccaggtactcctctccaaaaaagtgaattagtgagatttcttcttcttctgttcgatcgcggaagaatcgccacactgtcagggcatagctgacgccgcagatggggttacacagcacccacgcgtccg

SEQ ID NO: 54513 - DNA, 422 bp, Homo sapiens
  misc_feature (1)...(422): n = a,t,c or g
ccgcagtccggggatcgggtcgaggggagaagaaaaaggggtgctcgggagcagcccccggctacctcccctggaggcacagagggcgggggccttggcgaatggctttcttgctggccacttgcggagtgagtagaccccgagggtctgggagaggggccggcccctacccctgagtccccggggtcccggccgccaggccggagcgcgaatgtcgtgctcaccctgcctccttcccgccgccccctgggggtttggattcaggatttgttcctagtgtccaagattttgataagaaacttacagaagctgatgcttacctacaaatcttgattgaacaattaaagctttttgatgacaagcttcaaaactgcaaagaagatgaacagagaaagaaaattganactctcaaagagacaaca

SEQ ID NO: 54514 - DNA, 2355 bp, Homo sapiens
  misc_feature (1)...(2355): n = a,t,c or g
aaacagttatccatgaccatttctatgttctcgtggcatgcttccatgtactgcctctgcatgcagcaggccacctcgggcagagcctaaagcatgtgataaatgaaatgctatcacaatacaggttgtgtctgaaaaacaaatggcaacttattatccaagatcaatgaaggaaaaagcaaatttactaaaatatttctttatttgaataaggtcaatgccatttcttgaattccagctagcatcaaataatcaggaaaaaaaaaaacttgacaaaatgttatccaattgaaattgacagtggatagaaaacccttttaaactttaagtaatgtcataaaagaaatatattaaacaagcaacagacagatctaaaaagttccaagtgtggatttcacattagatcttataaattaaaaaaatcctcaatataatcatttgttcactatcttctttcaataagcacatggacagggaaagataatcacaccttaatattcacaactgctatttgtgttctttacagaaattgtatctctgcaatgcagtgaggcaggcaatcccttgttcaagtcatttctgttttccctaagttatcaaaaagtacaactgtctgatataaattgttaccataatcacaatcaggaaggcaaagaagctttagcaggcaggcttgaagatgggagttttcatggcttgacccatgaatgatcctcaagatgatttccataagattaaaagcccatcacgaaaatactgaaagcaacaggtaataatctggattcagtctgtagttgctcatgaaccacgcgttttaataaaaggaacattaagtaaattgtaggtataaaagaatcagtgcatatctgttaatgtcattgacaataaaaatatattatcttctcagctcagctctaaattaacaaaacacctattttttttttcccactcctcattttagtggttctcaaacattggtgtgctcagaatctcctgaggtgcctattgaacaatgacatcccaaagccccacccctaagatttgattcaggttgtctgaaaccaggcgccatgacccagatggtccatggatcatactttgagaaacactgatatccccttaatacataacaaaacattgtttactgtttatgacttcatggtaaagttttaagctgaataaaacattcaaacaattattagaacacaaataggtacattaaataaggatataagccattacgcaattgcattttccttttaaaagtggcatcatagacacaatgacttacataaaaattttaaaatcaattttgttttaatccaaggcacctgtaaaacacttgctggtgtgagagaagtgaacaaattcaattatacaaaatagtacagaaatgaaagaatcctggcagtgattgatttttccacagagcaaacctttttgttcagaaatgagctccttaaagtcaatgattttgagaaaaaccacacttcaaatatgatacacatcatgtgaactactttgctgagtgattttcaagcaaagtatatcactaagtataaaagataaaaggctcatgctcatgctgtttcataatagccatctccatttgtagtaagaataatcagaatgattccccttgaatttcagcctgaaaaaggtatactgcatagatctggtattcctttaatgcacaggcacatatgaccatggactttataatactggatttggcagccttttatctcaagaggatttctcaagtttcatagtttacaacttaaatattcctctgaaggtatttaattttttttcatggagcaagagtaaattctgtgatgatgaagcctctgaaacatgaatttcaaaatgttaacactacaaaagaaaaatgctagagaagcattttctgtgttgaaatgactgaagtaaagtgagttatcactggcatattctctttcagtgttctaggataaatatcaacataaaaagcaacgccagactgtttgcacacacagcactcgtttggtattgctataatacagagttcttcagaaagtctttatatatagattttaggtcgttagcccaatctgtaaatgacatttgagagcaaacctagggaggcttggaataattcaacagtactattttataagatagtattgtttggaattctatggcaaatgaaagacaaccattttagctaaaagaagtaaaagagtattttgaagncagcaaaaatcagtataaatcagctgtgaacagaattaaatttgcatcttaaaatgtcatttacagactgtttctgtaatacccagaagtatgcacaaagactataaaaactccttccag

SEQ ID NO: 54515 - DNA, 106 bp, Homo sapiens
  misc_feature (1)...(106): n = a,t,c or g
gtttttaaggatggttgtgaatccccctggccccataataaattgtaattttatactgcttactataatttttttaacactgnaacaactttgagaccacctcttg

SEQ ID NO: 54516 - DNA, 314 bp, Homo sapiens
gtgaaaatccagatttggattcagtagacccaaggtgggtagggttgccagataaaacatgagatgcccagttaaatctaaatgtcagaaagacaataagatgtcttggtataattatgccccacacattccaagggccatactcatgcttaactggcacactgctttttatttgctaaataaggcatccctaaagatggagtctgaaatcccacatttctgaaaagcttaaagatgaagccttatatgcatttaaaatgcaatttaaatctatgaaaactatattttatgcagccatgaattttatggtctct

SEQ ID NO: 54517 - DNA, 1034 bp, Homo sapiens
tcgttttcaagcttttcgcctacattttagactaaccctgcttattcctgtgaatcaagcagtgatctcctgcagcttggaagaaaaattaagggatgggtaatataaaatctgaatcaatatattagttctgggcaattattctgcaaattctaccaggtaataaaagtgagtagggtgcccataacccagaggtttcttcgtttaggaaaataaaaccaaggaacttcatagacccccaaaggggaattctatatcttgacaagtaaaattttagatggaaattatctacaacaccacacttacggaaattgctatcctcactctattatttgcaaaagggttatacacagtagcaccttctaactgaagtattaaacagagtttccattgctgtcgtattttgcttaattattatccttatagcagggataatagttactaacaaaaaggaagcatgaaagttttactatcactgagcctggtaggactttttattgggtttagtgatgcagttttcaatgaaacatgctgctttcggattaatgcctctagttaaaagaaaatctacaagtacttaaaaatcaaatcaaaattattgatccccgagtggctacaatgcctctttaataaattccagtcttctttatggaattggttaacccctttattaagccctctcttgcttatgtgtcttgtattgatatttggaccctgtatacacaatactataactcaaattgtttcttctcatctagaagcaatcaaactccaaatggtgctgtaaacagaaccacacatagacacatcattcttctgaggacccttagattgaccccaggaggagccctagctgctcttccccattcgacgcccttttgcaacaagaagtagccagaaggagtcgtcgcccaaaactccctaacagcagttagtgtggcatctccacaggggggaatgttgtaggagttattaagaaattattttaggcagatagagaggaaaatgggtccttgggtccttgggaagttttt

SEQ ID NO: 54518 - DNA, 1062 bp, Homo sapiens
attggaatattttatttacattttatatttaaagagaatcaatacaaattgggacatatttacagcatttcaaatcagtgtacaagaatgcaatggtttcatccattcagcaaacaaaaatacatgtctgttttatttttgcctaaattctgctataatttgaacaaaattctaaaacaaaagccacacagagtacaaataaagtgcatttttaaatagctctatttaactttggtggatgaagcttcaaactttatattaaggcacctggaattctcccccccttctttttcaaacaccaggaaaatgcattcacaaaatttataggttacacggacagaattttagtttatctaatgtaattttagcccatttaggtcaaacataaactcaattttcaaagtaacattgtttggaaaacattttcaacagactaattttacagaacattttttttctgtagactaattcatgaacgaagatcaatgaccaatattagtgttacttactctgtcattagcaatttcaaacagtatgatgattccatatactgagcctttgaaaaatccccacaagtttgagaaatagttacacagtatttttgtaaggaattttttgtctaatcttgtgtcaagttgatgtcactaatataccaatcaattaagtccataatctctgataaactatggttgacaaatcacatgaagtacattcagcctaattttaaaaataagaaaaagtaaaaatgaatattttgctttaatcttttctattaacttaaagcagcttaaatagacatttcaagaagtactcgcctaagtttgcattgctttttacattacaattccagatcaatataagcacctggagaaaaaccctgacacatgtagcccaagctaaagaagtagtatttttcattaagatactatcataaaataaagtgattacagctactccacattttaaaagcaacatgtttttataagaaaattgttataaatgaaaaacgtgacttcttgaagacagttttgaatgtctaaaaatgttgttatcactactgag

SEQ ID NO: 54519 - DNA, 362 bp, Homo sapiens
tggactcccaacaatacccgagagtagaaatcttacagaatattttgttgccgtggatgtgaacaacatgctgcagctgtatgccagtatgctgcatgaaaggcgcatcgtgattatctcgagcaaattaagcactttaactgcctgtatccatggatcagctgctcttctatacccaatgtattggcaacacatatacatcccagtgcttcctccacacctgctggactactgctgtgccccaatgccatacctgattggaatacactccagcctcatagagagagtgaaaaacaaatcattggaagatgttgttatgttaaatgttgatacaaacacattagaatcaccatttagtgact

SEQ ID NO: 54520 - DNA, 2247 bp, Homo sapiens
atttgaagaaagtgagcaacagtagttaaatgtgggtgcatataaccaaattccccttcatcaagaatggaggagaagagagaagaatgaaatcgtgaagattcatcccagccgcaactcaggatccaacacaactttaactgggaggaatacattgtttgatcatttttaaaacatctgtgaatgagtgattccggaggcctgtgaattgtgtggggagcttgctttgatggcactgtgttaataaaagttgtagggactgtgcacctaagaggctaagaggtcccactcatccgccctgtgaaccagctgtaaagaaatgtagttaagaaatgcaaagaaatgtgttatcttggcacttgggtttgattttcctttttttaaagcactgccaaaacttctttaggatactaaaacatcctaattgggctgtttttttgttttgttttgtttttcagctaaaggcaaagataatttttttttcagctgaagtttttcttttttgcaactatgacatgaattgagtgataaaatggctctttgaaaagtagatattgtctgtattgtaaatgcttagtcatattcatggcaaagtgttcatttcttgagatggttctttcacaacacacaagaatcaagatggaacgcaaggaaaatctttttgttttgaccgaggtaaccagtttatgtgtgttccaatccatagagaagtgggggaaagggcgagaaaggatcagattgatctgggatcagctttgagcctgagttcagtgaatagcctcatgggcatctcatggaattgatgcatttgctgtggcatatttaaattttgttcaaaagatttgaagcaagaccttgcaaagactcttaacattactgttcagcttgcttagattgtgttaacagttcatttaacaaagatccgttttaactctgaacaaaagcaacccagagcggccattctctattcccatgctgggtcaatacgcttttcattaccaattggcccttaccaaacttttcttatatatatatttgtattttactatgatagttgagaaatttagcctcttagtcatttttagctgttattgtggaagacctcaaatacaagattagatgcccttgaacatgttttaatgatgtgtgtcatgttactatcaatggtgatttcaatcgcaatattttaaattgatgagaatgatttgtaaacatgaagttactattacgtaaattctgtttgttatagagtttcttcagttgttacccaagtgtcatcctagagaagtcagaagaatcagaatccatcgtattttagagttatgtgaatctacatcataaatgggcattaacattctaaattgcttggtttggagaatgtgttagcagcatagctatattcaactagggagatgctaaatacacagaagtttcaagagccttggaacagaattacaggggaactatatatgtatatgtatattttattaaacacccatctgcactatcagtattgcactaatgtggaatttgaaagactattttgctgatactgtatatatgcgcatcattcctgattagattgttgtaaagacaatctgaaagatctaaggttttaaaataatttggtttgaaaatatacagttgtcttgaaggaattgctgtcatacatgaagttgctccgagctgtctttattctcttcttggtcaaggttaacaattgctaaatgatcgcaaattcacctaaacaatacatttacaaagccatctttacatgcattaaacgagggctacaacaatattgttttacaaatactagcacttttttttctgttatgtacttagtgttagagggtcaaaataatctttctgcttagcatctcttaaaccatacctgcaaatatagcaggattattacatttacagtactttaatacttgtataaactatgcagaaatttttaataaagtgtaatatattttataagctaataagactgaatgggtaaaggtttttagcatgcgttagtatacttgcagatactgaaacattttggtaatctttcttactaaagatgtgaatgtttaatgtaccttctctgtttctactctgtagtccaatgggaattcagtaatgacattttgtcatgtcaaactgtgaacataaatttgtactgtacagtcctcatatactatatacagtatgcaatatatattatatacttgttaataaaaccatcagaatatt

SEQ ID NO: 54521 - DNA, 688 bp, Homo sapiens
caaggctccgtctcaataattaaaaaaaaaaaaaaaaaaaaaggccgggcgcagtggctcgagcctgtgatcccagattgttgggattgcaggtgtgagccactgggccctgctgtactttttatcagccacaaatccagcaacaagctgaggattcagctcataaaacaggtttggtgtcttggtgatctcacataaccaagatgctaccccgtgggaaaccacatccccctggatgccctccagccttggtttgggctggagtcagggcctgtatacagtattttgaatttgtatgccactggtttgcattgctggtcaggaactctagtgctttgcatagccctggtttagaaacatgttatagcagttcttggtatagagcaaactagaagaaccagcaatcattccactgtcctgccaaggtacacctcagtactccccttcccaactgaagtggtatgaggctagctctttccaaaagcattcaagtttggcttctgatgtgactcagaatttaggaaccagatgctagatcaaataagctctgaaaatctgaggaacattgtaggaaaggtttgttaagcatctcttaagtgccatgatgagcataacagccggccgtggtggctcacgcctgtaagcccaagcactttggggaggccaaggtgggaggatgacaaggtca

SEQ ID NO: 54522 - DNA, 391 bp, Homo sapiens
tgttatttcacttgaccatctgtacaacattacctgtggagtacaacattgatgagcattttcaagctacagcttcgtggccaacaaagattatctatctgtatatctctcttttggctgccagacccaaatactattttgcatggacgctagctgatgccattaataatgctgcaggctttggtttcagagggtatgacgaaaatggagcagctcgctgggacttaatttccaatttgagaattcaacaaatagagatgtcaacaagtttcaagatgtttcttgataattggaatattcagacagctctttggctcaaaagggtgtgttatgaacgaacctccttcagtccaactatccagacgttcattctctctgccatttggcacgg

SEQ ID NO: 54523 - DNA, 636 bp, Homo sapiens
agcaaggcatctgcgaggagaatgccatcgctctgctctcggctgcggtgaagtatgatgcacaggatttagaagaattctgcttcaggttttgcataaaccatctgactgtagtaacacaaacatcaggttttgcagaaatggaccatgatctcctgaagaactttatcagcaaagcaagcagagttggagcctttaaaaattgatcccatctgcaggaaagtttttgagcctttccatttcccctgcaaaagccagagatgaatcacttctctttaattaatagtatgtatgatgagctatgtttggctgagtacttgtaactgtcagaagaaggatggtggtgagtggtctttgtctgcctaaacccagagtttatgtagaaagcattgaatgttctgatcagatgtgactaaggtcaaggaaaaaaaattgaaatatcttatttaccatttcctctttttgagtcacttaaattggacacctttggtaccctggtctcagtatatgctattctggcccaaatgttccattattcagctggctgataccacatagatagcttgacaaggagtgctgtctgtccttaccacattttcagcactcagcacagtgccttgtgtataataggcactc

SEQ ID NO: 54524 - DNA, 436 bp, Homo sapiens
gggaggggacccgggctgccaggcgcccagtttgtgcccagatggatgggacagagacccggcagcggaggctggacagctgtggcaagccaggggagctggggcttcctcaccccctcagcacaggaggactccctgtagcctcagaagatggagctctcagggcccctgagagccaaagcgtgacccccaagccactggagactgagcctagcagggagaccgcctggtccataggccttcaggtgaccgtgcccttcatgtttgcaggcctgggactgtcctgggccggcatgcttctggactatttccagcactggcctgtgtttgtggaggtgaaagaccttttgacattggtgccgcccctggtgggcctgaaggggaacctggagatgacactggcatccagactctccacagctgccaacactggaca

SEQ ID NO: 54525 - DNA, 417 bp, Homo sapiens
cttggtccatgtgagagaagctggctgctgaaatgactgcgaaccggcttgcagagagccttctggctttgagccaacaggaagaactagcggatttgccaaaagactacctcttgagtgagagtgaagatgagggggacaatgatggagagagaaagcatcaaaagcttctggaagcaatcagttcccttgatggaaagaataggcggaaattggctgagaggtctgaggctagtctgaaggtgtcagagttcaatgtcagttctgaaggatcaggagaaaagctggtccttgcagatctgcttgagcctgttaaaacttcatcttctttggccactgtgaaaaagcaactgagtagagtcaaatcaaagaagacagtggagttacctctgaacaaagaagagattgaccggatcc

SEQ ID NO: 54526 - DNA, 432 bp, Homo sapiens
gtctgcagaaagaaacctgtgaccctacagtgatgcccctctgtggccacgcagtggtgtccagcaacagtggccactcagccaaacacagcctcagcctctgcctcacccgcacccgtgaccttcacgtgagcacatccagagccctcaccgccagggggtctggaagaggcagcgctggctgtccgacctttggagcacaggaaggtttactaaaaggaggccagcatggatgctggatgtgttgactctgacctatcaaaacatcagcggcttaaacacagtatcagctgatttcccacccaggatgggtatgagcagcccaaggctaaggtaccagctccccggaggctggcacggagtcaggtgcccacgctccgtcttgtcccttcattgtccctaatgttcagcttccaccccgtggcctggcgt

SEQ ID NO: 54527 - DNA, 420 bp, Homo sapiens
cccacgcgtccggaatcacagacatgcacttaagaagtcagcatgtataaatggtcatgagctgtctttctgctaagaccttttttcttttcttttttttaacttaatcatttcagagaggcaatcaatggaaaagggaaagtgtcaagaaaatctttttgccttttggaaactcattgattatccatttgaatagcagtttcctgtactttggtgttttaattataatttatttaagagaagattgtttcaaagtccttttcctgtaaagtataaagtcttccttaaatcctttaatgtgagaatatatggcctctttagtatccagaattcagcaatacagtgatttgaaacaaagtattggttttcttgaaggaaaatggtattttagctaacttaaaatattcctctttttttttt

SEQ ID NO: 54528 - DNA, 204 bp, Homo sapiens
  misc_feature (1)...(204): n = a,t,c or g
gaaaaaatagttataaaacaaagcaaatatgttagttttaatgaatttatagactagtttgtctttttcctatttccttttttactgatttcttcttttgttttttattttacttttgttttttagagacagggtctcataccgtcgccccgggcttgagttcagtgatggctatccaatcaggggctcantgtagccttggcc

SEQ ID NO: 54529 - DNA, 184 bp, Homo sapiens
gagacagcccagagaaggctttggagacccttgagtcggccagcgagcagggtttcttacttgagcgcctccacaaataaacgctccttcgctcctccgtcgcgtgcgtttccctgggataataagtgggaaagtggtggcttttatttttttgagacagggtctcaccgccgtcgcccaggcc

SEQ ID NO: 54530 - DNA, 438 bp, Homo sapiens
  misc_feature (1)...(438): n = a,t,c or g
ttgganaccattttgacatgnttacgaatttaatacgactcactatagggaatttggccctcgaggccaagaattcggcacgagcaagaacccccacttcatctttgacgtgcatgtccacgaggtggtggacgcctcgctgtcagtcatcgcgcagaccttcatggatgcctgcacgcgcacggagcataagctgagccgcgattctcccagcaacaagctgctgtacgccaaggagatctccacctacaagaagatggtggaggattactacaaggggatccggcagatggtgcaggtcagcgaccaggacatgaacacacacctggcagagatttcccgggcgcacacggactccttgaacaccctcgtggcactccaccagctctaccaatacacgcagaagtactatgacgagatcattaatgccttggagga

SEQ ID NO: 54531 - DNA, 6286 bp, Homo sapiens
aaaacttttttctttttattttttttttttcagagtgaaaaagacgctgtatttgatttacaatgaacaagatttacaaaaaggggtggggtggtcttggaactgctcccagtccccccggactgggtggggctctagggcagcctgtctgacagaccaggaccccaggatgtctgggccccgacgtaggacttgacctacgtctcacttgacctttgacgtggggcccagcagccgtgagtccacccagagtgccggcacccttggggaggccggtgaggtcaggaaggcatcgtaccgctttttctcctcctcccatctcgtggtggacagacagacataggatctgggaacttgccctggggggccacaggccctcagatcccccaggggcccaacctagggcatggaggcggctgctggtgcgtgggcggaggcggaggccagctgcccccagcgtggcagcgtaaggcacattttcaaatcactcgagactcgacagtgaacacccgatgctggttctgcggccggagggagctggggctggggctggtgctggtgcggtgcccggcggtattgctcagaggaagatgctacagtctagacgctgggcgggttccggctgcacccactccggcttggggcgcgttccaggggagggtgggggcctcagccacagccactcggcctcctccccctgaggggctctcaggtacctcaggtacctatgtcccaaggcagcactggagattgtaggtcagaggtcagtgaccttgttctccagtgcagcggcaatctgctgcaggcggaaggccagctgcatcttctgggcggcaggatcctcctccaaggcattgatgatctcgtcatagtacttctgcgtgtattggtagagctggtggagtgccacgagggtgttcaaggagtccgtgtgccgcccgggaaatctctgccaggtgtgtgttcatgtcctggtcgctgacctgcaccatctgccggatccccttgtagtaatcctccaccatcttcttgtaggtggagatctccttggcgtacagcagcttgttgctgggagaatcgcggctcagcttatgctccgtgcgcgtgcaggcatccatgaaggtctgcgcgatgactgacagcgaggcgtccaccacctcgtggacatgcacgtcaaagatgaagtgggggttcttgaggatgttcacccagaaccggagcggtaaactgttcgtcttccagatgtggatggtgtcttcatcctggatgttgtgcttctctgcctgctcgtccaggaagtcgaagaagtacttgactgcaggtggcaccgcgtgcccaggcgccagcacgctctggaagaagttgtccacaaactgctgcagtgtgcccttgacttgagagcagccgcgtcaggtagatctcggtgatggccttcgtccgctccttctctttcacgctgcctctcttggacttgccctcgtccacctcgtcggtcggccgcaccaggtgccacacccggttctcctcctccaggagggcatggcgctccccaggcaggtcctgctggctgtcctccggctgctgggagacccccaccttggacaggatgagggtggctccatcccggacattgtagtgcataagggtgttgacgcgcttccaccggccctcccgctgtgacgtcaggtccaggtccgacaggatctgcgctgtggagcccggacgccactccaggaccacgctgtctggcctgggccagcaggagcagggctgcccacggtacacctggtcaatgatcttctccttgacctgggagatggtgtcacagttgaggaccttcaccgggatggcgtccactccctcgtcctgcacgatcacgctcaccgtcaggggtgcgtactccacatcatcccccagcagccccgtgtcgttgagagtgtacttggccttcttctgtaccgcatccaccgggcccttttccacctgatgtttgatggccttgaagagcttgtacaggggctccccggcactgtccttgaggtactggtacaggcagatggacatccagttggacagcatcctctccaccacagtctcagacctgcgcagcatcagcttggggttcttggccaccacgtactgctccaggagctccaggaagagcgtgtgcatgatgtccgtgtagtactccagtttcccgtgcagcgccaccgtcagcagggacgcgaagtagaccttggcgcgggccgagaactcccgctggttctccagggtgtggatgaaattgatgaggaaagacttgctgttcagcaggttggagaactggtagagggcctgctccaccaccggccgccgcggctcagggatgtccagcttgccggtgatcatcacgtccttgtcgccgtccttggagggcaggaagaagacgcggtcggtgtaggtcttgtagtccagcacggggatgccggcctcgtgcacgtcgttggtctggtcctccatctcgatcatcaggtctgtgaattccttcttgcagcggtcccgcacgctctcctccaggccctccagctgggacttgatcttctcatactctcgttcggcctgctggctcttcctccagtagcagtagacagacaccgcgatgacgaccaccatgggcacgatgaccagcggcaagatgaggctgagcggcacgtcgctcacccgtgtgtcgtactccacgcggcccagcacccactcgcgagagccgaacttcacaatgaactcgggcaggttgtgtgtggtgtctcgtttctgccgccgcttgggcgggggctgcacctccgggggctcacagtacaggtcggtctccgtcagcgtcttcatggtgcagcgctcggcacccacgaaggcctcggcctcctgcagcgtcatcgccttgttcagattggtgccccgggcgtggatgagcttgttgacctgcttcttgacgccacctgtgaagttctcaaaggtggggtcaggcacgtactcgaaggccccggcctctgttctgagcagggcacggtgcccgtccatctcgatcagcaccgtgaggttgtaggcctctggctcctcaggcacagccggggacaggaagacgaccttggtgtcattgtggaacacgtagtctgtacccaccaccgtcatgggctgcagggattcagcctcccgcggcggctgccaggactgcaggggctccgcgatgaccaccatggcaaacctctggatcaggctgaagccctgacccgtgacgttgatgctgcggccaccactggcaaagcttcgtagcggctcgaaggctcgcagtacggggttttcgcggtaggtgaagaagatgccggggttgggcacgggggaccccccgtaggagacctccagaagcatctggccccgtgtcgcctgggggccagtgacacactggagctgcgccccaaacttcgtcactttacacgggacgccgttgagggtcacccgcacgtcctcctgggagcccgtgtccaggtgggtgccgtggatggtcagtgtggtgccgcccgcctgcggtccctgctgcggctccacactgagaggcttgggctgttggaaggtgaactggacattgggaggcgaacggcccagtttcccgaagacgtccacctcgacaccccccgtgaaaggcgtctccgcagcctcgatcacacacacgatccgggtggacacggagtaacgttccggctgaaaggagcagttccggccggccacagagatcctctggatgtcccctgcttggacgcccaaattggaccccaggatggtgatgcggatgcccccacccagggggcccgtctcaggctggatcctggtgatgacgggcggcgggcactcggaggtggtgttgcacagggcctcatacacgcacctgctctggcccccgcaccacgcacacctgtagtcggggttagcggcccggcacaggctgcagtcgctgcggccaaaggagcagttgtagagggtcacatggagcttgctgtcgatattcttgccgtaagacttgacgtagaggtgcaggggcagcgtctcgttggcatcgtgggacagctttggggtccgaaaggcgaaggtcccagattcctgcatggtcaccggctccatgaacttgagcaagtcactgcccacgtgcagggaggaacccttcacggtgtccaggttcttgccctggaagttcacatctgtctcgtggttcatggggatcaccagggggctgggtcccaggaactggggacagctgtcctccatgtgggcacggacgatgccgtcctcagggttgggcgaagcctcccggcactcgtggtagcgcaggtcccactggcaggtccagcggttgctcacgcaggagatgcacggcaggttctcctccaggctcatggcctggcggcagtcgtagaaggggtactggtaggacgtgaggaagatgttgcctcgtctaaggaggagctggatggtcacggccacgtggtcctggcctggcggtgtgacggggatgctgcttggggagttgcagatgacggcctcgccctccacgcgggcggggtgtggcggcgactccccaaaaaggcacagcaactcgtcctcctcgctcagggcagggagggggctgacggtcagctgcacctccccctgggcccgccggctcatgttctgtggctgggcgctggtgacggccacgcaggacttgcttcggctccacagccagtggctggcctcctcggcccgcggacactcggccttccgggtgcatcgtccctcgacgacgcaccagccgcagtaggggtcctgggagtcgcggcactgggtgcaggtcgggtagctcaggcactcctgcaccggcagccggaacaccttgtcctgggtcatggcgtacaggctgcccaggtctccagacagtaccaggtcgcgcttgactctcttgtttatctccacaaggatagagtcgtactctgaggaggtgccatctggggtgaggtacaccttgaggatccggccatcagaggtgcccagaaaagcaacagtgtggttgttctcggcggcgaccgtcacggccgtgaggttcaggcctccacgctgcagcacggctgtgcctctgagcccgtcgcggctgcccagcgggtagggcaggtgctccgagccacatgggaagctcttgctggagcccggcgcgtggccgccgcactggatatcgccgtggaagggcttgtagaagatgtcacgggcctcccgggtgcctgtgtaacaggcgttgcggttggcctccatcttggcgtgcaccttgtccagcgggaacaggcagaggcccgcaccgggccccccactgctccggctgtctctgctgaagacagcatatagcaccctgccagagccaggcgcagccacggaggcggccaggcaggtgccaaaggcagcggcgtggatgtcggggtcccggcactgcaggtccatctccaggtaggagtagtagttggggtcttctctgcacatgcgtgccagcagcgtgcggttccgggccgggtgcttgtcctgctggttgaagacaaagaagacgtaggggccgtcctcgaaggccgccacgaactgctgtgtgttggtggacaggtagccggccttgtaggtggcgtggtccgtgtaggcttcaaaggcctccctgctgtcagtccggtccaacagccgagtgctcacgatgatgccgttgtcgtgtggcccattgcctttgcccacaaacagcacgcggtcaccaccaggacccgtggagctcaccagccccactgtggccacgccctcatcattgctggccacgaaagacttctccccgctgccgtcctcgtagaacaggcggagggagatgttgctcagggcgcgcagagcgcagatgcccttgaagaggctgccgcactccaccaggcgcttcctgggagggtcgagcagcagcagctggttgacattgtcagtcatctcagcctcatggcactggctggcctcgatgggcggcgtgcacttcttgttgtccagggccgggcccgtggccacctgctgctccagctgcagcttcgcatccagctggtagagggcattcaccgcccccaggtacaccacgcctgaggcctcatccacagccaggtggttcagctctttctcgctgcggaagaagtccagcttgcggggcctcaggctggcacctgcgcccagcaggcccagcagggtcagggcccagagctgcagtgccattgccccccgc

SEQ ID NO: 54532 - DNA, 124 bp, Homo sapiens
aatcaaggagcattatatagcctagactgcagagactcaatataataaagttggcgattcttcctaattatcaaatttactgcaattccagccaaaatgtttcagtggttttttttgtttgttg

SEQ ID NO: 54533 - DNA, 394 bp, Homo sapiens
cttgacttgtttaaatagtctgtgtataaacaattagaatgtattaaataatcaggcctgtgggtacaggagctttttattgttttatgaatgattcttattatggttcatttgtcttaaaggaactttatagatctgtagaaccaggtttccactttgtgttttcattaataccttgttaatttgaagtgcctgtaaaactttgacactcataattctgttcttaccatcggatggcctttgattttggttagtaattaacttttagccatttagagagaatatattgagatgttcttaattttataacatataattagttatccttcaaaaactaagaagcaagcctataaagaatatgtatggactaagaatttatttttttctatgcact

SEQ ID NO: 54534 - DNA, 380 bp, Homo sapiens
aattaatgtattcgtatgtgaaattcagatgtgaagtattaaatgccgttgaaattttaacactgtcttttttcctcttatgaaagaagtgagaacttaatattgtttgtgcaacaatgcctcaaaaatcaatatatccaagttttaattttatgaccaggcagtgttaaaattaatacttaaacaactacacacaaacagccaaggaaaaagtcaagctgattacgaaccatgcaaagccaaacacttttgcataaaagatacaccttaaaggaaaacaaagggatacctactttctgctgctagaagtcctaggaggaaggcagcatatggacaaacaacaaacagtatgattttagaacaagcaggttatcaagccc

SEQ ID NO: 54535 - DNA, 3376 bp, Homo sapiens
atgagttggttcaacgcctcccagctctccagcttcgctaagcaggccctgtcccaggcccagaagtctattgacagggttctggacatccaggaagaggagccgagcatctgggccgagaccattccgtatggagagccgggaataagttcccctgtcagtggaggatgggatacttcaacctgggggttgaaatcaaacactgaacctcagagtccaccaatagcctctcctaaagcaatcacaaagccagttcggaggactgtggtcgatgaatctgaaaatttcttcagtgcctttctctcgccaaccgatgtccagaccattcagaagagtccagtggtatcaaaacctccagcaaaatcacaacgaccagaagaagaagtgaaaagcagcttacatgaatccttgcacattggccagtcaagaactcctgaaacaactgaatcacaagtaaaagactcttctttgtgtgtttcaggggaaactctggcagcaggtacttcatcacctaaaactgaaggcaagcacgaagaaactgttaataaagaatcggatatgaaggtgccaactgtaagtttgaaagtatctgaaagtgtaattgatgtgaaaacaactatggaaagtatatctaatacgtctacgcagtctctcacagcagaaacaaaggacatagctttggaacctaaggaacaaaaacatgaagacaggcagagcaatacaccttctcctcctgttagtaccttttcatcaggtacttctaccaccagtgatattgaagttttagatcatgaaagtgtaataagtgagagctcagcgagctcgagacaagagactacagattcaaaatcaagtcttcacttgatgcagacatcttttcagcttctctctgcatctgcttgtcctgaatataatcgtttagatgatttccaaaaactcactgagagttgctgttcatctgatgcttttgaaagaatagactcatttagtgtacagtcattagatagccggagtgtaagtgaaatcaattcagatgatgaattgtcaggcaagggatatgctttagtgcctattatagttaattcttcaactccaaagtctaaaacagttgaatctgctgaaggaaaatctgaagaagtaaatgaaacattagttatacccactgaggaagcagaaatggaagaaagtggacgaagtgcaactcctgttaactgtgaacagcctgatatcttggtttcttctacaccaataaatgaaggacagactgtgttagacaaggtggctgagcagtgtgaacctgctgaaagtcagccagaagcactttctgagaaggaagatgtttgcaagacagttgaatttctgaatgaaaagctggaaaaaagggaggctcagttattatctcttagtaaggaaaaagcacttctagaagaagcttttgataacctgaaagatgaaatgttcagagtgaaagaagaaagcagtagcatttcttccttgaaagatgagtttactcaaagaattgcagaagcagaaaagaaagttcaactagcctgcaaagagagagatgctgctaaaaaggaaatcaaaaacataaaagaagaacttgccactagattaaatagtagtgaaactgcagaccttttgaaagagaaagatgagcagatccgagggttaatggaagaaggagaaaaactttcaaaacagcagctgcacaattctaacatcatcaagaaattaagagctaaagacaaggagaatgaaaatatggttgcaaagctgaacaaaaaagttaaagagctagaagaggagttgcagcatttgaaacaggtccttgatggcaaagaagaggttgagaaacaacatagagaaaatattaaaaaactaaattccatggtagaacgccaagagaaagatcttggccgtcttcaggtagacatggatgaacttgaagaaaagaaccgaagtattcaggctgccctggatagtgcatacaaagaacttactgatcttcacaaagccaatgctgcaaaggatagtgaggcacaggaagctgctctgagccgtgaaatgaaagctaaagaagaactttctgcagcattagagaaggcccaagaagaagcccgtcagcagcaagaaacattagccattcaagtgggggaccttaggcttgcattgcagcgtacagaacaagcggctgccagaaaggaggattatttacgccatgagatcggtgaacttcagcagagactccaggaagcagagaatcgaaaccaggaactgagtcaaagtgtttcatcaacaacaagaccattgcttcgacaaatagaaaatttgcaagcaaccctgggatcccagacatcgtcgtgggagaaattagagaagaatctttctgataggcttggtgaatcccagaccttgctggcagcagcagcttgagagagaacgtgcagctacagaagaactccttgctaacaaaattcagatgtcttccatggagtcacagaattctcttttaagacaggaaaacagtagatttcaagcccagctagaatcagagaaaaataggctgtgtaaactggaggatgagaacaataggtaccaggttgaattggaaaacctaaaagatgaatatgtaagaacacttgaagagacgaggaaagaaaagacattgttgaatagtcagttagaaatggaaagaatgaaagttgaacaagaaaggaagaaagccatttttactcaagaaacaataaaagaaaaggaacgcaagccattttctgtttctagcactcccaccatgtcacgctcaagttcaataagtggtgttgatatggcaggactacagacatcttttctgtctcaggatgagtctcatgatcactcatttggaccaatgcctatatcagcaaatggaagcaatctttatgatgctgtaaggatgggagcaggatcaagcataattgaaaacctacagtctcagctaaagctaagggaaggggaaatcactcatttacagctagaaattggcaatctagaaaaaactcgatcaataatggctgaagaactagttaaattaacaaatcaaaatgatgaacttgaagagaaggtgaaggagatacccaaacttagaactcagctaagagatttggatcaaaggtacaacactattctgcagatgtatggagaaaaagcagaagaggcagaagaacttcgattagatctcgaagatgtaaaaaatatgtacaaaactcaaatagatgaacttttaagacaaagtctcagttaacttgtgaaaattgaattcccatcaaactgaatgtaagcatttaatatctaaacatttaatgtggacttccaataaattcttttatagaattaa

SEQ ID NO: 54536 - DNA, 667 bp, Homo sapiens
gggagagccaggatgtgaacttaggccattgctactaaccgctccacagcctcgcccagtggtttgccctgctcagaggagccatggagactgctgggagactgaggcccagagaggggagctggatctattttgctcatctcaaaattcctcccacttgggaaattctcaaaccatgggcgctagggacagaggaagggagagaaaggtagggggcccttgcctctcacactggctgggaacatccctcccctgctcagggcggcctacacactgagcgtagccctgccgggctccatcctggacaatgctcagtcgccggagcttcgcacctacttggccggtcagattcccagagcctgtgccatcttctgtgtggatgagatcgtggtgtttgatgaggagggccaggatgccaagactgtggagggggaattcacaggagttgggaagaaggggcaggcgtgcgtacagctggcccggatcctgcagtacctggagtgtccacagtacctgaggaaggcgttcttccccaagcaccaggatctacagtttgcagggctccttgaggctggaactctctccagggtggttaactctttccctctgttttccttatgcccaacactgggtcaggcagagtgggcgacaataaacgctgctagga

SEQ ID NO: 54537 - DNA, 1656 bp, Homo sapiens
cgactgaaccagcagcagcacccagactgcaagacctaccatggcaaagtggtatcatcgcaggaccctcgcaccaaagctggtctctactggggctacaccgtccgactggcttcctgcctcagtgctgtgtttgctgaggcccccttccaagatgggtatgacctgaccatcgggacgtcagagcgcggctcagatgtggcctctgcccagcttcccaacttcaggcatgctcttgtggtgttcgggggcctccagggtctggaagctggagcggatgctgaccccaacctggaggtggctgaacccagtgtcctctttgacctgtacgtcaatacctgtcctggccagggtagccgtaccatccgcacggaggaagccatcctcatctccctggccgccctgcagcctggcctcacccaggcgggtgcccggcacacctgaaagttctaaggggccgaggacatcagtgaagcagcagtgaaaccaggggctctgcaggtcacttgggacggacgccaccagacttgtctccaaaaatcaccacctttaatactccccggcctgcacacacccacagtctcactgggctccaccctcacttactgcccgccgtgatggccttgaggctgcctgcccgcgccaggatgtttggcacaaagagcagccccgaagcccgctcaatgctctcgatgggcaccaggaagcgctccagtgggatggcctcatccacaggtgcgttgggcatcacgtaggtgcggagctcaatttgcccacctgctgcctccaggatcagcaccttgaagaagtgtgtgggcactgccacgtggttcttgccgatgacctggtactttacgtaggatttcccatcagcctctgtcctgggcaggaagagtggccctgtgcagacatagacgttttggtagctgcgggtcaagctgcggctatatttctccaggttgttccaggcattctggttgaggtggggcacctggggcgcgacgttgctcaggtagaacgtgtcgtccatggccttctggctccagggtggttggcggcggcggccaggtgaccgcggtcgaagccactgccgcggtagtcgacgttggtggcacggtggtacgcgtgcaccgagtcgtcctcgcggaagtcgcactcgcgccggtcgccgtcgccgcggagacgctcgggtcgcagctgctccaccacccagagcgcgccgcgggtgcgcgggtcgtagcacagcacgtacgactcgcggctcttgagctgcgccagccccggcagcccgtacttggccaactcgcccgggccgcggggtcccccgggcacagggggcaactcggctgccgccgccacgggcagcacgggcagccggcccagcagtcccagcgccgcccgcgcgtcctcccgccgccgccgccagccctcgacgaccgcacccagccccgcgcccgacgccatggtcaggccggcccgcagcgcccgcatggccggggagcgacctagcggcgggcgacccgcgagctcttaaaggagccgcgtcgcgggatccaacgagggcacagggctgctggggccgcggacgatagcgtgacctcccttccactcacaaacactgccaagggcttgggcctcggaacccagcctcgtgcc

SEQ ID NO: 54538 - DNA, 69 bp, Homo sapiens
gactaagctagattattcagtgatgggttgcacatgttattatttggttaactcagtttttgcagaata

SEQ ID NO: 54539 - DNA, 907 bp, Homo sapiens
gtcttccagagaccttgttcttgaagatcacactgctattggtcaggaacaatgctgtccaatctgttgcagtgagtatattaaggatgatatagcaacagagttccctgtcaccatttctttcacaaaccttgtgtctcaatttggctacaaaagtcgggaacatgccctgtgtgccgccgtcatttcccacctgcggttattgaagcatctgcagctccttcctctgagcctgatcctgatgccccaccttcaaatgacagtattacagaagcaccctaaaccttgacagttgaaatgagatcagtgtatcaaagtaaatctgcaaattccttctaaatttcatgtgcaaataattatatataaatatatttaaaaatgctatatatagtatatgccatagtttagaaagaatattaacctttctaaactaaatttaggtttcgcagaaagtattaatcatttttaagctgaatgttgagacagtgcatccattttctttagttgaatatgtttgtatttaattgttaaagccaagcttatcagttgactctctccagaataaataatcatctgtgtggcatacgttattggctttgtctgtaatactgccactaagtgattataattaagctgtcctgtttgcatcaaatgtaaagactgtgttcacaaccgtagtaaaatttggtttcattggaaatgaaacaaattctaaagtatgctttttcactagtccctttgattttgctatatcataacctcttggttcatatgctgagaaatttttcagaaagtccatttttgtttaaaattagaacttttcagaatgccaaatgaaggctaaaattttggccagaacattacaaaagttttaaatcgtagacgtaactccccctgaaataaagtt

SEQ ID NO: 54540 - DNA, 2840 bp, Homo sapiens
tgaaagacaacaagagtcccctgcacctcgtccagatgccacctgtgattgtcgagacggcccgttcccaccagcggtcttctagcgagtcctacacacagagctttcagagccggaagcccttcttttcatggtggtagctccagaggcaggcagaggaaatattgtcagagactggtgggaggaagcctggggagtggggtgcaggaaaagccagagaagccggtggagagcagcacctttaagagccctctctctctgcttgccaccctgctcagagctttccacccacagggagaagcacaatcaggaacagtgagtgctcctcgcccttctgatgtgggggaggctggagctccatgcacgtagtccagatgcctgggaaggaacatctcccttccagcatctgctggtagcaggctgggacagtcccttccttccccgaaaccctgctctattgcaattccctattatattctgcatcagaaaaacaaacaaaacaaaaacaactttaaatgcttgtagcagaaccccgggtcatctcatgtcagaaacctttaatccaggcctaaatttgcatagacctgacattcagctgccttgcagttgcttcctcccatgagccaaggtggtgtcagagggcaactggatgactcgcagtaccacagcactgggacagacagaagccacacctttcttttgggtttttgccaagcctcctccatctcccatcagtgctgtgggctggctgcaagcctcgaaacagttctcctggaagggaggtttttgctttacccccgccagcacttccgcacacaatcatagagaacctctctgctctctgctggcctacagcttgtctgtttctcaagcagaggcaggaagagctagtcttagcatttatattttaataggaagttgactcccagcatgtaaaagtgatccacgcagccggagtgtatgccgggagctaagtggtctatgggtgaacatatcccaccttgcttcctgagtccttggtcccaatcttctcatttgttcctctcgttttaaattttttccccccaactcttttgatgtaagagttcagtttgtcttcgggagtgggtctctgcaagggctctgggatgagtcttggcttccaagaggacaggctattaggttcttggacttttttctgtgctaccgctgctgcttggtggaagtaacaggacgtggattctgcctcataagtggcagtttcccttttctctctgacttgtcctaggccgatttctctatggcttccctgagaaaggtgaggcccaaaggagagaggccttcaaactgtcccaggtcctgcgcagttcagtgcgtatcttcttgcttccatgtgtcttttcccctgctgcctcactccccacccccacttgccaggtgtttgagccatttctacaccaaagcaaagtacggcctcaggagggagtaaaaagggtgccatctgtgtctggaggggcagctgtgttcatgccctgtgctactggacatttcacaattctggcaccttgcgattggtcagtcaacctcagaaagtaactatcttgaaggtttgaaaaacaaccaaagaaagggagtgaggactatggctgcatgtcctctgcttgcccggctgcagagcagagatgtgcagccctctggtcagctggtccaggctggtccccgccggtccccttccagtccagccaccaagagtccacttgtcccgggcttccacctggctgacaggaagaatttctgagagctggatgtgcatgccctgtggacgaaggtacagctcgcctgcctgccccaatcccagccccgacaatcacatgcagctgactcggacactggccttgggaacaatgttcgagagaacacttgccccttgactgtaggagccagaaggggacccaggtgtggcatagctctctgtagacatttttacccaaacctgttggtaaagtgcccatctggtgctcaagagagcctgggggtctaacagggagcccggctgcctcacctggccacagcctccacaccagatctccacattgtcttgatccagaccagctctgtgatcagaaggaaattgggtccagtgtaggagcgagctggtcctgggcctggcaggcaagagtgtgggcatcctttcctggcctttctccactctccctcaagcctgtgctcaggttgccttgaatgtggactctggaagagccaggggcccagaatgccgggggaggcttctgggtggcactcatggaacaccgtccctctgccagccataggccctgcctccagtgtcagggaatggaggctgggctgcgagagtgttgctgccccctgtgtcgttcttctaatccaatgtagaaattgtacgtaatgtatttaaatcaacgcaaatgtatgaataacaaatacagttctgaccttttttgtccagtttctttgggggaagggaagacaaagaaggtaggaacggaattttgaaggcaaagaaacctgtgttccccatggaattgctgagacgtggctcctggggctatttctccctaataaaggatgatccaggtcctcatttccaaagtcccaatgctctgaaaaccaaaagtattttcataacccatttgaaaccaaacctgacctgaacttacactgataggaagctatgggtaattatgatgtgttccttttagtgtgattctttgttgcagaaatgtcaatatattttatgacatggttccctactagggattatacagtatttgctgactacttcctaagagccaaaaataaaaaatctgaattccaaaataaaa

SEQ ID NO: 54541 - DNA, 395 bp, Homo sapiens
gaccaggaccatcacactggggaccggcttctctgctctcccgttatgggggtcgggggaatgatgggtcaagggtcttccgaagaaagcgagaaaggaacaggcgccttcaaaagcccacttggcgatgggttacagtaagagcgttgctccctgcttggctgagcactgcggagtttcacgcctctaaaccccgcctcttcttgcaacctgtgttggcctcatctacccagcaactgtcgacgtcacacgacctgggcctccctgaatgggagatatttactaggcaatcccgcctactgttctgaggtttcccctccaggtgcagcttcagagccaggcgagccaggaaggaccagcgggcgaggtggaagtctgcattatcacgaggagct

SEQ ID NO: 54542 - DNA, 2779 bp, Homo sapiens
ttttttcactttgcaaactctgtatttatttggattaaaaagctttagatgaacaacaaaaaaaagatacatacatgttataagactagttaccacgtaaacctcagatgatatgatacagaaattagaataaaccaagttttaatcaggtatgaaaacattcaagctcaaaatcatcaacaccaatttggggattttacagaaataggtgcccctctcaattcttcctcataggaaggggagagtggcttaaaaaaaaaacaacaaccaaaacagttaaaggccttttaaatcagttggctgacaaacatactgttttaaacctacaggttcccctcagtccccccgtttgcaatataaacaattcttctccacaggaacttacattttgaaaacatttaggccattatactttctaagccacattactacagttcctaaaacttatgaaaaaaaggtgtatagtttacttgtactttcttgagtcaatttttttttcttttttgaagatggctgacctcaaatcttatatcctaaatattaacgatatcccccaagttaatatacagaaaaacatgattctaaaataaatacacaggctttttaaaaaaaacttaattagggcctgtctagtgatgccctgggccggtgctgcactgctttagggaagcccctggctggatctatgtttcctatagcacctctaggcactgggaaggagcctggaggagagctctggcttctaatgacccacgtggcccccagtgaaaaatttttttagaggctccccaaagaagtctcatccagaccttaagggaaataaaatgaatgcatgaaataaataaataatttaaccacaactaaatttcatgttctttggtgtaattcaaggatgtctagaaacaaaataatctgattgcattatacagtccatgatgattcaattgcccaaatagccaggaattgaagatttatctgactcactttaacaataaggtactgacacactactgcaatacatttttttaaattcaatattatttaaaatacttgatgcaaattcaaatccagtggttgactaaaggcaattaagttaaagggcctcccatatttaaagtatctagatacaagagacttttttccattctacactcttttgccctcatgatttaataagtacagtaattaaacatctgggtactgattcatagcagattaaaaggaaaaaagcatcctctgagattaactctctcagattataaacagcagtggaagctctaccacaatggcaatcacccagttactataaagcaggtttcaaaaacatgccgccaagtgaaacaatgttcctactgtctgccatcctatgctgccttcaaatgtttaattgtagggtcatataagaaagacagggtcacccaaaccccaagtgtttgggatctgtaatggtctttctagtaagcgttttattaaattatgattcccttctcctgtaattcaaaagcacaagctaaatttaaaaaatattttagaaagtattaaatttctggttgagaattataacaacattgaaacttaaaagaaaaaatacatctgataataaggaaataaggaatactaaaacatacttgtatatgaaggcaatcaatctacttgttcacaattatgcttcttatacagctcatatctagttccatactctcttacccatgttaggttaggtgttatgtttaaaaataaatcacctccatgcatcccttaatgctttcttcaagacgaacttcaatgtttttcaatgtaacaggtttaaaattttaaatcatctgaaatttataggcataaattgtgaattcattataaatagatcaaaatatcccttaaacgtacctgccctagattaaacatacctcagggttgtgcacgtgttctgcaaaaatcactgacaccatagtctaactcacagatgtctaactcagcacaattgaaaaagtgctttttcccctcctggtgtccaggaggtacattagctgcagacagatgcacagcactgattacatatttccgtagtgagcctctgagttaatagagcaaatgtgctgtgtctattaaacatctaaaacctaaataaccacctttcaaagaaagcacttcatctgtaagaaacagcttttgcagaaagtggcttaagatattcaggcacatgaaacaaacacaagtatactcccctctctaagatgtaaactaggacaaacttcacatttcattatcaatttaaactaatctgtaaactcttgtgtgtgtgtgttttttttcattttgttcttttatatatatatataaaaaaacccaaaaccaagaaaacaaaaaccccaagccaagacaaaaacctctaatggtttcagttccatggcaacaagtaaaaagataaaactccaagtctacatatacaaccaattatgaaactggttttaaacgaaggaaacatatgcaaaaaaatctttgtgtatttgataaagtcaacttaatataacaaacaaattgaaatagcttattaaaagtgtccgtatataaaaatggccttgtgatgtacagtaaaatgcaataaaaattatcctcctttgttccttccccccacccccagtaactaaaatggctactgatccacaactctttatgcttctatataaaagaaacgtaatgatgtgattaaacattttctaggttgtatgcttggcgaatgttgagggtgtcccggagcatcaaatctcgaaggcgccag

SEQ ID NO: 54543 - DNA, 6440 bp, Homo sapiens
gccagcatggtgggatttatgtgcatgaaaagggacaaggagtaatagaagagaatgaagtttatagtaacactctagctggagtctgggtgacaactggcagcactccagtactgagaagaaaccggatacacagtggcaagcaggttggtgtttatttttatgacaatggacatggagtgctagaagacaatgatatctataatcatatgtattcaggggttcagataaggactggaagcaaccccaaaattagacgcaacaaaatctggggaggacagaatggtggaattctagtttataattctggtctaggctgtatagaagacaatgaaatatttgacaatgcaatggctggagtctggattaagacagatagtaatcctacactaagaagaaataaaatccatgatggaagagatggtggcatctgtatatttaatgggggtcgaggtctccttgaagaaaatgatattttcaggaatactcaagcaggtgttctcatcagcactaatagtcatccaatcttaaggaaaaacagaatatttgatggatttgccgcaggtattgaaattacaaatcacgcaactgcaacactagaaggcaatcagatttttaacaaccggtttggaggcttatttttagcatctggtgttaatgtgacaatgaaagatagcaaaataatgaacaatcaagatgccatagaaaaggctgttagtagaggccaatgtttatataaaatatcaagttataccagctatcccatgcatgatttctacagatgtcatacttgtaacaccacagatcgaaatgccatatgtgtgaactgcattaagaagtgccatcagggacatgatgtagagtttattagacatgataggtttttctgtgactgtggtgctggaacactgtctaatccttgtacattagctggtgagcctacacatgatacagatacactatatgactctgctccacctatagaatctaatacattgcagcacaactgaattccttccctaaagaaaaagtcctgccattgtaacatcataacttaaaacacttttttggaagaagatttaaaatatttgcccatgctacaggaagagactgtattaaaaatggatacacaaggtcagttgacactatgaagctcaagctaccaaaaagaaagtggcaatatattgactcaggatctcaaagctgggtgttttagcattactgtgtaaagacttgaagggacagaagtgaagaaaataagctgcaattttgtacagataccaacttctgaaaagctggtgtttttacaactagcattgaatgcagtccaatttgcagtagtaatcttcaatagacaagcagctttgttgctgcctttatggacatgggtaccaattgcttttgtaatatggtaaaaatgtgagctagcacttctgcgttccttttgatttttttttttaacatgtattcagattgagaaatatgattttaatgctttaatctcatgtagtttgtttttaatttcaagcaaaatcttactgtacttgaatgtgccctgttttgttagcacacctagacttgctgtaactgtactcatgtcccagtatgtacgttctttctatgaaagagaaaacactaatcttaaattatatccagcaatgtttctggtatcctttaagaaaagttaagactattatttccttcccttccctgtgcagcattcaaaatcacccctagaaaaagtgagtgttttaatgagacttcctaggaagggatgcactgtaaaacaaaagtattcttgtaactcagttttgtgaaaggtaaaaaactactatgttttaagtacactttagaaagtctcttcaaaacaaacagtcctgtatttgaactctgttcatagtttttttttgaacagtttagacaaaactgctggaaattaaaccaatttcctgcattaagctgagacaagtatatatacagccctatacagtttcatagcttttcctcccccatttatgtgtattggtgacagtgggtataaaacagcctgaaagtgtatgcatgtaccataacatctagacttaatatattgtggagtattcaataaccattatgtagaaggtagataagaattaaaagggtttaatttcctagaaagaaaatggaaaaatggtcatttttaaaaaataaagtttattagatcataatgttgtctgaatttaccacctttgtcagaagtcaactcaaagcttccaatgtagtcagtctataattccttaatcaaagtcagcaatttatggacagcttcagcatctacagttgacctttcactagccaggcaaacttcccgaaataatcgtagtgactgattcatcttctcaaattctcttgcttttctatgtcccttttgaataacttcctctgggagattagcaagccttgctgcattaaagccatagcttttaggacaagctcccttaatgaatttatagaggaacgtaatagtctcctggctggggtcttcacattcattttctaccatgcatgccatatgtcctaggcgcacagcaacattttgagaataatcttctactaatgaatggtagtgagttgaaaataatgtacgacattttatagtctcagcaagttctttaacaactgcatttgctattgccgtcccatcaaatgttgcagtacctcttcctaattcatccacaagcaccagagaatgtgctgttgcatgcatgagtatgctggcagtttcacttaattcaacaaaaaatgtactttcacctgacattattctgtctgaggcaccaagtctagtaaacactctatcaattggtgtgagcctgcacacttcagcagggacgtaacaacccatctgggccattacagctaataagccagcctgtctcataagcgtagacttgccccccatatttggtccagtaacaagcacacaataggctttgccattttcctgctcctcttcctcacagcctattagaatgtcattaggaataaaatcatctccaaaaaaagtcttcgtaatgcaaggatggcgtgatcctttaagctctaagaaggggggggtatcttccggcaacagaattactgggcgacacataggaccatcaccccctcgactatagttagccaggcacagtaaaacatccaacactgcgatacactctacagcagactgccagtccttgtaatttttatcaaagttatagaacagtcgccgcatgcagtccttcaatgatacatccctccgttcttcagcatttatgagattagccaacttcttttcaatagttttggtccagtatcgtttacagcccttcttggtagatttcaactcgtattcttctggcaaattgcgagtggtgaaattctcaggaatttccagctggtaacggttcctaccaatcccccaatagactatggtcctacagccaattctgttgcgctgtttctctaggtattccaggaggctctgttcattttctcttatgtcagcaagagcttggtcataatcagagtcaaagcctgctttgggagtaataagtccagtctttcgagccttttcatggtcaaaggctgtatcccatcggttcaattctacagtcaaatcaggaaaacgaccttcaggattttttgtctgcagagagatgacctgcttaaggattttagacttaaaaccatcagcaacttcttccatgatccctataattttacacattactttgaatccttccagagcagaaagaaaatcaataatcttcttcttgctgtatgtagtttcttcatacattatagccctgctgtctgggtggttctgactcttcaggggagacccaacattatgaattttactgagtagcctctcaagatctggaagcttctttagaagctctacaacttcggagattttgtcaggcacaaccatgaggtcttctatggcatctagacgatcattaatagcataatggttacagagtggggcacaaagccattgctttaggagccgcttaccaaaaggagtatggcaagtatcaaccctctctagtagggttccttcagtagaaccatttgttccattcagaaaaatctccaagttgtttaatgtcactgcatctagcaccattcgttgataggctttggtgaagatagcaccagatcttgtagtgctgactgtgtcagaatccaagggaatatattcttcaaaattagccattgataaaagctcctgatcaataaggcattttttgaggtagaagacacaaccacctagagcagagagggccaattcacttttctctcctggtgtcaacccaatggaatcagactctgaagtcatacctttaagcacctggggtaacatcaccccaatgccatcacttagcttttccctaaaatattcttcctcaaggagagttctcaaagttttggatgcatcccaaaactgggagccgggtatcagaccttcctgaagagaacaggacaatgaactctttagaattgttttagtttcctttgagagatttcctttttcaaataaaacttgtactgggggatagtgtgccactagagtcctaaatctcgaacaatggcgatcatctgaaaactgacctatgaaaaactttcccagtgaagtatcaacaaagcacacaccatatgcacgagtatggccagaagaatcttcctctttttctttgaggctaagaagatacttactgtagttctcagagggatcaccttccagcacactgtaagtctgtgtacccttggtaatgatcctacagatctccctcctcaccactctatcatacttggatatatgtgccatctttctacatcgtgcctccatcatttctggagtctcagtctgttccactcgtgctactttatagcccttctgcaccagggaatctgaataacggccaaatgcaatttcaggaaagccagaatgggcccagttgcctttcatgaataccagccccagttcactgactccaataagagcatccatgtggtacagctcataaaatttccccaccttgtaacagatgacaagatcaaagttctgagacttaatctgccaccacttcctcatcccaggagtacaagaattgaggaaatcctcaggcacatagagtgtagatgcatcaaaatcggggtgatcaggcctcctcctgtgctcatctcttctcttttcctccttaagccattctaaagtttcatgataccaaacagtagggcgactactgtcatcaccacctccactaacgtgggcttgggattcagaattttgaggggcagagaaagctctcaaagtattcttggtttctgatgaaatgctagttgcttgtttggtggctgagggcgtttccttcctagagcttttccttttaagagagccatttccagtcaccattctcttccgctttcgagcaactttgacagggctgttcaggccttcactctcactatcccccactccactgcttatttcatcactgcttccttcctccttagtgtctggcttaaattccacatcagagccaccaatgtcactctcagaatctgatatgacccttcgtttttttatttggcggctacttcgcctagatccttgtgtcttaggctgtacttcctcttcactctcaatttcattatcttcttcactcttatctgttacgtaagttgtgcctacctccatctcttcttcctcttctggctctgagggctcatcacaaactgccaattcaagcctcttaatcttgtctttatttaaggcttcatctgcacgttgcattgctctcagtatttcaggctttgcactgtaaaaatgacctcccttctgggcttcctttgattttgaacctgtatatggctttaaaagccttttgctaacccagccccttgttgggctgtcatcaaaaaactgtacatgaacacggactgatttccctttctcgcggatgaatgttccatcaaaggggtggttgtaaaccagacaaggccaccaggggtaaccctccatcttggcccaaaccaaatctcctggtgagaagtcacaactggtgggggcagcaggcgctaccgatctccgcagccctccgttgaggttcttcgccttgggcggtgacgcggagcgcgccaagggcctgggcccaggcccagcctcgctccaggccgcatccccgcctggggaaggagaggcctcgggggcagcggcggcacggccgccttcgcgtgaggccctggccgaggccttgttggcatcactcagcgccggagacttggggaagaagctgtacagggtgctctgtcgcgacataccgacagccggcaaggcccaaccgttctgtcggacggagctcctaaaagcaccgcatctaccgcgcggctcctgctggcgggaaatctgg

SEQ ID NO: 54544 - DNA, 636 bp, Homo sapiens
gtttacagttactgaacagaacatgaaataacacatctggcaaagttaaattatacgaattaatgttacttttaaaaaactttaaatgctgcactataatttggccatttgtccagttatagctatgttttgctcaccgtttaaaacttttataaacaattcaaaatgtttcttttactgaaggtttgtactgcaattaagaaaattacaaattgcaatatctggaatggaagtatattaatggctttcattctgttttccagttggatgtgtgttagccatttgatgacctcttttattcataattaacagatttcagactggtgtacagggtaactgtataacagttagttttaagtacctgaactttagtagatgctttatggtttgtacttaataaagcatattaagaaaaatgcatcaaattagattgtcagaaataacatttttcttccaaggccggtgtgcttcagttcttaatgatacatcaagttttaaaaaaatctatgcctaatgaattcaaaatgactactagaattcatactgtttacgattaaatgggtatatagagaaaggtttatcttttaaagtaatttttatattataatgaatatcacttaaggatgtacattattt

SEQ ID NO: 54545 - DNA, 371 bp, Homo sapiens
cagcagctgcagctcatgagtaactgatttgtaacaagcctccttttaaagtaaccctacaaaaccactggaaagtttatggttgtattatttttaaaaaaaattccaagtgattgaaacctacacgagatacagaattttatgcggcattttcttctcacatttatatttttgtgattttgtgattgattatatgtcactttgctacagggctcacagaattcattcactcaacaaacataatagggcgctgagggcatagaagtaaaaacacctggtccctgctctcagttcactgtcttgttggacgagaaaacaataacgataaaagacagtgaaagaaaataacgataaaagacagtgaaagaaaa

SEQ ID NO: 54546 - DNA, 738 bp, Homo sapiens
  misc_feature (1)...(738): n = a,t,c or g
atcattattgatttatgtcattgttatccctctaccgcagagaccttctttcactttccatttccctgggagttcacgtgaagtagtgaatgggtcaaaatcttaacagtggttgttgatcaagtccctcctttcttatccttggcactgaataaatctttggttttccataatcaaagggtgagggagacttcttttgtctacattattcagctttctgtaagctatgctgtgtccatttgagaaaaagccccagggatattgaaggtctgagaagatggggggtcaatgtgttattatatttagggtcccagtaaagaagaactgaagcaactgtgagacaccagggcatacttccctgtatgagtggaaaacaaggcacggaaaatagctcacaggatagtcctcaactgacttgcttgaggataagcagcttcccttcgtgaagaagttgccatttctctggccttcatatttatctactttttgttattgttgtctgtatcggttcaannnnnnnnnnnnnnnnnnnnnnnnnnnnnnnnnnnnnnnnnnnnnnnnnnnnnnnnnnnnnnnnnnnnnnnnnnnnnnnnnnnnnnnnnnnnnnnnactggggaggtctcagggagcttttactcatggcanaaggcaaagccagagcaggtatcttcacagggctagagcaagaggacagaganaggggaggtgcncacactttcttgcnaccaatctcatgag

SEQ ID NO: 54547 - DNA, 369 bp, Homo sapiens
  misc_feature (1)...(369): n = a,t,c or g
tggttacccccacactgctgttctcatgatactgagttctcacaagtcctgtttgttttataaggggcttttcccccttttgctcaacacttcttcctgccatcatgtgaagaaggacgtgtttgtttccccttctgccacgattgtaagtttccnnnnnnnnnnnnnnnnnnnnnnnnnnnnnnnnnnnnnnnnnnnnnnnnnnnnnnnnnnnnnnnnnnnnnnnnnnnnnnnnnnnnnnnnnnnnnnnnnnnnnnnnnnnnctcctcaaatgttttgaagattgttgcaccttggaactaccagtgtgcacacaatctggctcaatgtatatattgcccagcaaggcaaagaactgaagttccagga

SEQ ID NO: 54548 - DNA, 1330 bp, Homo sapiens
ccgccacggcctgctgctgccggcctcccctgtccgcatgcacagcagccgcttgcaccagatcaaacaagaagagggcatggacttgatcaaccgagagacggtccacgaacgggaggtgcagaccgcaatgcagataagccactcctgggaggaaagtttcagcctgagtgacaacgacgtggagaaatccgcctcccccaagcgcatcgatttcattcctgtgtcaccagcaccgtcacccactcggggaattgggaagcagtgtttttcgccatccttgcaaagttttgtaagtagcaacggattgcctccaagccctattcccagcccaacgacccgatttaccacccggagaagccagagccccatcaattgcattagaccaagtgttcttggaccattgaaaagaaaatgtgaaatggaaactgaatatcagccaaagagatttttccagggcatcaccaacatgctttcttctgacgttgcacagctgtcagatcctggtgtgtgtgtatcttcggatacccttgatggaaacagcagcagtgccggatcttcttgtaactcaccagcgaaagtcagcactaccaccgactctcctgtgtcacctgcccaagcggcttctccatttattccactagatgaactttcgtctaagtgattcactcatcctgagactttctttttgcagtggagagagagaataatctagttggggcaaacactgaactttgtcaattaatttgaggctatttcctatttgaccccttttcttttttgaaattccctgaaatgatgttattctagagaacttctatgtcaggttcctttggatacccttgaattcagtgtagtaatattttcagacgtttccccaataagtgtgttgaagcatacatctttacgctgctaatatgtctaaatacatatgttatcccttgatttttttaaataactgagagctctatttatttatgggattattaagttctgatgaaaatataaatgttgacttaatcagcatagtaaactgatgtttaaaattccatacttcatgcccacactaatttttaatgttattttcagtggttgccgatttccatttgatgaagaactatacagcttaaaaaaatacgttagttatatctatctagtggttgtctgttttacccaggaattcttggatatttagttttctgggtactgaagtggatgggagggggaatgattaaagaacaaattataaaaagtttgaacaaatctttttcaaattaagtatataaaagtaaacttttaagaaaaacctttttaaatggagattttaata

SEQ ID NO: 54549 - DNA, 826 bp, Homo sapiens
gatggacccttgggcgacttgaactgctcgtgggagcctcttggggacctgggagccccctccgagttacacctccatagccaaaagtaccgttccaacaaaacccaaactgtggcattggcaggcggacggagctgggtggccattcctcgggaacagttcactatgtatgacaaactccttgtctggggcactaaggcaggccatcctctctggccccccgtcttcgtgaacctagaaacccaaatgaagccaaacgccccccggctgggccctgacgtggactttaccgaggatgaccccctggaggccactgtcattgggccccacctacatggccatctcataaagttctgactgccagttccactaccgaagatgtcaggaggcggcctggaccctgctggaaccggagctgaagaccatacccctgacccctgttgagatccaagatttggagctagccactggctacaaagtgtatggccgctgccggatggagaaagaagaggatttgtggggcgagtggagccccattttgtccttccagacaccgccttctgctccaaaagatgtgtgggtatcagggaacctctgtgggacgcctggaggagaggaacctttgcttctatggaaggccccagggccctgtgtgcaggtgagctacaaagtctggttctgggttggaggtcgtgagctgagtccagaaggaattacctgctgctgctccctaattcccagtggggcggagtgggccagggtgtccgctgtcaacgccacaagctgggagcctctcaccaacctctctttggtctgcttggattca

SEQ ID NO: 54550 - DNA, 266 bp, Homo sapiens
tggaataattgcagggctaatcacccctggagactgctgggacccttctctaagggtctccaggtcctttcatttaatcctcatgacagtcactaacaataaagaagaaagtggtagatgctgagtgaggagctaagatatttgtccagagacacagcaagctgcatgtaattctggttcaaaattcttaggtctgcaaaaaaactgaaaaatgtctcttgtccctcccccaccttcctacaggaaggattttgtacaaaataaca

SEQ ID NO: 54551 - DNA, 1761 bp, Homo sapiens
  misc_feature (1)...(1761): n = a,t,c or g
atataaaattgtagatgactgtggtaaatgtgtaattatgtccattatgcttcaaagttgagttttcatctttgactccaaaatgtcagagggaggccgctctaaactaaaaataacgaaaggttgccaagtattaatactagttacctccctcttttcgtagtttttgtcatgtctgtcaacttactcgattgtgtggttgcattcagaatatttgaagtttcttacgtagacagaaataataaaaatattaactaggaaaaaacagtatagcaccaagccagtatttggtatctctctctagagcgagcaagagagggagagaggaggaaaaaatacacataatacaaacatacatgcatgcacacatacatacatatgtatacacacacataatttgaaaactgattggcacttcaacgatgctgaaattgtttttaaattgaagtttctttcttccacaaagcagccgtttctattcaaatggaaattcagtaccagagaataaatgtctatgtagtcatactgaatttagatagataagggctacagcatactaaatcgacaaccaaatttgtcatgtgactaaaccgttacttcagatgaagcttacattactgttttctgcttgtgtattttctgtagagtacttttacacagattggtaaagttcaggtttcagagaactgcttttgtgcagaaaatttaggttcttttttccacctttttggtcagtaaaacttaatgaaaaaagcaaagaaaaaaatattctgaacaaagctatagggttttaagttcagcctcccaacttagtcatcctaacatgattattttgtgatttggggtgcttgccctggtgctgttccagtccatgtgcatcctgagctgtgtgatctgcctcgaggctatgatctgagcaagcaggagataacattttcttctgcatcaagtgaggaaaaatgtgcttttggccatgtctcaaagacaggaccaacttcagattcccaaagaagccagctacagagcctctggaacactatggtcttacaagcagtactaaaatcaaccctcagcctcttcaatgccaaaggtatccctattggttgagaaccacatggtaatttttaatgggacttttatcagcaaatggagttacaggaattctctgtaatgagtgattctgaagaggtactttcctggaataattgtctacctgaagaaaaaaaatttatatatacattgtgtgtgtgtgtaatacacacacacacaaccccctatacctggaagattgtcagcatgtaaatcaggaacaactttctccttattgacaatcccataataaaactcaggaaccaaggcaaaatgaattggcttctaggggtctgaaccttactgcccatacaagtgttgattcattttaatgctgtttatgatttctgcattggcagaaattttcatactttctatgtttttttaattactcagttttttattactaaaaatagcacatttgagtacatttgaaaagtagaaaaattagaaattattaactttattgaataagcaagaagtgcatcctaatcctttgattattaatgaggttgaatatttgtgtgctatcggtagctgtgtttctttgatcagatgttcctgtccttttgcccttctgttatctgttggagttgctttgtttttcgtatcaagttataggatctctttatataataaatgtaatttaacttggcatttggcntggcattt

SEQ ID NO: 54552 - DNA, 1433 bp, Homo sapiens
  misc_feature (1)...(1433): n = a,t,c or g
aggaagcccacgacatagagaccaggcttaatgaggtggagaagctgctgaagacgatcataagnatgccctgtaaatattctagatcggaagttgtgctcaccttnttcgaaagatctcctctggatcaggtgttaaaaaatgataatgtgcataaaattcaacccagctttcaaagtccagtcaaaatatcagaaatcatgaggtccaatggattttgtttagcaaataccgaaacaatagttattgaccacagtataccaaatggaagagaccagcacctgggcgtggacccaacagagcatttatttgagaatggcagtgagtttccctcagagctggaggacggggacgacccagcagcctacgtcaccaacctgtcatattaccacctggtccccttcgagacagacatttgggactgaacctctctatcaggcctcccccgcctcagctgttcactgccagctctgatgctgtccactgtgctggcccccatggtcacagctgctgacccagctctggaactcccagacgtcccaggccccactgacgccaggaggcctgggtgtcctgcaagtggagcagcaggggctcctagtgggccaggctgaccgcagagtctccagcaagctggaggtcacagccggaggccacagggcctgtgttctgagggtcttcactccctgcttggtgcccacagggctgcgcactgccagggcagggacagttcctgtggggctcgctctcactgctactgcttcctgggaggtgcatccctcttggtgaagtggcctagtgccccccagccaccctgactccccaccattccctcccacggcaaacgcacaaaacgtcttgagggagattttgacaagtcacccattccaggtgccacaggcaggggatgtttagtaatccaggatttctctgagaactgggatatgtggcctttttttttttctttttatcttttatctggaaactgggtttgggtcaaccccaggagtatttgcagaaggcccagcacagtggggggtattggctgcagggcagggaaggcattgccgactagataaccgtgtgagcttggactgagcgttggtggttcttcccaaaggaaaggaatttcttcccggcctgccaggtctctgggccttcagcgcgggtcctggtgctgcggccacaccaccctggggtgctcattgacagagctgccataatgaacttgaaaggacgggaatcacgagggaagctggggctcccctgcccacaggagaggatccccgttcttcaagcttctctgctcagtgtctactaacgaccgacatttgctaatgtaaataatagtaaattattgagaattctaattcttttacacagtctgtttttaatctattttaattaaataaaatctatgactctaaaaaaaa

SEQ ID NO: 54553 - DNA, 2542 bp, Homo sapiens
accgccgcctcctgccctgcagccaccgccaccgcctgtgtcgccgccgcctcgggaccggctgtatgattaggccacaatcttcaatgagtaaacatattcctcaattctgtggtgttcttggtcacacatttatggagtttctgaagggcagtggagattactgccaggcacagcacgacctctatgcagacaagtgaactgtagaaactgattactgctccaccaagaagcccccataagagtggttatcctggacacagaagtgttgaattgaaatccacagagcattttacaagagttctgacctggatggggtaaacctcagtgcacttcttttctgttggcctcagtattactggattgaagaattgctgcttcttgttaggaggttcatttcacttatcattacttacaacttcatactcaaagcactgagaatttcaagtggagtatattgaagtagacttcagtttctttgcatcatttctgtattcaatttttttaattatttcataaccctattgagtgttttttaactaaattaacatggctcgaatgaaccgcccagctcctgtggaagtcacatacaagaacatgagatttcttattacacacaatccaaccaatgcgaccttaaacaaatttatagaggaacttaagaagtatggagttaccacaatagtaagagtatgtgaagcaacttatgacactactcttgtggagaaagaaggtatccatgttcttgattggccttttgatgatggtgcaccaccatccaaccagattgttgatgactggttaagtcttgtgaaaattaagtttcgtgaagaacctggttgttgtattgctgttcattgcgttgcaggccttgggagagctccagtacttgttgccctagcattaattgaaggtggaatgaaatacgaagatgcagtacaattcataagacaaaagcggcgtggagcttttaacagcaagcaacttctgtatttggagaagtatcgtcctaaaatgcggctgcgtttcaaagattccaacggtcatagaaacaactgttgcattcaataaaattggggtgcctaatgctactggaagtggaacttgagatagggcctaatttgttatacatattagccaacatgttggcttagtaagtctaatgaagcttccataggagtattgaaaggcagttttaccaggcctcaagctagacagatttggcaacctctgtatttgggttacagtcaacctatttggatacttggcaaaagattcttgctgtcagcatataaaatgtgcttgtcatttgtatcaattgacctttccccaaatcatgcagtattgagttatgacttgttaaatctattcccatgccagaatcttatcaatacataagaaatttaggaagattaggtgccaaaatacccagcacaatacttgtatatttttagtaccatacagaagtaaaatcccaggaactatgaacactagaccttatgtggtttattccttcaatcatttcaaacattgaaagtagggcctacatggttatttgcctgctcactttatgtttacatctcccacattcataccaatatacgtcaggtttgcttaaccattgattttttttttttttaccaagtcttacagtgattattttacgtgtttccatgtatctcactttgtgctgtattaaaaaaacctccattttgaaaatctacgttgtacagaagcacatgtctttaatgtcttcagacaaaaaagccttacattaatttaatgtttgcactctgaggtgcaacttaacagggagggcctgagaaaagaatgggagggggctattaattatttttagcaaaatgttgcctttgtcttgtgcaaacatgtagaatatgctctttaatttagtaaaatatttttttaaaaggtagagatgctttgttattgtaatcataaacttcctgaaattcttgtaatttttttcccatacttatcagaagtgtgtttaccaacttatttttgtttgaaagtgtgattttttttttccttcccaacctctcttgcaaaaaaagaaatgggtttctgctaatgaattgagcagacatctaatattttatatgccttttgagctgtgtaacttaatatttggatacttgacaatttgttttattatgtaattgataaaatggtgatgtgtattaatgttagttcaaccatatatttatactgtctggggatgtgtggttatagttctgtgggagaaataattttgtcagtgttcaccagcttgtaaaaacttagtgcgagagctgaaacatctaaataaataatgacatgcatttatcatcattgagattggtttgcttaaaattaacttattttgtagaagacaaaatgaattgcacttcacttaatgtgtgtcctcatctttttacaaataaatgaaggattataaatgatgtcagcattttagtaaacttttagacaaaatttgttagggtcattcatgaaaactttaatactaaaagcactttccatt

SEQ ID NO: 54554 - DNA, 410 bp, Homo sapiens
cctctgtttacgaatgtttgggcgcgaattactctaagcgcggctctcagaagggtgcaagaagaatcagtggttagaaacacagtgaaaaaaaataaaaatcatctgaaagatctgtcttctgaaggacaaacaaagcacactaacctaaaacacggaaagacagcagccagcaagagaaaaacctggcaacctctgtcaaagagtaccagagaccatttgcaaactatgatggaatcagtaataatgacaattttgagtaacagtattaaagaaaaagaagaaatacaataccatctcaacttcctgaagaaaagattgctacaacagtgtgaaactctgaaagtccctcccaaaaagatggaagatttaactaatgtatcaagtctactgaatatggaaagggcacg

SEQ ID NO: 54555 - DNA, 516 bp, Homo sapiens
  misc_feature (1)...(516): n = a,t,c or g
catgaaagaaaccctgcggataanaaggttaggcgagccagaggattgtgctggcatcgtgtctttcctgtgctctgaagatgccagctacatcactggggaaacagtggtggtgggtggaggaaccccgtcccgcctttgaggaccgggagacagcccacaggccagagttgggctctagctcctggtgctgttcctgcattcacccactggcctttcccacctctgctcaccttactgttcacctcatcaaatcagttttgccctgtgaaaagatccagccttccctgccgtcaaggtggcgtcttactcgggattcctgctgttgttcctgagaacacaggacaggcctgctgacaaggctgagtctaccttggcaaagaccaagatattttttcctgggccactggggaatctgaggggtgatgggagagaaggaacctggagtggaaggagcagagttgcaaattancagcttgcnaatnggtgcggnttttaaaagangggncctcaaaa

SEQ ID NO: 54556 - DNA, 1033 bp, Homo sapiens
ttttagatgttcctcagttaattgtttaggcctcgggcttctaaagatctcagccaaaatacacagtaaacgcccgttggggccaaataatgttaactgcattgttctagttgcttctgaggaggaaagctctactgaggagctgtcatggagttaggaataggaagactttggggagtggacacttagctgcagtccctttccccaaatctgttctttggagggaacaaaacaatcacaagagtatgttctaaatccaaaaaaactttaaatttttgtatgttgaaagaaggaaaatatgaccatttgtatatggcattttctgggtgctggctactgttgcaggtttatttcatatagttgataagttatgttaatatttaacagttataaagttagctttagttaactaaagttagcttttccagaatattttcttgaacttttacgttggagtcaggttttagtttaagccactgtgtattatttcaaagtgtaactacagtggtatttttgagtgaagatctgtaattctagtatgagtcgtatcacttagccacgaaatatatttttaatataattggatttggagtgacccatgtttcattagttgtagtgatttaaaagttaactgtttatgttgggtgaactagatatctttgctaataaacatccttccttttttaagggtggagagattcaaccagttagcgtgaaagttggagataaagttcttctcccagaatatggaggcaccaaagtagttctagatgacaaggtgtgtaaacttaataattctaaaaagaagtcagatatttgcaattagttgtcttaactaatggtttttttcacttgcaggattatttcctatttagagatggtgacattcttggaaagtacgtagactgaaataagtcactattgaaatggcatcaacatgatgctgcccattccactgaagttctgaaatctttcgtcatgtaaataatttccatatttctcttttataataaactaatgataactaatgaca

SEQ ID NO: 54557 - DNA, 677 bp, Homo sapiens
tttcgaattttaggatgatttttatttacaaaacagattggtacttttgttttacaaaaattacaaaaaatgactcttaaaaatagaaatagcttctcagactcttgggaactacttttaagcaaccaaggagttagaactcagatggttttcttctttgtaacagcaacaatgaccacggctctgtgccatggcaatcactgctgagtgtcttctcctacaattacacaggcccgagctgtgtctggtggaaaggtctccactcaggtcagagtctgaaggagcaagatcttctcattaatgcagaacctgtgcagaaccaccatcagattctctccacagcgggagacctggcgctccatggccaggcgaaagtcctccttcacgcctttggtgatgcctcgagttacagtgtggtgcctgtcagcagtctgtatgctgggctgaagcacaggtaagaattcctgctgcagtaaccccatgggagggctagaaggcttgatcagcattccttgattgggtagtaattccagatgaattttcccaccttcctgagttctcaagtaggcaaattcctccagcatatcaatatttgtaacgtaattgaaaaaattctcatattggaaatttccttgttggcaaattttattgacagctttcaggaaaagattctcgcc

SEQ ID NO: 54558 - DNA, 405 bp, Homo sapiens
cccacgcgtgcgggagaatagatggttttgtgaaaaattaaacaccgccctgaagaggagccccgctgggcagcggcaggagcgcagagtgctggcccaggtgctgcagaggtggcgcctccccggcccgggacggtagccccgggcgccaacggcatgacagactcggcgacagctaacggggacgacagggaccccgagatcgagctctttgtgaaggctggaatcgatggagaaagcatcggcaactgtcctttctctcagcgcctcttcatgatcctctggctgaaaggagtcgtgttcaatgtcaccactgtggatctgaaaagaaagccagctgacctgcacaacctagcccccggaacgcatccgccctttctggccttcaactggtacgtgaagaca

SEQ ID NO: 54559 - DNA, 384 bp, Homo sapiens
ggaatggggcaactgtggagcctgacttacttcttttaattgggtttttattcagaagggaggggcaggagggaatgacaagtgactcaccttgaattcttcctctaagaaactcacacctgagctttgagctataaagaaatctgatgctgtttctggtgctgtcttagaatcacttcaggagtattgacaagaggggtaggaacccttagaaataatattagtgataaataagaaggcaggaagaaacttttggaggtgatggataggtttatggtatagattgtggggatgatttaatgagtgtatgcctatccccagactcatcaaagtgtatacatggaatatgtaaagcttttatatgtcagtcacacctcagtaaag

SEQ ID NO: 54560 - DNA, 671 bp, Homo sapiens
atgagactgtgtctcaaaaaataaaaaataaaaataaaaaacaatgtattactcgatcacaatattttgatgattatatttcaaaataactactttctttgtaatctattggatgcaatttaaagcactattctgaaaaggctttaccagactgcccgcggtcactggctccaaagagtaaatgtcgcccactgctgggtggataaatggaaggccaggagcatccgggctctaaaggcagcggcatggaggtgcccaaggaggcccttcctgtatccctgccccaccctccttctcaaggggtgtctgggcctctttagtgcagggttggcgtctctctgacattgttttctctccttgcagctgaactcgtttgagcagctgtgcatcaattacaccaatgagaagctgcagcagctcttcaaccacaccatgttcatccttggagcaggaggagtaccagcgcgagggcatcgagtggaacttcatcgactttggcctcgacctgcagccctgcatcgacctcattgagaagccagcaggccccccgggcattctggccctgctggacgaggagtgctggttccccaaagccaccgacaagagcttcgtggagaaggtgatgcaggagcagggcacccaccccaagttccagaagcccaagcagcttg

SEQ ID NO: 54561 - DNA, 931 bp, Homo sapiens
cggacgcgtgggttttataaaaaacccagtctttgctgaccagacaaagcataccagatctcaccagagagtcctaggggactacagaaggaaaaagacaagaggcagtaggatatctgtgtgtcctcccgctgaccacacttcctttagtgacccgattgcctcctcaagtcgcagacactatgctgcctcccatggccctgcccagtgtgtcctggatgctgctttcctgcctcattctcctgtgtcaggttcaaggtgaagaaacccagaaggaactgccctctccacggatcagctgtcccaaaggctccaaggcctatggctccccctgctatgccttgtttttgtcaccaaaatcctggatggatgcagatctggcttgccagaagcggccctctggaaaactggtgtctgtgctcagtggggctgagggatccttcgtgtcctccctggtgaggagcattagtaacagctactcatacatctggattgggctccatgaccccacacagggcaccgagcccaatggagaaggttgggagtggagtagcagtgatgtgatgaattactttgcatgggagagaaatccctccaccatctcaagccccggccactgtgcgagcctgtcgagaagcacagcatttctgaggtggaaagattataactgtaatgtgaggttaccctatgtctgcaagttcactgactagtgcaggagggaagtcagcagcctgtgtttggtgtgcaactcatcatgggcatgagaccagtgtgaggactcaccctggaagagaatattcgcttaattcccccaacctgaccacctcattcttatctttcttctgtttcttcctccccgctgtcatttcagtctcttcattttgtcatacggcctaaggctttaaagagcaataaaatttttagtctgcaa

SEQ ID NO: 54562 - DNA, 433 bp, Homo sapiens
cggagccggggctgcggggcgagttgtcggccctgggccgggagctggagtcccagactcataggtcccggcccagcccccgaagagccgcctcagccggggggagttgctcggactcaaacgtccagtcctcgtgcgaccgcgctgggtcggaagtgagcaggctgaggccaccatggagcagtgtgcgtgcgtggagagagagctggacaaggtcctgcagaagttcctgacctacgggcagcactgtgagcggagcctggaggagctgctgcactacgtgggccagctgcgggctgagctggccagctcagccctccaggggacccctctctcagccaccctctctttggtgatgtcacaagtgctgccggaagatcaaagatacggtgcagaaactggcttcggaccataaggacattcacagcagtgt

SEQ ID NO: 54563 - DNA, 380 bp, Homo sapiens
ggaacccaggagagcatggccacgctgcgccggcttcgggaggcgccgcggcacttactggtttgcgagaaatccaacttcggcaaccacaagtcgcgccaccggcatcttgtgcagacgcactactataactacagggtttcatttctcattcctgaatgtgggatactatcggaagaactgaaaaacctggtcatgaacactggaccctattactttgtgaagaatttacctcttcatgaattaattacacctgaattcatcagtacctttataaagaaaggttcttgctatgcactaacatacaatacacatattgatgaagataatactgttgccctgctaccaaatgggaaattaattttgcactggataaagac

SEQ ID NO: 54564 - DNA, 437 bp, Homo sapiens
tctggttccgccatggaatccaacaaggatgaagctgagcgctgtatcagcatcgccctcaaggccatccagagcaaccagcccgaccgggcgctccgcttcctggagaaggcacagcggctgtatccgacgccgcgagttcgcgccctgattgagtccctcaaccagaaaccacagactgccggtgaccaacccccacccacagacacaacccatgccacccacaggaaagcaggtgggaccgatgccccctcggccaacggtgaagctggaggagagagcaccaaaggctacactgcagaacaggttgcagctgtgaaaagggtcaagcaatgtaaagattactatgagatcctgggggtgagcagaggggcctcggatgaggacctgaagaaggcctaccgcagactggccctcaaattccacccagacaagaa

SEQ ID NO: 54565 - DNA, 328 bp, Homo sapiens
gaagagaggaagggctttttctgaagttcatagtgaatccatggaaacattaatccccagtcatgcttgccatccatacagtgctgctgcattcccagcctcctctcacgatgcctcatgaagggcaagtgaaatgagccagaaaagagcccattttatagatgagaataagaagttcagaagaacgcagacttgttcaaatttgtaaaggaaaacactggttttccttatcccattataactcatggccacttgggctcagtagattctcagagagtagattttatgacattaagagctcagaaaaatgacttaaaatggaatcaaa

SEQ ID NO: 54566 - DNA, 1752 bp, Homo sapiens
  misc_feature (1)...(1752): n = a,t,c or g
aaatattcatacaagcactcctcgtaatcctggatcaacaaatcacataccttttctggaggaatcaccttgtggaagccaaatctcttcagaacattcggtcattaagccacctcttggagattctccagggagtctttcaaggtcgaaaggggaagaggatgacaaatcaaaaaagcagtttgtttgtattaatatcctagaagacacacaagctgttagagcagtggcttttcatccagctggaggtttatatgctgttggttcaaattcaaaaactctgagagtatgtgcctatccagatgtaattgatccaagtgcacatgagactcctaagcagccggtggtacgttttaaaaggaataaacatcataaaggatccatttactgtgtggcctggagtcctgtgggcagttattagcaacaggatcaaatgacaaatacgtcaaagtgctgcccttcaatgcagagacttgtaacgcaacaggaccagatctggaatttagtatgcatgatggaacaattagagacttggcatttatggaaggcccagaaagcggaggagctattttaataagtgctggagcaggggattgtaacatttatacaaccgattgtcaaagaggacagggcctccatgctttgagtggacatactgggcatattttagcactttatacctggagtggctggatgattgcatctggttcccaagataagactgttagattttgggatcttcgagtaccaagttgtgttcgtgttgttggcacaacatttcatggaactggcagtgcagtggcatctgtagctgtagatcccagtggtcgtctcttagccacaggtcaagaagattctagctgcatgttgtatgacataagaggaggaagaatggtacaaagttatcatcctcattccagtgatgttcgctctgttcgattctcccctggagctcactacttgctaacaggctcttatgatatgaaaataaaggtgacagacctacaaggggacctcaccaagcagcttcctatcatggtggtgggggagcacaaggacaaagtgattcagtgcagatggcacacccaggatctttccttcctgtcatcctctgcagatagaactgtcaccctctggacttacaatgggtagagcacaccgcatgtcagtctatgcaggcaaaagcacagagacttaagactactgagttgtgaaaattacaaatctgaagaacatagtgtccaggaaagtggtttagcacgaagaggccccttattaccatgtatcccactgataggaggtgttgggtggtgttattccgcagtgctttcagtcttccatgtgagctcgtgctgctgtgacctgctatatgtagtctcgttgccaaagtctgcagaagagctcttcagttgttggtgtgcactccaagtcaggatggacaatgtgtttacggtttagtattcaatgcattccttggtctttgcctaaataacagttttatatgcacattgaaatggaattatacttcaactatattattaaatgtaatgcaaccaagttcctcccagattaaacttcccaggtgttcagaattacttttgctcttctcacgatcccatattgtattatcacttgtcttctagaggtcagaattccataatatatgtcactcaaaagttacatggttgcttcacttaaggtcattatggagtttaaagntggatgaaaactncttcttagtttnctacatgg

SEQ ID NO: 54567 - DNA, 1692 bp, Homo sapiens
cgctatcggaggccgcgcgggtggctgagcagcggcctggtgcgctcgcttagcgggcgacggaatcagacggacgtggacgcccccggagtggaagccgaagcaggagttgttgttgctgaggggctgccgcagccgccgcgagcctccggacagacgccagagcgaggagggcgctacgcgacttggcaagatgacccagttcctgccgcccaaccttctggccctctttgccccccgtgaccctattccatacctgccacccctggagaaactgccacatgaaaaacaccacaatcaaccttattgtggcattgcgccgtacattcgagagtttgaggaccctcgagatgcccctcctccaactcgtgctgaaacccgagaggagcgcatggagaggaaaagacgggaaaagattgagcggcgacagcaagaagtggagacagagcttaaaatgtgggaccctcacaatgatcccaatgctcagggggatgccttcaagactctcttcgtggcgagagtgaattatgacacaacagaatccaagctccggagagagtttgaggtgtacggacctatcaaaagaatacacatggtctacagtaagcggtcaggaaagccccgtggctatgccttcatcgagtacgaacacgagcgagacatgcactccgcttacaaacacgcagatggcaagaagattgatggcaggagggtccttgtggacgtggagaggggccgaaccgtgaagggctggaggccccggcggctaggaggaggcctcggtggtaccagaagaggaggggctgatgtgaacatccggcattcaggccgcgatgacacctcccgctacgatgagaggcccggcccctccccgcttccgcacagggaccgggaccgggaccgtgagcgggagcgcagagagcggagccgggagcgagacaaggagcgagaacggcgacgctcccgctcccgggaccggcggaggcgctcacggagtcgcgacaaggaggagcggaggcgctccagggagcggagcaaggacaaggaccgggaccggaagcggcgaagcagccggagtcgggagcgggcccggcgggagcgggagcgcaaggaggagctgcgtggcggcggtggcgacatggcggagccctccgaggcgggtgacgcgccccctgatgatgggcctccaggggagctcgggcctgacggccctgacggtccagaggaaaagggccgggatcgtgaccgggagcgacggcggagccaccggagcgagcgcgagcggcgccgggaccgggatcgtgaccgtgaccgtgaccgcgagcacaaacggggggagcggggcagtgagcggggcagggatgaggcccgaggtgggggcggtggccaggacaacgggctggagggtctgggcaacgacagccgagacatgtacatggagtctgagggcggcgacggctacctggctccggagaatgggtatttgatgcgaggctgcgccggagtgaagaggtcgtcctctccatctgctgtgtttggacgcgttcctgcccagccccttgctgtcatcccctcccccaaccttggccacttgagtttgtcctccaagggtaggtgtctcatttgttctggccccttggatttaaaaataaaattaatttcctgttgataaaaaaaaaaaaaaaaaaaacc

SEQ ID NO: 54568 - DNA, 305 bp, Homo sapiens
gctcttgcctttcctgtaaaattcactctcactaaggtgttgatgacttaatggcttacctttccctgcacatgtgcattttaagaaagcctaaagtgaagaaggggaaagtgtggctaggcacctttacaaagcatctagctccctcccccatcctcccccttcctcaactcttatagatagaagaataggtaaaggtccacgaaggtgggtgctagacctagagcctatggtcaataatggtggacagtggggggttaggacatccaatatggttttctccacttcgtcaccagtttttctgc

SEQ ID NO: 54569 - DNA, 821 bp, Homo sapiens
cagaactttagggaaaatggctgtggcttagcttttcagctgatgcagggtaataagctttctggttggttttccttccaattctggaaaggtgtccacactaagacccttaactctagggcttgcataagtattctagcatcgttagctaatgagttggtcattgtttctctttatcaataattgtgttaataccaatcttataatttaaaaattatcttgtatgtaagagaagttcggggttagggaggaagaggagcaaagtgggatattttctctttaatgcttagatactgtttcttccctaagatgtgtttctcaaccacaattggtggaatgaaccagagaggcaagaggaagtgaattgcaccaatttagtttagcgactgtgccttttgcaggaaaaactgggtgaatcacagctcctcagagtcctggactcaactagaattgaagatagacttattttgctgactgggcttcttagagtttatgtgacttgaacagcttggcccctgcctcccttctgctactgtgagcagccttccttcttccttcattcttcctggaatgcagttctcttgcttatgatcctatgaataaggcaaaatggctggtctttgtaaggcaggcttgccctagcttctcagaaacaggagcattttaggatcagtattaggagatgccccagggagtaagaaagtattgggttcagtgataaatctggactctgacacttcttttactctccctctttaatactaaaagctctgcataagcaatggttcagaacctgtcttgggtacagacctgttgaatct

SEQ ID NO: 54570 - DNA, 569 bp, Homo sapiens
ccatagttttatttatattacatattattacataaaacgctagtttgagagacttagaacattcacttttatcatatatgaatttgataatcctccttttattcaatattaaactttaaaatttgtaccacattattaaagtattacttttactcacagtagtattatacatagacttaacacaatttttaaaaatgtgtttacttaaaacaatataattctcctttacaaaagcaactttatataaaatgtttggcttaagactgtcattgctattatgcctttgaatgaaattccactctttcgcctccattgtccagaaacaggcacatatcagcttgttttctttaatgaatattctgtaacaagttcctgaagttttctaattctttcacacttgtagaaattcttccaaatgcgttgaataatgatactatttcttgtctggttagatggaattcataactaggtccactttctggcatatttgctatcaatttctcagaaaataagatcttcagagcagtgcccaaaccctgagtctgaagctttccccacagacgacattt

SEQ ID NO: 54571 - DNA, 1278 bp, Homo sapiens
  misc_feature (1)...(1278): n = a,t,c or g
tttctgttttttttcctgtttgatagctgtcagttatagtgattggtatttaatacaaaaaaaaccaaagatatgaaaattgttctatattttaatctgcaaattgctccattaggcagatttaattatttgtggatttacttatggtgcttccagatatcttgtacctcttaatgtgaccatcagaaaacttgactgagaaacatttgtactatacaaaatacaaaatgctttcagtatattattgcaagtgcttcttaaaaacatatagtattgttaaatgtgtactttttaatgttgtcttgtttaaattggaaaattaaccaaatgttatccatttaaacatgctttataacatattaaatgtgagtgcttaataagtacttttaatgatactggtacgggtgttggaacccagtcctagtcaagagtctaaatcttcatctctgtttttcagacaaatgtagtaggacattctttaggatgtacttggcattccttgaggaattctcctggtgaaaagatcaacttactgaaaagaagcctccttagtattccaaatacagattacatccagctgcttagtgaaattgccaaggaacaaggttttaatataacatatttggatataggtatgatttttttttctttggctttcccaagacatgtttatttaaaaatgtgtttgaggaacaaaaatgtgtttgaggaataaaaatttctattacaatttattttattgatcagggattctaagtatatataattactaggccagtaatatatataattgatatgtcccattcttgtggatagtaataatagctaacatctatacagttataacaaaaacaacaatagcaaagatagagttttactgtgtgccagacactgttctaagattacacgtatctacttactgaatcctcagactaactctatgaagcaaattctggttatccttatttataagtaaaggaagaaaggcaccngaaatgttgagaaacttgcccaagattcacatagctagtcagcggtagagccagatttggggaagagtcccagaagataccctggctgttaaactagccctgctgggcaaatgaaaaggcacctacatttctagcacaagtacaagtttgtggtgcccagaccttttctctctactttgtcactgtatgctgattctgggaggtaaatggaaccaagtcaatttatagttttatcccatctcagccatcatcatctgtattttctctagcccttaatcatttggat

SEQ ID NO: 54572 - DNA, 1882 bp, Homo sapiens
tatctgggcgttggcgtacctttctcggggtgtctgcgtaactgcccagacttgccttggtttggtcagatgacacctcctctgggactggctagccagcgttcatgtctacattattgatctcgtcttccgatgccttattggaggaactggaacgctccacccttcaggacagtgatgaatattccaacccagctcctcttcccctggatcagcattccagaaaggagactaaccttgatgagacttcggagatcctttctattcaggataacacaagtcccttgccggcgcagctcgtgtatactaccaatatccaggagctcaatgtctacagtgaagcccaagagccaaaggaatcaccaccaccttctaaaacgtcagcagctgctcagttggatgagctcatggctcacctgactgagatgcaggccaaggttgcagtgagagcagatgctggcaagaagcacttaccagacaagcaggatcacaaggcctccctggactcaatgcttgggggtctggagcaggaattgcaggaccttggcattgccacagtgcccaagggccattgtgcatcctgccagaaaccgattgctgggaaggtgatccatgctctagggcaatcatggcatcctgagcattttgtctgtactcattgcaaagaagagattggctccagtcccttctttgagcggagtggcttggcctactgccccaacgactaccaccaacttttttctccacgctgtgcttactgcgctgctcccatcctggataaagtgctgacagcaaatgaaccagacctggcacccagagcacttcttctgctctcactgcggagaggtgtttggtgcagaaggctttcatgagaaggacaagaagccatattgccgaaaggatttcttagccatgttctcacccaagtgtggtggctgcaatcgcccagtgttggaaaactacctttcagccatggacactgtctggcacccagagtgctttgtttgtggggactgcttcaccagtttttctactggctccttctttgaactggatggacgtccattctgtgagctccattaccatcaccgccggggaacgctctgccatgggtgtgggcagcccatcactggccgttgtatcagtgccatggggtacaagttccatcctgagcactttgtgtgtgctttctgcctgacacagttgtcgaagggcattttcagggagcagaatgacaagacctattgtcaaccttgcttcaataagctcttcccactgtaatgccaactgatccatagcctcttcagattccttataaaatttaaaccaagagaggagaggaaagggtaaattttctgttactgaccttctgcttaatagtcttatagaaaaaggaaaggtgatgagcaaataaaggaacttctagactttacatgactaggctgataatcttattttttaggcttctatacagttaattctataaattctctttctcccctctcttctccaatcaagcacttggagttagatctaggtccttctatctcgtccctctacagatgtattttccacttgcataattcatgccaacactggttttcttaggtttctccattttcacctctagtgatggccctactcatatcttctctaatttggtcctgatacttgtttcttttcacgttttcccatttccctgtggctcactgtcttacaatcactgctgtggaatcatgataccacttttagctctttgcatcttccttcagtgtatttttgtttttcaagaggaagtagattttaactggacaactttgagtactgacatcattgataaataaactggcttgtggtttcaataaaaaaaaaaaaaaaaaaa

SEQ ID NO: 54573 - DNA, 601 bp, Homo sapiens
  misc_feature (1)...(601): n = a,t,c or g
gggcggggccggtgaaggaccgcgaggccttccagaggctcaacttcctgtaccaggccgcccattgtgtccttgcccaggaccccgagaaccaggcgctggcgaggttttactgctacactgagaggaccattgcgaagcggctcgtcttgcggcggtgagacagccacggggcgggcggcgggcgggacgcgggaggaacgcgagagggagcgcgggcgccagaccactatcctcctccgcccccagggatccctcggtgaagaggactctctgtcgaggctgctcttccctcctcgtcccgggcctcacctgcacccagcgccagagacgctgcaggggacagcgctggaccgtacagacctgcctaacatgccagccgcagccaacgcttcctcaatgatcccgggcatttactctggggagacaggcctgaggccagctcgggagccaagcagattccaaaccactacaacccttgccaaacacagcccactccatttnanaccgccttcctgaggagaaaatgcagactcagggttccagtaaccagtgatggattcaccccatctcccaaataatggtttacttgttttacaaa

SEQ ID NO: 54574 - DNA, 825 bp, Homo sapiens
  misc_feature (1)...(825): n = a,t,c or g
cggtggcggaggctgaggagaaggaggagcgggccgtggaggcttcgccgcctaggtactgctataaccagaatttggtagaaaaaggatttacttgttggggccctcttgataaaaagagatgtggggggattctcgacctgctaacagaactggaccttttcgggaactctaatgatccaggacaaagaagttaccctggagtatgtatcaagcctggatttttggtactgcaaacgatgtaaggcaaacattggtgggcaccgatcttcctgttcattctgcaagaacccaagagaagtgacagaggccaagcaagaattaataacctaccctcagcctcagaaaacatccataccagcaccattggaaaaacagcccaaccagcccctaagaccagctgataaggaacctgaacccaggaagagggaagaaggccaagagtcacgcttaggacatcaaaagagagaagcagaaaggtatctgcctccttctcgaagggaagggccaactttccgaagagaccgagagagggagtcatggtctggagagacacgccaggatggagagagcaaaactatcatgctaaagcgtatctatcgttccacaccacctgaggtgatagtggaagtgctggngccctatgtccgccttactactgncaacgtccgtatcatcaagnacagaacanggccctatggggcatacctatggctttattgacctcgactcccatgcggaagctcttcgtgtggtgaagatcttacagaaccttgatccgccatttagcattnatgggaagatggtagctgtaaacctggncac

SEQ ID NO: 54575 - DNA, 1463 bp, Homo sapiens
tttttttttttttttttttcacattgaaaaaaagtttatttaaaaaagttctagcagcaagaacagtaacaaaagaaaaggagagacaaacaaaacaagagggaggttgtatcccatggaacttgtctcctttcttaatcgagttctttatatcgagcaaacatgactcttcgaacagcatctcggtaagtctcgttggactgtcttttgctggttcttcctgaggctccaacactggggcccctcatccggccttcagcctcctctgatgaagccaatccaggatggccatatcccaggcctgtccctttcctccagccagtagcctgttggacacagcctcctttgctgctagtgtcgatatcttctttatcaacaagtttacgatcactgtcagtttccctggagtacttaatccgtttcctttctggagagtcaaaagactggagcttttccctgcgatcatttcctcttcctttaaactttccctctcgttctctcctttccagataggctagctcctgctcagactgttttatcttccggtggatttccaggttttgcttgtgcaggtctgacagctgctggtgtttgatcagaacttctttattgggaaactgccttctgcaaagcagacaagccagtttattccagtcagtgagtttgtcttcttcattctccttcttggtttgctcctctcgcttctggggctgtgctgtgcggggctgtgggggaggggtctgttcctcctcttcttcctcctcatagtcactgtctcctccatattcacccaagaggccgatcagtgggtttaccactttaggtggagggggactctcttccttcttcacagtaggaggcaggggcttcttaaagacgtcttctgcaggggccttcccttcactggcattttcctgaaacctcgtcactcctctgtcttttttctccttgccatctcttttagacatttccttcttgctacttgactttccttgactggtgggttttttttccttaatctcttcttcctcaggtaatcccgggatccctggggcacttggaccttcttgctgcgatacagttggaaaccaagtaagtctacagaatgtttcagtttcccagcaattccaggtctaaggcgcacgagttcccttttaggggaagaaacaacttttttacttacaagtctaagaagagtccacatcaatctaaaaacccactccagggaccaggacacattcagaccacccactgtccactttttcaagagcaacactgttcttacctgtattgccacaaggcactgattttccatataggcaacagttctgtttccatagatctaaacttttccacttttcatgcaatgagcatccagagaatccagggaataaaatcctcaagtagcaaattatgggtgcttttctcaaaagaatcattgacagaggtaaaaaaaaaaaaaa

SEQ ID NO: 54576 - DNA, 317 bp, Homo sapiens
ctgcttccagctttgtaagacaggttttgcctgtcttacaaagctggaagcagacattatcagggctttcctacatgatgaacttcaaagaagaaggaaataaaacaatggaatattctgatgcctgctcagattttattttaccatatataatataacccttatttatagaagccctcaacttcaactctgagcaattctccaaaaagatacttctaccctcccaatatctgcatagacattcaacggaactctaaaacaacaaaaactacttctactggtgtgttattttattgctgagatgcttggaaaacaat

SEQ ID NO: 54577 - DNA, 316 bp, Homo sapiens
tactcttcaagcatgaatcctaatttccctgactatatcttacctctgatctccataactgatggattcctatcctagactatgttactctaatattacccaagattttctccagcctgtttttactctcactttgaaacagctgtttaaaatgactcgtaatctgcttaaatctacatgctttttgtggttctcaatccagttacctaccttccagataattccctcactgtcctgtcctctccattcctctgatgtttaagccctgtgagccacctttcccccatcctttgtgcatagttaccattttactctt

SEQ ID NO: 54578 - DNA, 354 bp, Homo sapiens
aacaaatctcaggtcccctagatgtttcttccataattgttactatgcttctcatatgtttcatcctaccttctacttttgtcagcccatctgagtttatttcaacagccaaatgttttattttgaaatgattccaggcttccattaaagtttcatcaatagtataaggactgccatttacccttcacccagattcataaactgctaacattgcacaattgctttgtcattctgtgtgtgtgtgtacaggaatcacagagactcatcttgtaatgtttgtaatgtccatgtatcgtgtatgcacacatttttttctgacctattagaagcaaattacagagctaataccccttt

SEQ ID NO: 54579 - DNA, 331 bp, Homo sapiens
tggtatgcctcattatagcctggcaagggtggaaaccaggctctcccaactggctttgttggtggggtgggtgtggggtcataatttttttctgtggtgtttggctggagtagagtagttagtgtgttttctttttgctaggtgcccctttcctggtcctctggctagacagagtaggcttttcttatctgcgcctgttggcatttctgactcactgggtttcttcagcaatgagtctgggacatacgtggcaaaaacaaacccaggaaactcacaaccatgtcattccttgggtcttgaggtccctagctagtctgccttttctaccttc

SEQ ID NO: 54580 - DNA, 430 bp, Homo sapiens
ggatctttctttttagaccaagtgttttggggatgtcttcagtgattagtattgcttggtggtctagatttagagcctcagaattcacttaagtgagaaagtgcaagagacccactggaatcttgggagtgggatccaggtatcagcactttatttcaaggtccctagatgattctaatgtgtaaatgaggttgagagccattgcccagtagactagatttggaagcactggaaatttagtcctgtaagacacatgctcaccagtcctccttcttcctttcttggcccctctcctgggcaggggaccatttattcattcactcactcatacattcattcactcactcactcactcattcactcactcatacattcactcactcaacaggtactcaatagcatctgctatgactaatttgggactagaaat

SEQ ID NO: 54581 - DNA, 215 bp, Homo sapiens
aacggccaagtcacaacacaggcagagactggagtgattcatccacaagtcaagtgacaccagggatggccagctaccaccggaagctggaagagtcagaaagggtctccccaaaagcccccaaaggaagctggacctgcttgagcttcgacttccagactccagaactgtgagagcagcagctcctcttgcccggcgcggtggctcacgcctgt

SEQ ID NO: 54582 - DNA, 143 bp, Homo sapiens
gcggcacgagtgatagtgagtgagttatcagaatatccgatggtttaaaattgtggcacttccccctttgctctttctgtctcctgccaccatgtaagatgtgccttgcttctcctttgtcttccataatgattgtaagttcc

SEQ ID NO: 54583 - DNA, 439 bp, Homo sapiens
agccgcggagccgcccttgagaggggctgcggccggagcgggcggctgagacaaaggcgacgatagggccagatttgagtgtgtgaatttttgagtgaaacctggaacccaaatgagaagaaatctgcaaggaataactactgacagtgaatctgcggtcatctgtatgcataatatggaatgttcttaacccagaagtagctgaatgtgttactccattgctgaggagtgactatctgttatagtccctgggtcaagacaacaatttttataccttcgtcgtggttcagaaaggagtctctgtagaaccagaagcaaagaaaggaaacaatccaaatttttctttattaaatcgactgtgtaagatacttgacttccaggaacaaaaacacggtgaaataataaaatttcatcttggcatcactggacatcatcgtat

SEQ ID NO: 54584 - DNA, 352 bp, Homo sapiens
agaaaatcgaaatgatgacatttggcttgtagatttttatgcgccatggtgtggccattgtaaaaagctggaaccaatttggaatgaagttggtcttgagatgaaaagcattggttctccagttaaggttggaaagatggatgctacttcctattctagcattgcttcagagtttggagttcgaggttatccaacaattaagctattaaaaggggacttggcatataattatagaggaccacgaacaaaagatgatattattgagtttgctcacagagtatctggggctctaattcggccacttccaagtcaacaaatgtttgaacatatgcagaagagacaccgtgtattt

SEQ ID NO: 54585 - DNA, 702 bp, Homo sapiens
tccattatgactggtttccttataggaaggggaggcttggacacggagatagatctgcacagagggaagacactgtggagacacacagagggaatgccatgtgaagatggaggactggaatgatgcatctagaagccaaggaacacctgaggctcccagaagccaggagggaggcgtggacagctccttccctagcactttcaggagaatggccttggtcaacaccttgattttgaacttctggcctccagaactgagagacaatgagtttttgttggtttaaacaatccagtttgtactgactttgctgacagcagccctaggaaatgaacacaggctccttccagtgatgaaaacctatgctgttggtaagaaacaatagtacagcctgggttaaaaatggcacagtggtttaatctctagaatctcagacaacagatttgaggtattcattcctataggatctggctgtgcttcctacactgaccaaaaaagattcatgtgttcagatacaacaaagctagctttctaacttactaacttacaatgtatatgcatatgcacatgcctgtgtgtttcccgccatgtatttattcttcatgcttggttttctagcattttcaagtttgcagtaaaaggttcaatacacatttatttctctagtctgcagtggagcaggtaacatatcctaaggagacaaga

SEQ ID NO: 54586 - DNA, 366 bp, Homo sapiens
gtaaaataagaataataacatctgtgttggctgggatgttgtgagtgtttgtggagataatagtacaaatgaaattactgagggacaatggtgaagatagggccatatcatggagcttacactagtgatggaaggagatgggagatacaaaagcaagtctatatttcagatttcgtaaatgaatggcaagcatagagcagtgaggcagagaatgactggagaaagagactatgttaaactggatagtaaaggaagagcaggaccccactaaactatatggagttttgtgcaaatcacatgaacacacgtagaacattttaggctgctcatgtgactttggatttgtcctaagggcaatagtaagcc

SEQ ID NO: 54587 - DNA, 512 bp, Homo sapiens
  misc_feature (1)...(512): n = a,t,c or g
caagataataataataatgatttatgatattttataataatttgagtttaagaaatttgcctactcaaaggacatgattttttcctatgttttttatttttatggaacttttatagttttaccttttacatttaagtctgtgatccattttgagttcatttttgtgtaccatatgtgataagggtcaagattcacttttttatctgtgtgggtggtaggttcggttctatttgttgagactctactttcccaatgaccaagtcttcacaggtttgtaaaaactgaagtgacatagaagtggtctgttctggacaccattcttcttgtgtgtataactttacaccaatatgacactatattgattactgtagttttatttgaggcagaaannnnnnnnnnnnnnnnnnnnnnnnnnnnnnnnnnnnnnnnnnnnnnaatgtaacctcgaacatccgggctcaagtgagctctttccttagcctcccaagtagttgggactgtaggcatgcatc

SEQ ID NO: 54588 - DNA, 677 bp, Homo sapiens
ttttttttttttttattgatcaaagagagaatttattcacagagattttcaaatacaaacaaaatagcacttttaaattttttacaaaatgaatatagaaataaatgtggtacagcacagtacaataatggacaaaagaaaacacgatccaatgactggaaaatgtctctcattactctcatatcttcggctgaattctctcctatagtggacagaaagttgccccttttcttcataagaatatcatagcagaagctactcagagaaatattgcatattgtggaataacatggaaatacaaaggcttaactctaaaggtctgcataaacactgaaaatatgttgaggaactaaattagagtttatgcaggatatacaaaatactgatagtttggcttattggtccatttattaggcttaatgtatgttttataaagtgataatactgtattttaaatgtatattaaaaagaaaacagaggagaaatgcaccactaaacctcccagtctgtgcgataatccacgtttgtgcataggcgtgtgtggggatgcatatgtctgtatgtgcttgtgtgcttttgggagtgccgtgacctacagggaacatctttgggggtaccctgcttcccaacataacactgtttctactagccctttgattttctgagtcctcacctta

SEQ ID NO: 54589 - DNA, 1323 bp, Homo sapiens
  misc_feature (1)...(1323): n = a,t,c or g
gtgtttttttttgtgcaaagaaagctttttatttgagaacacctagatacttttggaaatgttcttgttggatcacaaacaacctaattgacagtctatcgccaacatccacaaacacagcaaacagtccagtcctgcagaccacacagggtacatctagagggttctacttgcatcacccacacttccactcctgtgaaacaactgtcttgggcatgagaagggccaggataggccaggtgaatggcaggctgcccaacaaccccaatcccaaaccaacctcccagccatgggcccaagtccctgcaggaagatgctaataggtacaacaggtagaacatgtagacacaaacatctagtttattttttctgactgtaaccaaagtcagcaaaagaaacaacaaaacttcagtgccctagaaatcctcctggattcaatgacaacacatcaatggccgggcacagggttggattccttttatgaaatcaccttataatctctcatcatcccaggacagtgccttttgggactgcatgaatctttaatagctacaccacattttctcatcctttaagttatgacagacaggttatctctctccaagagcatcaggttagatgctctttcactcttacaaactgtcaggtggagggagaatcacgacatcgttcataaataactgtggagtctgggatgctggctgaaggcatctccaggaaggactggagggcgattttgctaaagggctgctcactgctcatttcactgcatgccgcttttctcactttggttgggagtttgaaggaccatgtaatcacagagattagagctccctgtgaaatcaatcactgcctttagatctccacaaagacctgttctccaatagcacatgcgtttctctgtgagctgtattcgcatcagcgccggagccctcagaaagaatgcgtgtttacactctgtactctccaatgggtaatatttatcatagaaatctaatacatattcttcagtcttgaatccaaacttctggtacagtagcatagcggggttgcttgctgagacgtgaagggttacgtccttgcccatgcaggtctgaatcagatgatagatcatgaaagttgcaatccctgctcttctccattcagggtggacgaacagaaatgaaatgtaagcttcattgtatttcacatcaggaaccatgaagccaaaggcaatgatgacttttttataaagaacaacaacactgaagtctgggnactgcagacactcagacaggtcantgccaggccaaaaaaactcctgacacatggagttgatcgttg

SEQ ID NO: 54590 - DNA, 636 bp, Homo sapiens
ttttttccattataatagccatctttatttgtaaaaatccagatataaaatgtattctttcagtctttccgggtgttccttttttacaaaaacaaaaaggcacataaaaaccttccccgctgtcatttccacagatggatggttttcaggcagccctcccccctccccccatagagctacatgcttcattccaggacgtcttgcttccccacatgctgcggtgctttcctaccagggtagagttccaaactccaagactgaagtacacaaagagggggtgggtgtcggatgcagagtgtgtggcctgatgctccacggcgtgcaggacggggggctaatagtaggtttccttctccacccagcctgtgggtggcaaagagacagacaagacacactacagtgagtcttcctcgctccagcattacagagggaaacagggatgaaaaccaaccggaggatgatgggggtcgggtgtgttaaaatccaaacatgggacctcaactgtacttatttacatgtttttaggaataccaagttacctggaaagatggtttagattctgacaagttttcactaaatcatacttggtttgtattttaaagtctaaaacatgaccagtcctcaaactgtaactga

SEQ ID NO: 54591 - DNA, 1099 bp, Homo sapiens
tttttttttttgaccatgatattctttttattgaaaagtaatataaaatggctttagacataaaagatagtattttacattatttcttctgttatatttttacgctttgtgccagaatttacttcttgcaactattcttgctttatctggaacagtttactccgttattgaatatctattagtgtttaatatagaagagcttaataaaccgctaatccgaaaataatggtattcccttgcttttcagacctttttgctgaatatgcttatttatgtccaatgtggaaatctgatcctgttctcttccactctgccagcagttccttttgtactgcttctggtagttcatagaaaacttgaggatcaatgtcagaagggaaagtaattttctcatcaacagaatctggctctctattttctgtaagtccttcatgagagtctgttgctactgtttgcttatggctatctgtagtgtggtttctggagaaaagttgctcactctgcaagtttggaaatgaatgaaaagcagacacagcagggtttgaatttgtaaagtggaatccttgaggttctttaggtccttgacttattcgttcatcttttaatctattatctaaataatatgaataatccttttggctagacatgtaagaagaactactgctattaaagcctgatgttcccggttcacaaggagatacagaggatacctgtttgctactggataaatgatctctaggatttatgggaatatcttgcatttgttttttagaaaagaaagataatactcctctagaggcatgtaatggacaactcacacttcctttcccttgaaatttttccctagattttccagaaaggatttcttcttgaatatctactggaagctgcttgaagacttcttggtcaacaccttcaggaagtgaacagagtgggaattcattaatgtctttttctttagaaaaatttgtggtatctagtggagactccctagttcttgtactttcaattcttccacttggtaggaaatcccggtttgtttctttgtctttgggaaaatcttccatatgagtgtctttcattttaaaactgtgcttgc

SEQ ID NO: 54592 - DNA, 465 bp, Homo sapiens
tggaattacaaacatttgaacttgatggactttcataattatctgatactagccatataaccttgaagaagcttctaagcctctctgtgcctcagtttctgcatctgtaaagatgataaccccaccttataggggaaatgcaaagattaaatgtgtcactgcacgtgagacaggtacatgcggagcactcagtgcttgttgattcttacgatgttacgttcaccattatggatattattcaaactgagactgtctgtgacaattactgttcagagttgtacagttgatttaggcagcaagtcttctggttcttaatccagtggtgtttttgtgcaattcagaagacatgtatgttgttcccagtaatgacttggtgtgtttgctgaggtagttcggtaggactgctagagctagccatgaaagcataatatattttcacagagttgagctcagttttcttctaga

SEQ ID NO: 54593 - DNA, 3863 bp, Homo sapiens
tgtttttttttttttaactatgtcaaacattttatttggtgtttcatgctatgttgatttaaacaaattaaacaagtttgttgaacagctttcttttctaatataatgactatgtgtacatggacaactgaaaacagggaaaacccccaaattaatgttttcacaaattacaagccattactaaagaccatatgcctggattaaaaaaaatagtccaatagatgaagtctctcattcaacctagcagttcaaccaatttctcttttaataaaagctgcacattacagtggtataaatttatcttttaaacactccacataaaaacatgtgcaccctctccttctacatttaatcattagtagtctctaaaatggtaaaataaaactgaatttatattagcaaatgaaagtgcaagtttgtacagctaggctcagcagcaaaagtgaagaataagaatgaaaggtgaaaagctgacagatgccacgcagagcaaggaccttccatgaaggtccgtgtcctgtgtgccaaacacagtcaacattccatcattttctcattgctcttaaacgagcaaaaccaaattctttttctatttaaagaaatattaaatctttattttccccaacataatttgtgatcaggtaaggcaaagataagtccaccatcactggggacagcagcaacatacagacttcagaaatagccctgaatcatcagtaacattctatcgtggtaacatcagaaggaatgcagctaacaaattaaatttgtaatgttgtcacattattctaatttatttgattagtttatctggaaaaactttataaatacattatgtaagagggcagtaaattattttcttgctttgaaaaaataatgttttttcacattttaaaacattttagtctgcttttgcaaaaggagttgcaagaaaaatgtgacagctgggtttgcagaatgtccatgtacaagctgtatttataagaacctggtaatctgcctataatttgcttctacaaatagagctctttgcaataatattttaaaaaaacaggcttaaactcttctcctattcattctacttgtagaacaaagaggtacttatttttcaagtattataaaaggtaaaaaattttttttgccaattttacatgttaagcttttaagaccaaaaaaatcatgcctagtcagcccatttcttttataaccaaattctcttgtcttttaaagaatgcagaaaaatattgattgctaagaaggagcacactggaaaaagccattttaaagtattgaagaatgagacgtatttcttttttcctattgatgaaaaattattagaaaagcctatcccagtctgttgtctttagctagttttaataaatcttttcaaaatgatggtcaagaactctagaaaacgggtggaggggatgctcctttatagcaggaaaggaattccattaattgtagaaattctcattaaatttcagctttggttcttcagaagaaacactcatataacttctgcagtctgctgtgtctgaacaccatctacctgaggcaggggcccaagtgtcccttcatcatcaaaggccaaaattggattcaaaggaatttctgggctctcactgttggtgacatctaatctggatggtttagatccaatgggtaagtttataatttcttcaaaattttcattctgaacagatacaccattttcatttggttgtttttccaaatcggggagtgctctccactgtcacttttgactggtgtgaggtaaccacatgtgggctgccaactggctttccatttcccggagcgtttgttgtacatggaagtgcagacacctctgttcctccagtgaggagctcccttgggctatatcaccgtttctctgatcactggttttcttatctgtagcttctgttctcctggttcttttcataatctcctcaagtcgcttctttctctccaggcgctcttgctcttctctctggaaatgcttctctcgttcctgccggaccctctctgcttcttcacgaacgcgagcttcttcttctttctgcctctgggcgcgctctgcctcctcccgctcgcgcagcgcccgctcctccgcctgccgctgcagctgctcctccttctcccgggcctgctcggcttccagcctgcgcgactcctcctcacggcgagtcgtcctctcttcagccacacgttgagccaattcctctctcttttgtctttcaagctcttcctgctccctcctctccctttcttccttttctctctgctctcgggccagccgcctcttctcagctagaagccttgtggcctcctctgggtcggtggtgcctgcagaagtcttaacagaagcactggcattcacagtggatgacggggctgagaccatggctggggtggggaccggggctggagctggggccgaggctggagctggggccgaggctggagctggggccatggctggagcagcagggccaacttctggttcagcaggtgtccgctcttcaactgtggcttcttctaccttcactaaaggtgctctgccctttagtgagggctcattggcaactttctgaggttccttctcaggatctttcttctcaggctccactttgacttccctcttgacagggcggatgttgccgggggatgggggccggacctgagcaggagcagctttgactgagccgggtggcaaggaggatgtcggtctgggtgtgccaggcaaatgaggaagagacttggacggaagccaaagtcgggagcgagctggttgtcttgctttgggattagatggagatacagcccttcgggtgccagatgtgaggaagagtacattttctctctctctttcttttttatagctcgctgtgccatgaatgatcctcctgcgagaagagccctcaggtggtgttacaaagagttttggtcgatccatcgaatttctagagtgtgcagctttgtagggcatgatgatggggctgcaagatgctgcttctccagacaaggcagctgtgcttttacttctggccaggaacgaatgtgtgggcgtcaggagtctgttaacaacgctgctctcccatgggctgagctgcaggcggcgagctctatctggagaatttagtaaagttgcagatgaagaggagagccgcttgctaatgacgggatcaacatatttcgaaagattcatggtggaaactgaccgcctgtctggatctgcactgtggatgctagggctcccatggagagagcctccccacgaccaacggttatgcttctgttttggcttctggctcctttccattgtgcgccgtacaacagcttcgtggcgttctttgtcctcctcaagtctctgcctccgcttctcctccacagcagccctcctccgctcctccttctgcctctgctcctccaacctcttcttccgctcttccaggtgcttctcgtagtgctgcctggctcgctcttctctttctaaccacactatttctcttgcagctagctgtttctcccgttcctcacgtcgctcccgggccagccgctgccggtcatcaacacgtaacacaggcggagggtctggtttatttcctgagtggttgttattttgtcctgaaattgcagaggcagggcggctggaggcatttttcttatcttgcactttgtagctgtcgggtgctgtttcgcttcgcactgcgccgtcgccgcccctgtggccgtcgccgccagctcctagctccgccatggtgctccgatgacgcgcccggagagccgctccgccctttcctcggcttggctcccgccggcccccgcctcccaggccagcggcccagacaggtgagcgc

SEQ ID NO: 54594 - DNA, 414 bp, Homo sapiens
cacttgcctggtggtagagggtggacaagtatctgattaattacaaaatgaaagatttataagtgattttttaatgttaaatgctgtttcaagttattcacatcattgtttccttctactaaagtagagaaacaagaattgattttaagtatctctttgatgattatgctgctttccacattacagatggtgaaactgtccctggttgatgtaatcctgctcgtggtgttttccatgagcattaagccccatcactgagaaggcttaaaggctccagccagggagtgtagtgaggatttctgtcaagttgcagagtggtttacccaccccactttagaatgtgtacctgtcactggctgatgttatctgtggaggcatttgaagtctgattattggacttggtacccgaggctg

SEQ ID NO: 54595 - DNA, 352 bp, Homo sapiens
gatgggcttagaatgtagaaagctacaaaggctctccctcccaatatcataatgagaaaagctggataatctaccaaattgtaacttctgttgagcccatcagaaagctgaggttgcaaggcaaccaagtaacctcagcgccaaagagagacaacagaagcctctccaaagacagaacacaagaaccccttcacctttggcagagcgcaggagaaagaggttactgccaaactagttggcaacaggaaatcggctataattttaatgaagtcttaaaggccaagtgtaggttggcatgtgagtttggactagctgggggcctcagatacaaagggagttcacattcattcat

SEQ ID NO: 54596 - DNA, 400 bp, Homo sapiens
agcgagtgtatcctgggtgcttgttcggactaaggtgcaaacagagggctttgcgttatggtctttgatcctggtggcattttcattagactagatggtcacggtaatgtggtatcttttccttttttgtagacaggcgactgagtctcagagggcggtatcctcgcccaggtcgggggtctgcacatggctgtcagtgttgtgtcctcggacagccctgtcctgggaactcagaggctcagcagtggtgcctgtggaatgggcctctgttttcaccgagtagttgaccccatctggcacgacagggagactcttttttatccagaaccaaatcaagagaggcttttctgagtgacttgctgtgcttttttcagctttggaaagtatgttgagaatgcgt

SEQ ID NO: 54597 - DNA, 658 bp, Homo sapiens
gatccttctttttggttttggaaatataatcattgttaatgttttccctccaaatagaatactgttttatccatacaaatcataacagcatctatcccatgctagggttggaaactgatattggtattacttgtgtttttccttagtgtgttttatttcccagtttcatcttcttctaaaaatgaaaatatggtgccttccctccctccaggaagactggcaaatatttccttttatttactgctgctgtggagtgatgagatatgcactttactctttaagattcagcaaaaagcttttcacttctcagtatatccagaatacatcatatctgggacttaggaaaatttgccaagcaatctttgtttttatagatactaatgttgactctctccagcgttcaatgttataaatagaacaagtcaagctagtgtttatctcctccccctccccaaaactgtggcacagcatataaaaatgtacctcaataatgttctattaaaaatgggacaggggccttatgttttcataatttcccaacaatgtgccgccatatttttgcctcaaggtaaaggttttaacagatgaaaaagtacttcccaattcccccgtgctattcctaacctataatgcccaaatgttttgtgcaatgtgtaag

SEQ ID NO: 54598 - DNA, 2837 bp, Homo sapiens
ggccacgaggttttttttgaatttaagactttactttattcagcaaaatcatttatttacacaatggggaatgctggtttgattttgtcaatgaaataaaaacaaaatgaacagagacaatactgaactgtatatatactttgtatcagagttgaccaactgtttccttacctgtatcaggaacatcaagagcaacagtatcacaaggacactggtttaacaatacaccacataggtccagtaataccctgggaatttcccaatgcaatcaccaactttttctttttttataaatatataaaaaaacaaaaagtcagcaaaaccagcattatgatgtagcaaacagagtataactctgaagtcagtggggtcagtaaaagccttatcagaccatccatagttttacaatgtgatctgctcttcctcagaccactaatatagaatccaaacaggtgaaaaatacgtcactccttagaatacaacaatgatctgataaggatttgacttagtggaaggaaaaaaaaaaaaaaaagggaattgcagagcatagcccctattagaacaagctaactttccagattttacaaattaaaaaaacaaaaacaaaaacaaaaaaccacttcaacatgaagctaccatacaaagtttttccatttttctttgtaaaaagttccagagtttgcaatttaatcctgggtttttaatgagaaggacagttttggcctggacttccccttgcccaggataattttttgttcttctttttgttgacgttgtcgttcttgttctagtttcatcctttcctcatgaatctttctttgttcttcaacaattctcaactgttcttcggccagtttggcttgtgcttctgcaatttttcggttattctcttccagtattcgctctagctcctcacgttttgcacgttcttcctcctaaaggggaggatatgttaagatattagaaaaacaaaatgtttatttttattgataaatatttactaatcttcctctgaacttttttgatatgacttacagggtagctttatagctaccttctgtctgacaaatgataaactgtgcagtcactaaaattggtttctagcactaaatttaaatcatccctcccagtccaaacagcaaccaactaaaccctccctaatgatagtttcctggcaattattactaatactttaatatcacacaaatcaacaaggacaactacaaaactggatagtatttaccaaattaaaaaaataatatataaaatataaataaagtgaatatttgtctcaccaattatgtatacctacgtattctttacctatactcctttaatcagcattaaaagttgaatatttactgtcttgtccagtgtcctgcagagtgtgctcctcggctgccatacgcgccagcttcctctttaaaatgatttgtactgttagcttggcaatacctgcatcagcagctcaaccatttataaagaaacaacatacaaggaaggcctgagcctgaggaatgcagatgtttatggtaagaaggaacaaaaaatgtaattcatcattccctaaggcaaacaattaataagaaaaatacatttactgttagtgaaaaatacaaatggtaatccatacttcatggaactacgggcttcttccatggggaaaatggacttaacattcagatgttgacaatttcggaaggcagcttatattgtcatctacaatctgaactgaaactcagaaatccaggggatgcatggtcaggaaataaaattcttcaacttattttttcttggagaatttaatgagatttataatgcaaactgtatgaagactgcttgcatggcttgagccagtgttcagatcacagcatacatattcaaatgattttaatatttggaaagactgtcagagggttgtgtccgtgtaaaaaaaaaattgttaatatgaaacaaaaaaagcaaatgaagagaaaaaaatcttactatgattaataactcgctacaagacagcaccattactccaaaaatatcttcattattaaaagcactgatataaataaaaatttcatacattcaattttatagtctgtgaaacccactataaatataagcatgtatatctagttaaagacaggacaagggaaaatgcattttcaaaagctaagcttaccagaaagcaaagagatttaatatgtcaacttgtccacaataatgccaagatgaaaaatgacaatgagtcttaattattttgagtcaaatatttcagttcaagaaaatacaactacaggatttcctacatcacacaccaatgggattcatattcattatgcaaactatggtgacagacactcagggctgtaaagtaatttgccttgagtgtttcagtgactttcaccaagtttttggatcctggagtaatcagtgcaaacaagccatcaaagcttcagtagcaaattactgtctcacagaaagacattttcaacttctgctccagctgctgataaaacaaatcatgtgtttagcttgactccagacaaggacaacctgttccttcataactctctagagaaaaaaaggagttgttagtagatactaaaaaaagtggatgaataatctggatatttttcctaaaaagattccttgaaacacattaggaaaatggagggccttatgatcagaatgctagaattagtccattgtgctgaagcagggtttaggggagggagtgagggataaaagaaggaaaaaaagaagagtgagaaaacctatttatcaaagcaggtgctatcactcaatgttaggccctgctctttttaatctgactgaagcaaaag

SEQ ID NO: 54599 - DNA, 620 bp, Homo sapiens
gcaaaatcagagaggggtgcaagatcctgatttttcaggagttcaagcgacaatggcagcccaatacggcagtatgagcttcaaccccagcacaccaggggccagttatgggcctggaaggcaagagcccagaaattcccaattgagaattgtgttagtgggtaaaaccggagcaggaaaaagtgcaacaggaaacagcatccttggccggaaagtgtttcattctggcactgcagcaaaatccattaccaagaagtgtgagaaacgcagcagctcatggaaggaaacagaacttgtcgtagttgacacaccaggcattttcgacacagaggtgcccaatgctgaaacgtccaaggagattattcgctgcattcttctgacctccccagggcctcatgctctgcttctggtggttccactgggccgttacactgaggaagagcacaaagccacagagaagatcctgaaaatgtttggagagagggctagaagtttcatgattctcatattcacccggaaagatgacttaggtgacaccaatttgcatgactacttaagggaagctccagaagacattcaagacttgatggacattttcggtgaccgctactggtgcgtta

SEQ ID NO: 54600 - DNA, 353 bp, Homo sapiens
tgcttagtaaatatgtgttgggaggagaggaatgcaaggacagacaaatgaaaacaaatgaacaaaaccacaagctttggaatcctcctctgcaacacgggaatgccgtgggcaaacgaggtggactgccccccttggtgtgaatcctcactccctacacagtcgtgcacctgctggcaggtgcactgggtcacctccgggcctctttccgcttcgataaggtgagacgcttaatagcacctgcacctcacagacttatcgtgaggaccaggggccgatcctccccaggtgtttagttcagcacctggcactaaaggtaagttccttgcacccatcttccccaccctattaaa

SEQ ID NO: 54601 - DNA, 389 bp, Homo sapiens
ggaccatatgtggtctctgagacactgtgactctgagtcatggagctccaaaatcaacaagggtcaggcccttctaatttaactctcactctggcttgataaaacccagatagatgaggctaagacaggggtgtaagactaaaaatcccaaattaattgacttaaaaatttcatttcatccccactgaaatgtactcctaaatgccccctaagggaaggaaaaatggaaaaaattaaaagacaagataatatgaattctaatggtgaggattatccttctatagtgtccaggcaactaatgcccaaggcttcctcattcattcattttactcaacagacatctactgagctgagcacttctcatggtccagatgcttctaagacacagg

SEQ ID NO: 54602 - DNA, 345 bp, Homo sapiens; identical to SEQ ID NO: 40935

SEQ ID NO: 54603 - DNA, 581 bp, Homo sapiens
ggactctgatccggctcagctttccaatcagctgcggaaggagccacgctttcgggggttgcaagatggcggccatacagtggaactgatgagccggtttccggggagttggtgtctgtggcacatgcgctttctctcccagcagagtcgtatggcaacgatcctgacattgagatggcttgggccatgagagcaatgcagcatgctgaagtctattacaagctgatttcatcagttgacccacagttcctgaaactcaccaaagtagatgaccaaatttactctgagttccggaaaaattttgagacccttaggatagatgtgttggacccagaagaactcaagtcagaatcagccaaagagaagtggaggccattctgcttgaagtttaatgggattgttgaagacttcaactatggtactttgctgcgactagattgttctcagggctacactgaggaaaacaccatctttgcccccaggatacaattctttgccattgaaattgctcggaaccgggaaggctataacaaagctgtttatatcagtgttcaggacaaagaaggagagaaaggagtcaa

SEQ ID NO: 54604 - DNA, 1209 bp, Homo sapiens
gactgagcctccggacggacgctcgtcttcgcccgccatggccgagagcgactgggacacggtgacggtgctgcgcaagaagggccctacggccgcccaggccaaatccaagcaggctatcttagcggcacagagacgaggagaagatgtggagacttccaagaaatgggctgctggccagaacaaacaacattctattaccaagaacacggccaagctggaccgggagacagaggagctgcaccatgacagggtgaccctggaggtgggcaaggtgatccagcaaggtcggcagagcaaggggcttacgcagaaggacctggccacgaaaatcaatgagaagccacaggtgatcgcggactatgagagcggacgggccatacccaataaccaggtgcttggcaaaatcgagcgggccattggtgagtgtccctccacccttcgccgggtccgctgaacagggaggctacccgctcccagctggggtttggtgagagtgggactcgggggaagaagatggccctgggggtcccctgttctctgaattctggagctttgcttctccaggtagtacagactgagggatggtggggtctctgcaggcctcaggaaacccctaagagcaagtggagtccgagtcccttccccttgccagttcccgtcagcctgtgctgttggcgatggttctctgagcctgagcacagcggggtccgggccctgtcagcatggggccggaagccagttccacagaggaccccggctccggttcttcccgagaggggtgttcatgctctgctgtctaaggtgatcagactcatcctcttcaaaattagatgtgggaaccaggagtgctcgtgtgctgagagcccagtgaggcacgggagcggcgtggccccccttccctgggaagatgttgaagaggggcagcgttggggggaggagggagctggtgctgcagtggccagtggctgtggctcatttcaggcctcaagctccggggaaaggacattggaaagcccatcgagaaggggcctagggcgaaatgaacacaaagcctcgaaatcagtgcgctccagctgatctcgttccgccggttccccttggccgccagttccgttctcctcacgggccgaacggaacaaggggtccagcttgcgggggaccctccccagcccattcctgctgtcaaacaaacaaaaccttgcaaaa

SEQ ID NO: 54605 - DNA, 761 bp, Homo sapiens
gcgaccgcacaaggaccacaaccggggccgtacggctgcgagccggcccgggagagggagcggcaccgcccagcagcccccgcgcaggcgcgccccacgccctcgccccgcaccccgaccgcttctcccacgacagaactgcacttgtagccggagacaactgtaacctctctgatcggtttcacgaacacgaaaatggaaagtcccggaaacggagacacgacagtgtggagaacagtgacagtcatgttgaaaagaaagcccggaggagcgaacagaaggatcctctagaagagcctaaagcaaagaagcacaaaaaatcaaagaagaaaaagaaatccaaagacaaacaccgagaccgcgactccaggcatcagcaggactcagacctctcagcagcgtgctctgacgctgacctccacagacacaaaaaaaagaagaagaaaaagaagagacattcaagaaaatcagaggactttgttaaagattcagaactgcacttacccagggtcaccagcttggagactgtcgcccagttccggagagcccagggtggatttcctctctctggtggcccgcctctggaaggcgtcggacctttccgtgagagaacgaaacacttacggatggaaagcagggatgacaggtgtcgtctctttgagtatggccagggtgattgaaaactcagcctcaaaacaaaaaattcactagttatgattcaacgcgttcaacagaagccatccccagctcagcttaaatta

SEQ ID NO: 54606 - DNA, 405 bp, Homo sapiens
gactgtggaaagagaagccttcagcccacacctctgaatgcttttccaccacagcatgccctgtggcctgtatcctgctggtgtggaacagtcagacccctgcagggctgcagagcctctgtactgggcggcatcccagcctgagtgccagagctcagtgggcaggcccccgagcaagtagagaggagggcaccttttggacagaacctgtgggacaagagcgacgtctcatccgttcaggttcctcacaaaatgagagtcaggaagatcagggtgcagacctgatttcccacgaagggctgaaagcagacaaccggagggagagcagcacctgggccaatgaggtagaagacagaagaccacagtgtacttctgcctcaacctcacccccttcacctacatcct

SEQ ID NO: 54607 - DNA, 363 bp, Homo sapiens
cacagccacagaatttcgtgggcacaggagagcacttagaatattcccctttcattgcacagcagctttgggaaatagtggctgcctggctctgagatgaggtagaaaagactggatactggggcaagtgttagcacctccactggtgtttttatgaagctaagcgcactgtctcccacgtagacttagaatacaatctgatggctctaaagggccatggctgcccttcctgggacttcctgggaacctttaaaccttctgtggttcctggagtaggtaggttgccaagtctgtgcctcatatggtagcaccagtcttttctgggccaacaaggacacttagaatgtttccagaagctcaggc

SEQ ID NO: 54608 - DNA, 397 bp, Homo sapiens
  misc_feature (1)...(397): n = a,t,c or g
aaagcaatgtttttcagataactgttcccaggaaaaaaaggaggaaatcctggaaaatgaaaaggccagtggacacagttctaagcaaggaaaaccagatttgcaaagtcaagaccatactagcaccggccccgcatgcactcagcctgccaagaccacagccttgtaaggataagttacttaatttagtttcacttggtcataaagcatgagacagcctcatttactggcttctgcttttaatgctttatcaaggataaggaggaacttctaatcattttttttgaaacttttatatgtgttaagttttcagggcaatagacaaagacagataatctacagggtaacttcccaacaagatagttctgtcttgcaagtcattagngggcctgaaaca

SEQ ID NO: 54609 - DNA, 352 bp, Homo sapiens
acacgatccagatccggcaggactggagacacctgggagtcgcagcggtggtttgggatgcggccatcgttctttccacatacctggagatgggagctgtggagctcaggggccgctctgccgtggagctgggtgctggcacggggctggtgggcatagtggctgccctgctggcatgccgaattcgctatgaacgggataacaacttcttagcaatgctggagaggcaatttattgtgagaaaggttcactacgatcctgaaaaagatgtacatatttacgaagcacagaagagaaaccagaaggaggacttataattggctataatttataagaatgttgtcattgagtg

SEQ ID NO: 54610 - DNA, 266 bp, Homo sapiens
gcggcacgagaagcactcaggctaagtgctttcaggtttaaatactttcttaagtgcttttaggtcaagagcatgggctttggagtctgagagacctgggctgagatcgtgaccctgagccatttctttgatgcctctaagccccagtttcctatctgtaagatggagacagtaatttccccatagacttgtctagggaattaaatgagactcctgtgaaaagtgctcagcacaggacatgatgtggaagtactcaaaaaagttga

SEQ ID NO: 54611 - DNA, 714 bp, Homo sapiens
tccaacaatatttgtaccgtttttatttgtaaaaataaccatctgaatgcatttccatagtatattacagttaagtacttcattacgttattagagcattcagtagttgcaaaagtattaaactgtgcttgagaagattcagattgtttcaaagtcattcactgaactaaaagtcattttccccatttttacagtcatgacatttaccagagtcattcaactccaatttacataagaaaacattatagacaaaatcccactgaaatcatcaaacaatattttatgctgttacaaatatgttatgcaaaatataacactggcaccagatttgtatcatcgtgctttacaaagatatattgcacatgctagagcataaaatatgtagacaaaactaccaaataaaagatatttgcattgaatttttagatcacataagaaacgcatagaattacattttatacaaacactcagattgtcactatcttaaaatgcttttcccctataatactgacctatggtttatagtttcgtaagacgaaagcattttagcactgcaaaatcaaacaattcctatagaaaacttaagcattttcatattcatttcaatgcaagtacaaggggaaataggaaaaaagacactttatacattcaaagaaaagttgaaatgaaaactcactggtatcatattgctctgataacactcaaatgaaaaaa

SEQ ID NO: 54612 - DNA, 348 bp, Homo sapiens
gttttcagcagcaaatagttattctgtgcgtgcacgcatgcacacatgcccaagtggcaactggggtttcggccactgaaagagctccaggtcatgtttttcagtcagctggagacagaggtgtgtctatgggctggaccttggctatcacctgatgggaacgggatggtggccagtagactcgatttctccccttgtatcctgactgctctttggctctactggggtggctgactgtcacattttccctgaatacggagtcaaagcaaggtcgacgcggccgcgaattccagatctatgaatcgtagatactgaaaaaccccgcaagttcacttcaactgtgcatcg

SEQ ID NO: 54613 - DNA, 154 bp, Homo sapiens
gcacatctttcaggcgaggctctaagagccaggtgctggctctttcccgcgctgcagagacaccaggcatctttggtctgatcctctcccgtcgtgtcactgataaatgaaagaagaatgttatccaagggaatggtcccaagaagttgggaag

SEQ ID NO: 54614 - DNA, 812 bp, Homo sapiens
tctaggctgagcagagtctcctgaatttgctcagagattggttccaggagtggaaaggatgattcttagtagcctaggcttgtgcagtggcggatgtgactagattgcgagctcagccacaagtctgtgttcacacatatctcctgtcctctcctcttaggtggatcatttggataagaacgggcagtgtgctttggttcatgctgcactccgaggtcatctggaggttgtcaagtttttgattcagtgtgactggacgatggccggccagcagcaaggagtatttaagaagagccatgccatccaacaggccctcattgctgcagccagcatgggttatactgagattgtctcctacctacttgatcttccagaaaaagatgaagaggaagtagagcgagcacagatcaacagctttgacagtctctggggagagacaggtacctctcatggacgttgccctcaaggaatgtgttgtgtttgtgtggactctcgaatctcacccccttattttttccctggcatacatttggcagtcttctgtctcaggcttttgtaatgcagactgattcagccaaactaaacagtcaagcagttttcctctttcaatcctctttgcctgtggattctccatactctttgcaccagagtcttctttcaaacaaaactttttccctctcttgtttccaaatatttttaaaagactgaaagttaccttacaatgtgccaaaccagagcagaaaattattgtggcctgtctcctttttatgtgatccttgtagtagttaggaataaatatttctcccatcaaa

SEQ ID NO: 54615 - DNA, 128 bp, Homo sapiens
gggaaggaaggagaaagggcaggagagaggaatagccaatatcagaaaggaaaacaggtaagttacttcagattatgcagacatttaaaatatttaagagccagcctggataacatggtgaaaccctc

SEQ ID NO: 54616 - DNA, 323 bp, Homo sapiens
gtgaagaaaggtggatcctacatgtgccataggtcccaagagtactatgatccctattttcaagatgtggcatctgagatgttgagaagacacacagccagcaggtggaaggccttctcatctctagaaccatgctgctcaatacgtaggcatcagcaatatgcagctattgaacgtttgacatgtggcaagtttgaattgagatgtgctgaagcccagaggctttctcttcctccatgtggtgctaatggcctagagaagaacacaagttttagaatggaagatttgaacctcagcttcctcttccagctgtgtgacttcag

SEQ ID NO: 54617 - DNA, 385 bp, Homo sapiens
cccacgcgtccgagaaaacaaaaaaccagccaacagtgtaacacaattacaaaatcttcatgtacaaatgaagtgattaaatcatcctattctactcagcccagctcagaccatatcttgaatactgggttcaagtctagataatgtattttgtattttgagaaaaatattgaataactgacaggagacctgaggaaaatgaccaggagatcaagagttggaaccttgtcacatgaagggtggtcaaggactctggggttatttcagcttagaaatgggaatttgggatttgtgattctcattttctgtttcttttgttcgttcattctttctttcattctttctttttctttcttggtgggggtcttaacacaaaattcaaaat

SEQ ID NO: 54618 - DNA, 356 bp, Homo sapiens
  misc_feature (1)...(356): n = a,t,c or g
ctgcccagtaacaggcatcgaacggtgcagactgaagacgccctccgtcagcgacgccgtcgcaatggccatttgtcaattcttccttcaaggccggtgccgctttggagatcggtgctggaacgaacatcccggtgctaggggtgcaggaggaggacggcagcaaccgcagcagcagccttcagggaaggaattgtaaaagatatggaggtttggnaatcatcagggcnngggntgnntnctgtatantnaccatcnancnnngaaagctattntncncngttttnnngacattnnactnnctgaattnaatgcntgcatgntatancggattattnntntttgcttactactcc

SEQ ID NO: 54619 - DNA, 404 bp, Homo sapiens
agaattacctatttcctgctaccaactcagcacttaattcttaatgatattagtggttagttcagaatgaattgccaactctcactcaaaggccctttaagtaaaacatcttactctaacttctgtgcccagcattttttgggtacatagctggtacttaatcaatatgttatttcagtcctaaatattaatttagttttagtatacggtatagactatttaaaacctttatttaactgtaccttttttttcagtgtattattagttaatggcccataaaaagtctattaatttcctgtcaacttagcaaaatgtgtttcaaacaccctcttggacctcttatatttcgatgttttccaatttttataagtgagcctcaaatgtactattttacaatataatag

SEQ ID NO: 54620 - DNA, 406 bp, Homo sapiens
  misc_feature (1)...(406): n = a,t,c or g
ggctcatgaacttccagaaagtatgtgtcttaagtttgactgtggtgttcagattcaattaggatttgcagctgagttttccaatgtcatgatcatctatacaagtatagtttacaaaccaccggagataataatgtgtgatgcctacgttactgattttccacttgatctagatattgatccaaaagatgcaaataaaggcacacctgaagaaactggcagctacttggtatcaaaggatcttcccaagcattgcctctataccagactcagttcactgcanaaattaaaggaacatctantcttcacagtatgtttatcatatcagtactcaggatngnaanatactgganaggcntnctagaagtgaatgcnnnacacgtcccantnnnnaatnnncatactt

SEQ ID NO: 54621 - DNA, 269 bp, Homo sapiens
atgaaataatctgtctggtctgtgccatcccaggttataaggtgagagtgatctgcctgtgaccactgtcatcgcattgatttttggagctgatttggctgacgtggccaggtagccattgcttttcaccctcaccctgtcttgtgttctgcctcccaaatctgtgtccctggtagacatgtcatggcctttctcaatagagggtttatagactgcagtgcttgcctgctgggagttccagtgctttttgtgcattgcgtatcaccctg

SEQ ID NO: 54622 - DNA, 449 bp, Homo sapiens
cagggcagggtgttggcacagagctgggaggtgcattacaccgaggaactgacgtggcctaaactccacagtgacttccacctgggatcacagtttacagtcagctgagtgctcaagagaactcagtagaggggaatgttgatgattcaggtatttggttggtgatcatgttatcaagtcagacttgcagttaaggtagtgtcccagacgtttgttcagagggctccttcccacttgtcatctgtaatactggctaatgggaaacctggcccatgtcaaatttgtattaggaaccattgatttcaattcacgggctttttccattgaggaatttaaaggtcttataagtaatattcttgttaaggcatctgaggtctcccgggggacagacacagtcttcatcttgagcaggaacggtgagaccactcttctccctgtaagggaccagt

SEQ ID NO: 54623 - DNA, 952 bp, Homo sapiens
gatgtattcataagaccatgtaatattgatgtgattgttgtcgcttgagaaaaaaaggcaacagctgattctttcaacaactgtcacagaatggctgggctgagaacgctgcccagggccctgcagctggcgggagaggtgtctggtgggagcggtgtctggtgcgtcagcctgctgcttcgtgtctcactcgagagttgcttctggtttcacactttttaacccctctgtgctttagcagccgtgaccttgccttcattgcttcatccagtgcaggcctgggttattgaagacaccaaagtgtttctcttccagtttgaaaaccaggcaggtttacacgtgggtttcagtgtatttgcctttgaacccttcaaactaaactttagccttttggctggtgttgaatgtctttagctggggtgacctggagtgacctgggacggtgttgtggtttaccgtctccagcttcagcctttccagaaacccttgtggagggcagtgttggctgcaggtttcatcatattgcagtttgaggtcaccactatttggggaacaagcttgcgtcctgctgaggggcaggattttcagcagagcgtcggtggggctgggcccgtcgtggaggtggccccaggagtcatatggccatactcagacacaccttgtgtggcctgcctcagagctggatgccacctttaggcaatgtttagagtctattttctaaagttttaagtattttaagaggtattgagactaatgaatataatagttcagtaatttaaatgcttatttattttcagtggaaggatttttattaaaaagaagctaattgacatggaaatgtcagtgaaatttcttacctgcaaggaaagtgaacattttgtatttaagtaaactataatgtgcacattttaataaagaaatctgacatttgaaaaaaaaaaaaaaaaaaaaa

SEQ ID NO: 54624 - DNA, 1677 bp, Homo sapiens
ccccgcgtccgtagagatttactctggtgactgccttttgagttatgggtgaagtaaggtatggctttaccataaccttgattcattcacccttgattcatttctcgcccccgtcactgattatttccttgagcatatatctctgcctaacactttagtaggtgctatagaggatacatgaaaagtatgagatctggttccatccagtaagacattttaatagagaagatcaaaatgttacctggcagttggggaataatctgacttcgttggcagttggccttaacttcttaatcattgatccaggaatatttcaaccagagacacaactttctggcagacagacaaattgtacaacaccaacaatatcctggaccttgaaattctgtttacttcagtccattgtatcctttaaggcacctgtgctagcctagattttgtaataacactgatttatgagaatggacaaaagtggtagggaaattgttccctctccacttctgaagtatgatgatgtattaaggatggaggagttattaaaaatgtctcttctgatgaggtaacaattagatgaaaccatgttaaagctgagatgaacacttagaaattcagggatattgggtctttagccttatgaatttgagctgcttatttaattggtgtaatttactacatattagtactatattcgtaaggattttttattaaccattacagattttacaaacagctagttatatggtaaacagattattatgcctttttgcaattctgaatatgattctagtatttgtgtagatgtatttggtactttttcccctaattccaacactagtttatatatatagcgaataaatctagttgtataaatttttaaatgccgtcagtagaaagcacacaaggttatgatttttttaattactggcttctgatttctttcacttctgatccttttcctttttctcagatgtagctgagtcttgatcattttaagacaacgatgggtagaattttgagattaatgttaattttccctttttgttaatttcagtcccctctcactatgcttttgtccagaaggatcaagaattctaccatcccttgggtctttgtgtataaacaatgttaaataaaggtagactcagtctttaagatattagacagtttttttagtccatgggattgtaaatataaacattaactttcctataagaatattttggctttgtaatctatagcctcaaattggtatttattatggattcactagacaaacagctgtttccttattgtcttttttctttagtgtttctgatttgctatcagtagctgtttttaaagccatccaaggaaaataattatttacagtttttgaagtcacttttgagccctcatcaagctctcattgtgatgggagggatacctttttgttgttaaaagcctattattgttaaaggccttttatggaaaccaacttggaaaacaaccttaaatgtggatgtatcagatttggtttatccagccatgggagagaaaacaaacctaagtttactttacttgtacatatacactacaatggatagtatatttgctgtaaactacaatgtaaaacctcaataaaagtgcgctgtacttcttaatgtttattaaaagatgtatttttacaaaaaaaaaaaa

SEQ ID NO: 54625 - DNA, 361 bp, Homo sapiens
ttgccccaactcccttccttcctgctaaaggactccgtctggtgaaaacatggtgctagactctgcaacagccatactacaactgggaggaaatttatcacccacacaccgaagaaagcaaggcagaaagatggaaagagcctgggcccttcaccaatcctagagctacttacctctgaaaatcttatgtaaaaatgtgtgcttatgtgaaaaatttgttattaatgtttaagctactaatacttgtttaatgtttaagttctaatacttgaaagtgagagcatcctgacagattctggtattcaatcttgaattaagattaaccatattctctaaatatagactaatagccaaaatttat

SEQ ID NO: 54626 - DNA, 3467 bp, Homo sapiens
  misc_feature (1)...(3467): n = a,t,c or g
ttttttttttttttttggaagcactggaatacagctttattcctacacgattagacccgttaccccgtgggtctggccgaccgtcctgactcggagatccctgagctgcgccgccgcttccttcgtcaacatccagcagctacttgatgagcgccctccagtgggccttaggtccctatgccggcgcggggttacagcagtggacagacaggccggtccctgtcctcgaggagcccatgatccgcggggagacaggcatttaacgacgactcacacgatcacttaaatacaactgtggtgaaccgcacaagagggacgcgcggcggtctgcggggaatgacgaggccgacctcgtctgcgacccagggagggcaagggtggaccaggcaaagggaacagaggactgggacctggaggtgggcgggaggcgtttggttcattggaggaaaggaatagccctgtgtgtgatgagcattgagaggaggtctggcgagcaccatctagggctgaagaactaggcagtggctccagcgcggggcggtgggggggacaagtgagccagggcaagaagaatggatttggccctagagtacgggttctccaaatgtaacctcggccctacagatctctgagactatgtcagggggtttgtgagattttataacaaaattaagatgttagtacaatatcgtgtttcgcnnnnnnnnnnnnnnnnnnnnnnnnnnnnnnnnnnnnnnnnnnnnnnnnnnnnnnnnnnnnnnnnnnnnnnnnnnnnnnnnnnnnnnnnnnnnnnnnnnnnnnnnnnnnnnnnnnnnnnnnnnnnnnnnnnnnnnnnnnnnnnnnnnnnnnnnnnnnnnnnnnnnnnnnnnnnnnnnnnnnnnnnnnnnnnnnnnnnnnnnnnnnnnnnnnnnnnnnnnnnnnnnnnnnnnnnnnnnnnnnnnnnnnnnnnnnnnnnnnnnnnnnnnnnnnnnnnnnnnnnnnnnnnnnnnnnnnnnnnnnnnntatttgcagccgggnnnnnnnnnnnnnnnnnnnnnnnnnnnnnnnnnnnnnnnnnnnnnnnnnnnnnnnnnnnnnnnnnnnnnnnnnnnnnnnnnnnnnnnnnnnnnnnnnnnnnnnnnnnnnnnnnnnnnnnnnnnnnnnnnnnnnnnnnnnnnnnnnnnnnnnnnnnnnnnnnnnnnnnnnnnnnnnnnnnnnnnnnnnnnnnnnnnnnnnnnnnnnnnnnnnnnnnnnnnnnnnnnnnnnnnnnnnnnnnnnnnnnnnnnnnnnnnnnnnnnnnnnnnnnnnnnnnnnnnnnnnnnnnnnnnnnnnnnnnnngccttcttcattctataagtgtacagtggagtttttcagaagctacatgatatgtattgacaccatggttcccacgatgaatagaatgtgtgcctatgtattctcgtgttttaaatttttctcacttttaagttctagtaccataaatattgatagctataacccacatacccaaaagctttttggggtccttgatgatttttaagagtcctgagagaaaaattgagaaccacgttcctagagctccaagaaggtgaatgccataagatgtgtgttttttaaaaaagcatttctcggnnnnnnnnnnnnnnnnnnnnnnnnnnnnnnnnnnnnnnnnnnnnnnnnnnnnnnnnnnnnnnnnnnnnnnnnnnnnnnnnnnnnnnnnnnnnnnnnnnnnnnnnnnnnnnnnnnnnnnnnnnnnnnnnnnnnnnnnnnnnnnnnnnnnnnnnnnnnnnnnnnnnnnnnnnnnnnnnnnnnnnnnnnnnnnnnnnnnnnnnnnnnnnnnnnnnnnnnnnnnnnnnnnnnnnnnnnnnnnnnnnnnnnnnnnnnnnnnnnnnnnnnnngtgagctccgtctcaaaaaaaaaaaaaaaggaaaaaattatcccttatataagtgaaagaaaaaaaaaaaaggcattccagccactcagtggagagagattggagggattaggagcagatgatagggtattattttagggagctactacagaagcttgggccagagatgatggtggcttccacaggatggcagtgagtgccctcactctgctttcttctttgaatccttgcaggtggacaggtagacagcagcccagcccagtgccttgaagagcccaagcagaagaaaggcagacaggaaaaggcctacgctgtcctcaagggagggccctgaaagacctgctacctccagggtgacctcagcgctgcgccccgaggcaggcaggctgggatggtgaattcgacaggcatagcgtgccccatgctgctcagtggtgactgggggcggctgcaagtgcccagagaggctgacagagccatcggaatggtggcgcagggccgagagccacctctgcccctcggccttctgagagcggccccctgggccaccccggagttcccactccacctccaggcccccagaagggtagaagtgggacacaaggcagagcaattccgggggtgcctcccctggggcggcccgtgcaagggttgctggcatcagggacactttggggggtttgtacacagcaagctccagggtgacctgtccttgcaggtatggcaggtgtatggtggccagataggtgccctcctgaaagggttgaactctaggcagccagaaggtcccatttccggtccatgggccccatggctcatcatcatcccaagcagcaaatgccacggccccttcttgggctgctggcatctggccattcagcccaggagttgcagccaggagcagatgtcccttacccaggtgctggcgtcgccactctagcccaaagggagggggacccggagccagagatgaggcggcctcggaggtggggggcatgtaggcaaagctcaagtccagcagagcatcttgtcccagtctcactcgaggggcaggggtgtgggtgaggacagtcagtaccactgttgccatggtgatgagaacaggctcctgctgaggctctggctgtggtcgcaagaggctggagaggctgaggactgggctggatatgctgaccatcagccaagccccatccagggcccgcgggcagttctgcgcgggggtcaggccgctggcccatttcgcagaggcggggagaggcacgaagcggctcatctcgcagtgtggtgcgggggcgccccggggataccgcctgaaggcagcctggagggcgcccgcggggtcgtgtacactgagatagagctcagggtcgaggtccggccggggcggcggttcccccggtccctggcgcaacagcagtgcaccgggtctcttggccaggccctttccgctcgcatcctccacgaaccaacactcgatcaccgcgggtcctgctgagacggcggtcgccaggcccaaagccacagcgaggagcagagacagggacttcatggcgctgcgacctcctcagccatgaagcctcctcttcc

SEQ ID NO: 54627 - DNA, 307 bp, Homo sapiens; identical to SEQ ID NO: 40550

SEQ ID NO: 54628 - DNA, 537 bp, Homo sapiens
caccctttgtcataaaatagtcatctgaaaaatgaaccaccatcaattccaagtctagctaattttcataaataatacttgttgaatagtcccattaattctgggcttcttgctagagtggtagtatgttagtgcactgtactttaagggcttaaaagctgaatatatagaacttaccagggctgttcaaatacagccaaaataggaatgttcctttcaactgtaactacttaattctgcttcattcaagctaacaattgcatgtaaacattcttactttgttttaatttcaagcaacacaactcagaacatgcgcgactgcaagttcctacatcacaagtaagaagtagatcaacctcaaggggagatgtgaatgatcaggatgcaatccaggagaaattttacccaccacgtttcattcaagtgccagagaacatgtcgattgatgaaggaagattctgcagaatggacttcaaagtgagtggactgccagctcctgatgtgtcatggtatctaaatggaagaacagttccaaat

SEQ ID NO: 54629 - DNA, 279 bp, Homo sapiens
attaaaaacaaagaaaaaatcagaatgacagttttttgtacccatggacctatatgctactggcaacctgagtttgagcaattcctcattgattgattgattcattcattcattcagaacctggtggaattcacctgcagtatcctaggctctgtaaccatgtcaagaacaagctagtactcctgacttggattctgacagtctctctgccttattcatcttctgacagctcagtggtttggaagaagcagtctctgatttttaggtttgaagggaagg

SEQ ID NO: 54630 - DNA, 76 bp, Homo sapiens
gagcccacgctaaccgagacaggagggagacaaaacccagcagtagccaaaactctgctagatcgatgcagactgt

SEQ ID NO: 54631 - DNA, 326 bp, Homo sapiens
  misc_feature (1)...(326): n = a,t,c or g
gtttatgacaatagcagcacaaagactgggagtgggagaacaaatatactcttgtaagctttttacactacatgtgaagttgtataatgtcaattgaaggtagactgtgataagttaaagatgcatatgataaaatctatagtagcagagttatagctaatgagccaacaacaataaaaagttgggannnnnnnnnnnnnnnnnnnnnnnnnnnnnnnnnnnnnnnnnnnnnnnnnnnnnnnnnnnnnnnnnnnnnnnnnnnnnnnnnnnnnnnnnnnnnnnnnnnnnnnnnnnnnnnnnnnnnnnnnnnnnnnncacctgccgtg

SEQ ID NO: 54632 - DNA, 858 bp, Homo sapiens
tttttttttttaaagaaagcatcttttatgggtttattggtcctttaagttaattgaagtaaagaaactttaaatttacaagctaatatttatcaagcaatacaaattcttttgtttacctcaaaatgtaatactaattccatagtaaacaacaatttttttatacacagatatatgaaaaaagtggacaaaaacctcgtgccagcatcaaaaagtcaacaaaaaaaacgattctttttccattttacaatctctggtttccataacaaacaaaaaaaagggtgacattctttttaaagtttggtagcttcatgaaacaaagacttccatctgtaaataaatcactttcttatcaacacactctctcaagcactttttttatcacagcttttgttttggcataatggcagcatggagagaaggtaacatttacacggtggactacatcaatacctcagaaggtttttattttaaaattttaaacgtaaagaatgacttttaaaaataagatgacagtccataatgtggacatgtccaaagccgaagtttttaatctcttctttaacagttaaaatacaagttagaaagtttgctggcagtttatttcacaggaatatatcagatggacatcatctctcaatgcactcccaactcacagcaatgaagggaacaggcacacagaaatacaacggacagggatccaccagacttcatccaaacttcaggggtgtctaggccaaaagcgcctttaagagatgctggtttgttattggataaaggccgagatgacagagccactgcttcatcacactgactcacattttggtttgcaatccactttcctctctcctcatttcc

SEQ ID NO: 54633 - DNA, 517 bp, Homo sapiens
actgaccccccaatcctttattagagatgagtgaaataacaagtctgagatgaatgaaaccagacactgggggctcaaaagacaaccctgttcctgtgggaaccacagaccagtcaggtctccaggggaaacagcacagcctccccagccaggcagctgtgttggccattggtgctctctagtctcccctgcttggcttggcccattcctgccagggcccagcacccagcaactggcaagttgagatgttagtggttgatgatggcttaggtgtatctgctttctcattggggctgagcaatgatagaatttctagggctgggaagcagaacccttaagtctctgccctcccaattctattactctcccttctttctttgcctctccattccctcagactaaaaggctcctgagttgaccaagagaaagagaagagaagtgggcatccatcaaccccgactattcctttccttcctgctagatcaaggacacaggcaaatgtgggtgcatctgactc

SEQ ID NO: 54634 - DNA, 319 bp, Homo sapiens
  misc_feature (1)...(319): n = a,t,c or g
ggcagttgtcaccctaccagcctgctgactcagcatgagacgcttcattcagcttcattctatttccaacactgcttgaaatcctctgcagggctcactttgcccataggttaaaaggacagcctttntngncnnggncccnnnnnnnnnnnnnnnnnnnnnnnnnnnnnnnnnnnnnnnnnnnnnnnnnnnnnnnnnnnnnnnnnnnnnnnnnnnnnnnnnnnnnnnnnnnnnnnnnnnnnnnnnnnnnnnnnnnnnnnnnnnnnnnnnnnnnnnnnnnnnncgtcnacncggccgcgaattccagatctatgaatcg

SEQ ID NO: 54635 - DNA, 392 bp, Homo sapiens
ccgtcactcggcagaagcggagggggaccttggaccagccacccaaccaggaagacaagcctggggcacggaccctgaagtctgaaccaggaaagcaagccaaggtgcccgagagaggccaggagcctgtgaagcaagctgactttgttcgcagcaagtctttcctgataacccctgtgaagcccgctgtggaccggaagcagggggcaaagctcaacttcaaggaggggctgcaaagaggaatctcattgtcccatcagaacttggctcagtctgcagtgatgatggagaaggaactgcatcagctgaagagagccagttatgccagtacagatcaaccatcctggatggaacttgccagaaagaaatctcaagcttggagtgacatgccc

SEQ ID NO: 54636 - DNA, 228 bp, Homo sapiens
acctctaaacacttcagtgaataacaccataacttaatacatgttcctattataaacaaggtgaaagtgaatgtctttgcacatacattaacatttatatatgatgactccatttgcatacatttctagtggtgaaatcaaagagaaaaaaagtttaaaggtgatacatattaccaaactgcctccagaaagcctgtaacaatttgaacttcttccaccagctcctta

SEQ ID NO: 54637 - DNA, 320 bp, Homo sapiens
  misc_feature (1)...(320): n = a,t,c or g
nttgagntctgacagctatgacatgattacgaatttaatacgactcactatagggaatttggccctcgaggccaagaattcggcacgagtctgatcctgctgaaagccattaaggagaaacgaatttcccagtgcccgggctgcaagagagccttataggggccctgtttcctgggcatgcgcttcctctgccagccaacccccacttgcccaagtcactggtgcaataacttttctgccttcctcagagcagagaaattgggaattgtgttaggtggtgtgggcagctctgctgagccaagcagacacggatgnnncct

SEQ ID NO: 54638 - DNA, 1780 bp, Homo sapiens
ttttttttttttttgttttaaacactttatttataaaaaagtacatttttaatcctcagtacattttcaacccatcatttttttttaatacaagtaaaagggggtgatgcaaacaccccccaggtcagaaccaggaggatctgctgggctgtccctggaccaaaggcggaaagggcgacaagacgccgaagcaaggtagcgcatcacgctgggaggggagggtggcagcttctcctggattcttttcatttatacaaaaaaggaaaaccaattttttcgaccaagaatcccattcctcacagcaggggtcagaagagcagcagcaccgagtgggacaggggctcctcctggcctcacaagctgggcagtgttggcagcagtggcagcagcagaggggcctgcctcctggcatccccggtactgggcagtgtgtgaagcctccctgtgggtgtggggacctggggcacacccacctgcccctcactaggagagggtttctgttggcagtcaggctttgggggtctctgtctggactcctgaggcctgggagcactaccctcctcccagaagaggggacatccgtgtctgcttggctcagcagagctgcccacacccacctaacacaattcccaatttctctgctctgaggaaggcagaaaagttattgcaccagtgacttgggcaagtgggggttggctggcagaggaagcgcatgccccaggaaacagggcccctataaggctctcttgcagcccgggcactgggaaattcgtttctccttaatggctttcagcaggatcagaccattccctctgccacatctgtgctgagtggccatctggctgtgcatgcatgcgtgtgtacatgcgtgtaacacatgcctgcgcgtgggtgtgttggaggtgtgagtgtgtccactgtgggcacacgtactgggtctgaggtggtcgcacttgcaggcctgtgttcacctactctgtgctgctgcttttcagacccttctgataaaaggggactcggctggttctattacacattagaacaatatcaaaatctgtaaggaaacaggggcatgggtgtggggtggggggcaaggacagggagggcaacaagaggcaggatgacaactggggaggccttggcacaattcataccaagtttatttcatttccagcaaagcagaagctcagctcatgctgtgggcatgaaggagaagcaaaatgtcctcatctctctgctgggctagacctcccttttgccagctggctgtgtctgtgggcccagcagtagtgcccaccttcccacaaacttggggcacagaaaacctcacatccctaggtccaagtgctgactcctgcctcatgcccaccctcagcccaggctggcagctgcctcggtgggtatgctgaggctgggcccctggcaagtcaggagcctcctacgtggccccatgcctacatggaccccaaaatttgtgctttgccttgtggggagggtgtggaggtgtcttaagggggaactcagtgctttggctgggcttggggccttcaaagtccaacacagaatggggaatagagggtggcagtgcaggataaaggagatgcaggaggagacagggacaggaaatgcctctatcaggcaggcccctgggattgcctcctgcctgggggaaaaggggaccaagcagaggggccagagtgttgtaaggtgggatggggcagtgatgtaatgtggaaaaggtcccctgtcctgggggacactaatactgctgggaaaagca

SEQ ID NO: 54639 - DNA, 347 bp, Homo sapiens
gacagatgctgaatactttagctgatagtttctcttcagcatttctgtgtttggaatgtatgttatatgacagttccaaagttacacacattgcattcctaaatatgttgtgtaatacacattgcacatgtgtcagaattatatgtttaaccccaatgtaattgtgggatgtagaagatatagataaaactacaccttaccatataaaatatgcagaagtacaccagtgacgtcagttttgctatggttgcagtaagcagggcagttctacaaatttaccattttaaaagcattttgtcaaactttctggatacaaagatgctgccaaggaactcacagcctaatac

SEQ ID NO: 54640 - DNA, 422 bp, Homo sapiens; identical to SEQ ID NO: 43959

SEQ ID NO: 54641 - DNA, 72 bp, Homo sapiens
ggcacagaataatctaaaagtttgttttctagtaactcccatttcctcccaaattttgacgtatttatttga

SEQ ID NO: 54642 - DNA, 370 bp, Homo sapiens
  misc_feature (1)...(370): n = a,t,c or g
gtacagaacatctccacgtattcatgtcagttcattcctcaataacataacccctaacaaaattttgctgggaaaaaaaaatgggtattttccagggaaaatatttgggccaacttccaactgattatttgttaacgtttttttttttttnaaannaanccttgtntaactaaaaancccctnttttttatttaatcncccancctcccntnggntngctcagctactcncccaaatccatcaaaaggcnggcntcgagtaanggcancnctnttgntggggttggcaggtnttgtcaggaaatactgtaaccttcctaggagtntgattcctgcnctgaccctttgatcaaaactgaacnccaatagga

SEQ ID NO: 54643 - DNA, 344 bp, Homo sapiens
  misc_feature (1)...(344): n = a,t,c or g
gaggattgactttaattttgaaagaacttctactgtgggtaaaatgttatcaaacagcatcgcatgttagagagaaatcttgcatgaaaggatcaatcagtgcagcaaatttcatcgttgccttattttaagaaattggcacagccacccccatcttcagcaactaccatcctgatcagtcagcagctatcaacatcgaggcaagaccctccaccagcaaaaagattacaacttgctaaaggtttcaggattatgacttactgaaggttccggtgatcactagcatttttaagcaataaggtttttttttttttcctttttncttttgaaagggagctngctct

SEQ ID NO: 54644 - DNA, 2161 bp, Homo sapiens
gttccttctacctggtataggagataaatgtacgtttcttaattagctgactttttagtgtgtcatttctgaaggaaaaataaattaaccttaaagtggcatgtaggtccaattcagttttcctacatgttccaaaattttatttaaattactgtgtccaaaattatgaggacagtgtcattcattcaccatagtttatatttttagttatatatcaaacttccttggcacctaggataagaacatttcttttgaagttatccaatttttttttatttttacttgacttgaaggaaagttggaaaatatggtggaaaaaatcttccgcattaaaagggggaaaaaacacaaccatttacgatctcagtcagcagatttactctactcaaggaaaaaaagaaacaatcttattggaagcagatgttgacactgtgtcagttattgaagacggaaggagttcacttgagccattgcagttacaaaggggtattgatggcagtttggattcctgattgatcacctttgcagccaagggaaagacagcagaaactgtatgggatcagaaatgaaatcagcctgccagtttaatggagaggctcctagaaactcattttttttctttcctgtaagataaaagacatctttcagaataagaaaggcttgtttgagagagaaattacagtttattctctgaaaatatttaaaggccaaagtgccctttaaatctattattaaagcattgaaactgttattaaaatcattatagaaaaattaggtaaaaattttagcctaactttcaacatccattcaaaaacgaatgttgaaaacaaacatataacctataaaaaagtgaatggctctggcaagtgggggcatgggtggagtccataaggaaacctcagtctcaataacttcaaaatgttacttttcatggtaacttggtcatggagattggtcacagcacagacatttagaattttttagcaggttttttttttcttttgaatcttgtagtgctctctgggaattgcaccatgtacacttttacaacctacagaaatcgtcattattgttaaagtatctcaacttttctatttcttttattgtctattgtgcttttttgtttaaaaatacttttatagttttaaagtattggtcaaagtagtattctcttgaagttctagtcaatttaatttgatccaataagtttttctgaatctcctttttaagttccaagaaattctattataaataagtgtacttttaccaattccattgtataagcaaacagacaccttttagaaaaggataagtaatcatcaatttgttttttttaaaaaaaaaacaatttctagactactaaatttggcataagaataattcttttaaaatgcaacatactttaattagtttttttggtatatgcataagatgtgaactttcctattggatatcactttatattaatagagatgtacatttctttctatggccgtggcctaggagccaaaagttaataatgattatttacacaattgatttaatttcttagggatatgtataatattgggatattatatctggatttaaaaatactattccatacattttttttttcaggagataaaacataggggaaaggttttcatgtggaattctttgtatcactttgaagtacatatatttaaagggaagatggatacaatttgtttttattatataaatctaggtaaggtgaaatgcttttgtcaacaaaaatacagtgtagtgaattttatatttgtcacttgattaggtaaactgaaaactaacaatagaaatattattttactgcattgaaataccatgaactttcagacttgttagttctacaagcagttgtgctaccttaattttgtgtttccagaaataaaaattaaccttagttatgctgtcatttttaactaataaaaaaagtataattcataaaacttttggctttataagataattataaaattatatatttttttctgtttttgtggggttgggaaaacattttcttatttctattcactcttcaaatgcaggtctcataatatgtgtcaatgatataagatgatggaagactttgtaataaaaacatatgtcattatcttcaatttgttcaataaataattta

SEQ ID NO: 54645 - DNA, 66 bp, Homo sapiens
gctcatagaatttcatgaaaaacgtattgtcagggcttcagaggctgaagacgggtttctatggag

SEQ ID NO: 54646 - DNA, 384 bp, Homo sapiens
cttagctttgtttgttattatgttttggaatgaaatttggtcagataatatgattacggtgagttctgtaacagctactggtaatatttttgtaaatcacgtgaaagcattggagcaactgtcttggaaaatgctctttaaacttcaaaccccagtatgttttggtagtagtggatattacacatatatgctgctcttttcagtgttcttttattgtgcgaaaacatttttaaaacatttgatttattaataggatttatttttaataggattgttaataggatttatttttctaggacattgtctttaaacacttggatgattttatatgtcttaattctttaataatttgtagatttaaaaaacttcgtgggcagaaagcga

SEQ ID NO: 54647 - DNA, 335 bp, Homo sapiens; identical to SEQ ID NO: 43590

SEQ ID NO: 54648 - DNA, 7387 bp, Homo sapiens
gaattccgctttcaagaagatcagggacaactgatttgaagtctactctgtgcttctaaatccccaattctgctgaaagtgagataccctagagccctagagccccagcagcacccagccaaacccacctccaccatgggggccatgactcagctgttggcaggtgtctttcttgctttccttgccctcgctaccgaaggtggggtcctcaagaaagtcatccggcacaagcgacagagtggggtgaacgccaccctgccagaagagaaccagccagtggtgtttaaccacgtttacaacatcaagctgccagtgggatcccagtgttcggtggatctggagtcagccagtggggagaaagacctggcaccgccttcagagcccagcgaaagctttcaggagcacacagtagatggggaaaaccagattgtcttcacacatcgcatcaacatcccccgccgggcctgtggctgtgccgcagcccctgatgttaaggagctgctgagcagactggaggagctggagaacctggtgtcttccctgagggagcaatgtactgcaggagcaggctgctgtctccagcctgccacaggccgcttggacaccaggcccttctgtagcggtcggggcaacttcagcactgaaggatgtggctgtgtctgcgaacctggctggaaaggccccaactgctctgagcccgaatgtccaggcaactgtcaccttcgaggccggtgcattgatgggcagtgcatctgtgacgacggcttcacgggcgaggactgcagccagctggcttgccccagcgactgcaatgaccagggcaagtgcgtgaatggagtctgcatctgtttcgaaggctacgccggggctgactgcagccgtgaaatctgcccagtgccctgcagtgaggagcacggcacatgtgtagatggcttgtgtgtgtgccacgatggctttgcaggcgatgactgcaacaagcctctgtgtctcaacaattgctacaaccgtggacgatgcgtggagaatgagtgcgtgtgtgatgagggtttcacgggcgaagactgcagtgagctcatctgccccaatgactgcttcgaccggggccgctgcatcaatggcacctgctactgcgaagaaggcttcacaggtgaagactgcgggaaacccacctgcccacatgcctgccacacccagggccggtgtgaggaggggcagtgtgtatgtgatgagggctttgccggtttggactgcagcgagaagaggtgtcctgctgactgtcacaatcgtggccgctgtgtagacgggcggtgtgagtgtgatgatggtttcactggagctgactgtggggagctcaagtgtcccaatggctgcagtggccatggccgctgtgtcaatgggcagtgtgtgtgtgatgagggctatactggggaggactgcagccagctacggtgccccaatgactgtcacagtcggggccgctgtgtcgagggcaaatgtgtatgtgagcaaggcttcaagggctatgactgcagtgacatgagctgccctaatgactgtcaccagcacggccgctgtgtgaatggcatgtgtgtttgtgatgacggctacacaggggaagactgccgggatcgccaatgccccagggactgcagcaacaggggcctctgtgtggacggacagtgcgtctgtgaggacggcttcaccggccctgactgtgcagaactctcctgtccaaatgactgccatggccagggtcgctgtgtgaatgggcagtgcgtgtgccatgaaggatttatgggcaaagactgcaaggagcaaagatgtcccagtgactgtcatggccagggccgctgcgtggacggccagtgcatctgccacgagggcttcacaggcctggactgtggccagcactcctgccccagtgactgcaacaacttaggacaatgcgtctcgggccgctgcatctgcaacgagggctacagcggagaagactgctcagaggtgtctcctcccaaagacctcgttgtgacagaagtgacggaagagacggtcaacctggcctgggacaatgagatgcgggtcacagagtaccttgtcgtgtacacgcccacccacgagggtggtctggaaatgcagttccgtgtgcctggggaccagacgtccaccatcatccaggagctggagcctggtgtggagtactttatccgtgtatttgccatcctggagaacaagaagagcattcctgtcagcgccagggtggccacgtacttacctgcacctgaaggcctgaaattcaagtccatcaaggagacatctgtggaagtggagtgggatcctctagacattgcttttgaaacctgggagatcatcttccggaatatgaataaagaagatgagggagagatcaccaaaagcctgaggaggccagagacctcttaccggcaaactggtctagctcctgggcaagagtatgagatatctctgcacatagtgaaaaacaatacccggggccctggcctgaagagggtgaccaccacacgcttggatgcccccagccagatcgaggtgaaagatgtcacagacaccactgccttgatcacctggttcaagcccctggctgagatcgatggcattgagctgacctacggcatcaaagacgtgccaggagaccgtaccaccatcgatctcacagaggacgagaaccagtactccatcgggaacctgaagcctgacactgagtacgaggtgtccctcatctcccgcagaggtgacatgtcaagcaacccagccaaagagaccttcacaacaggcctcgatgctcccaggaatcttcgacgtgtttcccagacagataacagcatcaccctggaatggaggaatggcaaggcagctattgacagttacagaattaagtatgcccccatctctggaggggaccacgctgaggttgatgttccaaagagccaacaagccacaaccaaaaccacactcacaggtctgaggccgggaactgaatatgggattggagtttctgctgtgaaggaagacaaggagagcaatccagcgaccatcaacgcagccacagagttggacacgcccaaggaccttcaggtttctgaaactgcagagaccagcctgaccctgctctggaagacaccgttggccaaatttgaccgctaccgcctcaattacagtctccccacaggccagtgggtgggagtgcagcttccaagaaacaccacttcctatgtcctgagaggcctggaaccaggacaggagtacaatgtcctcctgacagccgagaaaggcagacacaagagcaagcccgcacgtgtgaaggcatccactgaacaagcccctgagctggaaaacctcaccgtgactgaggttggctgggatggcctcagactcaactggaccgcggctgaccaggcctatgagcactttatcattcaggtgcaggaggccaacaaggtggaggcagctcggaacctcaccgtgcctggcagccttcgggctgtggacataccgggcctcaaggctgctacgccttatacagtctccatctatggggtgatccagggctatagaacaccagtgctctctgctgaggcctccacaggggaaactcccaatttgggagaggtcgtggtggccgaggtgggctgggatgccctcaaactcaactggactgctccagaaggggcctatgagtactttttcattcaggtgcaggaggctgacacagtagaggcagcccagaacctcaccgtcccaggaggactgaggtccacagacctgcctgggctcaaagcagccactcattataccatcaccatccgcggggtcactcaggacttcagcacaacccctctctctgttgaagtcttgacagaggaggttccagatatgggaaacctcacagtgaccgaggttagctgggatgctctcagactgaactggaccacgccagatggaacctatgaccagtttactattcaggtccaggaggctgaccaggtggaagaggctcacaatctcacggttcctggcagcctgcgttccatggaaatcccaggcctcagggctggcactccttacacagtcaccctgcacggcgaggtcaggggccacagcactcgaccccttgctgtagaggtcgtcacagaggatctcccacagctgggagatttagccgtgtctgaggttggctgggatggcctcagactcaactggaccgcagctgacaatgcctatgagcactttgtcattcaggtgcaggaggtcaacaaagtggaggcagcccagaacctcacgttgcctggcagcctcagggctgtggacatcccgggcctcgaggctgccacgccttatagagtctccatctatggggtgatccggggctatagaacaccagtactctctgctgaggcctccacagccaaagaacctgaaattggaaacttaaatgtttctgacataactcccgagagcttcaatctctcctggatggctaccgatgggatcttcgagacctttaccattgaaattattgattccaataggttgctggagactgtggaatataatatctctggtgctgaacgaactgcccatatctcagggctaccccctagtactgattttattgtctacctctctggacttgctcccagcatccggaccaaaaccatcagtgccacagccacgacagaggccctgccccttctggaaaacctaaccatttccgacattaatccctacgggttcacagtttcctggatggcatcggagaatgcctttgacagctttctagtaacggtggtggattctgggaagctgctggacccccaggaattcacactttcaggaacccagaggaagctggagcttagaggcctcataactggcattggctatgaggttatggtctctggcttcacccaagggcatcaaaccaagcccttgagggctgagattgttacagaagccgaaccggaagttgacaaccttctggtttcagatgccaccccagacggtttccgtctgtcctggacagctgatgaaggggtcttcgacaattttgttctcaaaatcagagataccaaaaagcagtctgagccactggaaataaccctacttgcccccgaacgtaccagggacttaacaggtctcagagaggctactgaatacgaaattgaactctatggaataagcaaaggaaggcgatcccagacagtcagtgctatagcaacaacagccatgggctccccaaaggaagtcattttctcagacatcactgaaaattcggctactgtcagctggagggcacccacggcccaagtggagagcttccggattacctatgtgcccattacaggaggtacaccctccatggtaactgtggacggaaccaagactcagaccaggctggtgaaactcatacctggcgtggagtaccttgtcagcatcatcaccatgaagggctttgaggaaagtgaacctgtctcagggtcattcaccacagctctggatggcccatctggcctggtgacagccaacatcactgactcagaagccttggccaggtggcagccagccattgccactgtggacagttatgtcatctcctacacaggcgagaaagtgccagaaattacacgcacggtgtccgggaacacagtggagtatgctctgaccgacctcgagcctgccacggaatacacactgagaatctttgcagagaaagggccccagaagagctcaaccatcactgccaagttcacaacagacctcgattctccaagagacttgactgctactgaggttcagtcggaaactgccctccttacctggcgacccccccgggcatcagtcaccggttacctgctggtctatgaatcagtggatggcacagtcaaggaagtcattgtgggtccagataccacctcctacagcctggcagacctgagcccatccacccactacacagccaagatccaggcactcaatgggcccctgaggagcaatatgatccagaccatcttcaccacaattggactcctgtaccccttccccaaggactgctcccaagcaatgctgaatggagacacgacctctggcctctacaccatttatctgaatggtgataaggctcaggcgctggaagtcttctgtgacatgacctctgatgggggtggatggattgtgttcctgagacgcaaaaacggacgcgagaacttctaccaaaactggaaggcatatgctgctggatttggggaccgcagagaagaattctggcttgggctggacaacctgaacaaaatcacagcccaggggcagtacgagctccgggtggacctgcgggaccatggggagacagcctttgctgtctatgacaagttcagcgtgggagatgccaagactcgctacaagctgaaggtggaggggtacagtgggacagcaggtgactccatggcctaccacaatggcagatccttctccacctttgacaaggacacagattcagccatcaccaactgtgctctgtcctacaaaggggctttctggtacaggaactgtcaccgtgtcaacctgatggggagatatggggacaataaccacagtcagggcgttaactggttccactggaagggccacgaacactcaatccagtttgctgagatgaagctgagaccaagcaacttcagaaatcttgaaggcaggcgcaaacgggcataaattggagggaccactgggtgagagaggaataaggcggcccagagcgaggaaaggattttaccaaagcatcaatacaaccagcccaaccatcggtccacacctgggcatttggtgagagtcaaagctgaccatggatccctggggccaacggcaacagcatgggcctcacctcctctgtgatttctttctttgcaccaaagacatcagtctccaacatgtttctgttttgttgtttgattcagcaaaaatctcccagtgacaacatcgcaatagttttttacttctcttaggtggctctgggaatgggagaggggtaggatgtacaggggtagtttgttttagaaccagccgtattttacatgaagctgtataattaattgtcattatttttgttagcaaagattaaatgtgtcattggaagccatccctttttttacatttcatacaacagaaaccagaaaagcaatactgtttccattttaaggatatgattaatattattaatataataatgatgatgatgatgatgaaaactaaggatttttcaagagatctttctttccaaaacatttctggacagtacctgattgtatttttttttttaaataaaagcacaagtacttttgagtttgttaaaacggaattc

SEQ ID NO: 54649 - DNA, 446 bp, Homo sapiens
ggcagcggcggcggccggggaggttcacaataaaggtgctaagaaagagaatgtaagacaggaaaataattaaatattcttaccgagtgtcttcaataggccgtgtttaagaggcgtcttacactccctgttgccagtggctggaacacaatggatcacacaggggcgatagacaccgaggatgaagtgggacctttagcccatcttgctccaagtcctcagagtgaagctgtggctcatgaattccaggaactctccttgcagtccagtcaaaacttaccccctctgaacgaaaggaaaaatgtgctccagctgaggctgcaacaaaggaggacgagagaacaactagtggaccagggcatcatgccacgcaagatttataccatcactgccatccctaacgtgacagaacatgacggtcgtgtccaaaaaaacctgatctttct

SEQ ID NO: 54650 - DNA, 70 bp, Homo sapiens
ggagtagggcccctagagagcctcaggatggaaagaccaagtgatcagagggttagaacttccccactga

SEQ ID NO: 54651 - DNA, 490 bp, Homo sapiens
cttaaggggagcatgttttctgtgatatctgtgtgatcgtcccattaaatagaatgaattctactattctttggttttatcaagaatcgactttctggtctgttggccagtgaggcaggcattactggttacctaactgatagtcttccctgtgcctgcttctttcatgctcaagaaccgtaattttgttcagatattgagtaagcaacaatgcacttaggggaggtattaacattggcttaaacctttcatgataattctttagtaatcccagtgactggcatagactggtctcatctaattggttctggccaatcaaagaaagtctcctgggggagggttcttggaaagattttctttttttgatcagaatgggagacagttctgtgaagaaagcctctttttgctgccactcacatttcctgcgtttgaatgtggtagtgtgagtgtgattctgaaagctatagcagccgactcgtaaccccgaggc

SEQ ID NO: 54652 - DNA, 350 bp, Homo sapiens
  misc_feature (1)...(350): n = a,t,c or g
tgtgcctggcccacaaggggtctttataagagaaagaaggaagcatgagagtcagtataagagagatttgaagatgctacactgctggctttgaagattgtttaaggatnnnnnnnnnnnnnnnnnnnnnnnnnnnnnnnnnnnnnnnnnnnnnnnnnnnnnnnnnnnnnnnnnnnnnnnntacagggatgcagtcctgccagcccattttggacttctgaacttnnnnnnnnnnnnnnnnnnnnnnnnnnnnnnnnnnnnncagacttcgtataatttgttactgcagcaataggaaactaacatggagtgtgaaaccttaacattggatttagacgtggctggataga

SEQ ID NO: 54653 - DNA, 885 bp, Homo sapiens
  misc_feature (1)...(885): n = a,t,c or g
gcggtactcagcaacccggagaagaggaagcagtatgaccagttcggcgatgacaagagccaggcggcccggcacggccatgggcatggggatttccaccgtggctttgaggccgacatctcccctgaagacctcttcaacatgttctttggcggcggcttcccttctagtaacgtccacgtctacagcaacggccgcatgcgctatacctaccagcaaaggcaggaccgcagggacaaccagggtgatggcgggctaggggtgtttgtgcagctgatgcctatcctcatcctgattctcgtgtcagctctcagccagctcatggtctccagtccaccctacagtctgagtccaagaccgtccgtgggccacatccacaggcgagtcactgaccacctgggtgtcgtctactatgtgggagacactttctccgaagagtacacaggctccagcctcaaaacagtcgagcggaatgtggaagatgattatatcgccaacctccggaacaactgctggaaggagaagcagcagaaggaaggcttgctgtaccgggcacgctactttggcgacacagatatgtaccacagagcacagaagatgggcacccccagctgcagccgactgtcagaggtgcaggcctccctgcatggatagtcctgggccagccacaccaccgaggtccaaactatgaaatccctggagaatttttggtgacatgcactgagccaaggtgatggactgtatatttgaggaaagacaaacaaagaaacaaaattaaaatggaattggaggccgaacgctgcacanttgccctctctctcacccagtaaatgcagaaagtcttaggacagacagaaaacctgccatgggggtgttccctcctcg

SEQ ID NO: 54654 - DNA, 1146 bp, Homo sapiens
gaagctattagtactttaaggaaaggtggtttttattcacagaaagttacaactaatccaaaccttaggatcatcagtctaaacacaaacttgtactacggcccaaatataatgacactgaacaagactgacccagccaaccagtttgaatggctagaaagtacattgaacaactctcagcagaataaggagaaggtgtatatcatagcacatgttccagtggggtatctgccatcttcacagaacatcacagcaatgagagaatactataatgagaaattgatagatatttttcaaaaatacagtgatgtcattgcaggacaattttatggacacactcacagagacagcattatggttctttcagataaaaaaggaagtccagtaaattctttgtttgtggctcctgctgttacaccagtgaagagtgttttagaaaaacagaccaacaatcctggtatcagactgtttcagtatgatcctcgtgattataaattattggatatgttgcagtattacttgaatctgacagaggcgaatctaaagggagagtccatctggaagctggagtatatcctgacccagacctacgacattgaagatttgcagccggaaagtttatatggattagctaaacaatttacaatcctagacagtaagcagtttataaaatactacaattacttctttgtgagttatgacagcagtgtaacatgtgataagacatgtaaggcctttcagatttgtgcaattatgaatcttgataatatttcctatgcagattgcctcaaacagctttatataaagcacaattactagtatttcacagtttttgctaatagaaaatgctgattctgattctgagatcaatttgtgggaattttacataaatctttgttaattactgagtgggcaagtagacttcctgtctttgctttctttttttttttctttttgatgccttaatgtagatatctttatcattctgaattgtattatatatttaaagtgctcattaatagaatgatggatgtaaattggatgtaaatattcagtttatataattatatctaatttgtacccttgttgaaattgtcatttatacaataaagcgaattctttatctctaaaaaaaaaaaaaaaaaa

SEQ ID NO: 54655 - DNA, 154 bp, Homo sapiens
  misc_feature (1)...(154): n = a,t,c or g
gaaagaaaaatgttacatgtcatatcaaatttgtacacacaagaccccttaaaggatggtggaattctttaaataaataaatcgaatactaaatgccttatctagcttcaattcaattattagaactgntcagttttgntggntttttaaaaca

SEQ ID NO: 54656 - DNA, 422 bp, Homo sapiens
atttgagttctcaagcaagctttgactttaacttctgagttacgagatattggattaggtgtgtttaacctctttggatcttaattttcggaggggtgtatttttaggtccttctgaattccaatcaggtgaaaaaaaaatgaaataggtttcaattcttcttattgtaggttcttgcaatttcactttaagtagtacccctattttttagtagcattcctgtttttttcttgttagtgaatcaacttttcaacacgtgttgttgttagacacaggctgtctgagtcaagatgctagttgcttctgtattcagatgtctctagcattgtcttgattaactgaagttaaaacactttaaaaggcagttcttccctagtttcaaactgcaggaatagtccatggacacgttattcagaggtact

SEQ ID NO: 54657 - DNA, 99 bp, Homo sapiens
caaagagcgagttgtaatcctcatcactgccagggctgagccagagcagacagaaaatcgtcatttgctcgttggagacttgttaggttacagctcctg

SEQ ID NO: 54658 - DNA, 804 bp, Homo sapiens
  misc_feature (1)...(804): n = a,t,c or g
ggcttctatccctaaccctttcctacctttcctctccgtcaacatgtcctcatactgaagacaaacttgtttcaatgatagtcttcattttcaaaaacaaaaaggcaggcagacagaaataatgatgttttcttgcactaagaaggtactacttgtacacatatatcaaaacctcattctgcaaagtttttgaaggtttcaatgggaaatttgattttattacaaaataaaacattttttaatgttaaagtttatatattccatgcttgttttctcattcactggcatggatgatcaggagctgcctatatatgaaggcagaatcagactatcaggaaaggagctggccagggccacagccagtcaagatctctgagcaacttagagacattggtgtcattatatgaagcttgcatttaatacatttatacataatacatttgtacatttaattcataacgtctcttggtcacagatgccttatatataaaataagttgccagatctctaagattgcctagtacacctttgtatctcatttgatgtgatacccagaagagatcattgttttttgtttttgtttttgtttttttcaagaagatccttcgtgatcaccatgctgttctcatggtaagaactggagttatgtttttaaatttggaaatatgacattttatgtagcactttataaaaagtgaaagcgacaaattccaccgctgcttaatactgctttgcttctttttattgacatgatagataaatatgtatctacacagagtaataataataaancacagtaaacat

SEQ ID NO: 54659 - DNA, 235 bp, Homo sapiens
ttatcctttttttaaaaaaacataaatactaggatattgagattattgaaaatgcttttggtgcttcagttttgaatttatacttagagcagtttttgaagtttaagatctcatttacttctaagtaatagatttactagtaatcaaaatcgcttcaaaataccgtaatcctcattgctgtaaactcctacggggcaggtttggagttttataaagaggcaatatagtgtactct

SEQ ID NO: 54660 - DNA, 1185 bp, Homo sapiens
tttttttttaattttctttaaacctttttttatttagagatttttctggtaaggagatataccataggaaagcaatttcactggcagtgaggtatgtatatactctaccaaaatactccttattttaactgtttttaactttatttacatacgaagcaaagaatcaatgcatatccttggttcaactatagtattagccatactacatgaaataaaatggtgcttgcatacaaaaacttgttgtttgtaaaggaatctgatttcagattaaaatacctaattgtttttggaaaaaatttttaaaaagaatcacaatttatcatgaccaagacacctgcaccatattttccattcctcacagcacatttatttcagtaattctgttatgtcggttcttagcatgagcatagtgttacacgattttcgtacatataatcacatccaaaacaagttctaaaatttaaattgtaaacattctcatatgtagaaatattttaattggtgtattaagttttgctaactgatcaaatttggaagataatataaatgagaacgtctattctaaactgtgtagtgagcattgtttattaattacatttctacaatgttaaataaagtaagaggcaaacctgtcctgtaagcatgtcaaattttaggtaaaacattaaaaagaaacaaacctgttaacaaaagaatggtcttgcaataaagaacattagatttttaaaatctattatgatacaaaaatgtaaagggtaaatagcatctttgttgacaaagtaggaggtagcatggatgcaccactttattgtctgagaaatgcaactggagtaaagaatatttccttaccacaaataatttccagaactatgtacatatttcttttagaaatacttgtttaaacaaatctccctccactttttagtataaaaaaaaccgttccatgtgattttaaaaaaaacacttacacatctagatagaatagtactctgccctatttgagtgaacagtctcaaactatgaagtacatgatatttaatgccctaatttgagtaaatttagtcagcggttcttggtattatacaaaacactaaatacatacaaacaaaatataatatcttatttttctatgcaagtcttgtggggaataaacagagccttgattctggtaacactgcaaaaaac

SEQ ID NO: 54661 - DNA, 1435 bp, Homo sapiens
cacaacaattctatgaaattagctggggagatactgtccttatttttcacagctgaagaaaccaaagctttgggaagtttgtgacttctctgagatcacagctggtgatagaaggagctgggacacgcgcttgggttgactggcttctggttttggttctctggcttctagtgctggaagaagccctctctttcccttctctttcctcagtagcatctgactcttttcataagcaaacagctgtataaacaaagcccccattttggtcaagcacagggtgaatgtgatattgttcccacaaccttattctccactcaacagccgcctggctttggggaagaggccgccttcaggtgacagtgcagctgtccaggtggccgtgcactgaaccaggctgagggagacaaaaaccccgcagacccgcctgcctttcagcgtccagttaactgcagaagtttaggctcacctcaaagatgtctagtttttccaagttacaatacagcagtttcctacagaacacccccttcctcaattgccaaggggccgcatcgcacggcatcaggccaccactgcaggccagcagattccaccccaggaacggtcatgaactcagcctttgtctcaacgaggggcgtaacatttccttacagtcaagccccatcaactagaagtgcttattacttttaggattaaaaaagtaataacagactttgacttaatactctgtcttttcagaggcaaagtgggtgggtagaggggagctttaaaaatagaagtacaaaacaacatcctggaaacatatgaccccagatggaataatgtcacattccccagtgcagataatgggctgctgctggctctgtggtgtctgtctgcagaagatttgctcagtcaaggaaattcaagtggtgagacctttccaccatgggtggtaagagaaacctgccttcaccaaaatctctgaaggggaaagaagtggagagaaaggtttgcttcacttcggggactgcagtttgagaaataaaagggatacagagatatctgcactttgtagaaagggcaagattatttgcttatatctgaagggaggtgggtggttttgctggatgtttggtctgaaagagttacttttgataaagttaatctaattgtagttatattttctgtgtgcttttttttaattactaagaaaaaaattggtgagttcagtagctttggtattatgagtgcaaatcataatagctccaatgtgaaaaaaaaaatcaaaagtataacttgtcacttaatgttagaaaattgcctaaaatgcagtgtaataaataatctctgtaccaaatagtaatttaaatggggtaattttctgcaaggaaaatgtactgtttttatgtttccaaccctcttgaattaaaataaaaacaacttcttttctaaaaaa

SEQ ID NO: 54662 - DNA, 371 bp, Homo sapiens
cgcggccgcgtcgacgcagagtcagcaagaagagaggggagttaagaagagacatctaaagaggaggcttagcattatgaaaagtgtccggagatagcttgcttgtgtttatcagggaccactgaaaaacgtgactgccatcactggctaagatatagtggcagaggccagagcatgaggaacaagtagccagtgagatgactacacaggccgacagtgtttgaattctccctccagagacttgtccacagcttctcgtttacccaaaaccacagtcaaaatgtagctgacgtcagaagacaacagatttagattccagctctgcaggtgtagtttcacttaagatcaaatagattaattattcctatatt

SEQ ID NO: 54663 - DNA, 440 bp, Homo sapiens
gtgaatggggggctgttgttcacaggagggatttggaggcccacaggaggcctgagactccctggtggccctgcagctgagctggcagggctgggcctgaggcctctggcgtggcccggggccagtcagtgctgcatagtgagtcctgaatgtcaagtgggtctggctgtcctgccccgggcaggggcccttgagggcagcagagccttctcttcagctagagcatcgcaggcctgcaccctcgctctgtcgcttcttcctgcgtgaccttgggtggtccagacactgtcctgggctttattcgggggaggcctgcctgctcagctcccaccagccctttgtgaccccgtgtcctcaggcagggatcaagttcatgcccactgacctcagcctctctctcgggctgtctcctccagctcagggcaggccagatgcaggac

SEQ ID NO: 54664 - DNA, 345 bp, Homo sapiens
tctcgaggatccgaattcgcggccgcgtcgacctctaaaaatgtgtcttacaagactggaatcatgtggagaccatatgtactgattctgctgaatatgtcctgtgaagccacagttaggtctagagatggaagaatcgtctctttgctagtcagaagacctgaacattttcttttataactggattttaagatgagttatagttctactgttgcttgccagcactgtctggatttaatacaatcctgtcatttctcaaaacagtgctggagaaaacctgattcttagtgttcacagtcaagcatgttaagtattgttccttgttatgtaaaaggggttgaagtg

SEQ ID NO: 54665 - DNA, 332 bp, Homo sapiens
ggataataaaatcttgataagacagggttttcttctttttgagtcagtattttatcccaagcacctagcacatgcctggcttggactgggtgctccacaaaattctgtggaataacgaaaaaaatgaatgaaggtttgtccggagctataaaactggtctgtttatttacttttcagatggttgtttccctgaatatcagagttgttaatgtccaaagctaacaagtaaccaacaaaaagttggttaaacattcttctagacattgcctgtagtagttaatttggggaacagatatcttttttgcatttgagtgtaagaaaaggaaaaagac

SEQ ID NO: 54666 - DNA, 396 bp, Homo sapiens
tgacccccagatgccagtaaaactaatcatgtgcagggaaggtggtcacgtcaataagattttgaaagcaagattcatcaaaaaataggccagatttgcagtcccacatgaacctgcattgaaccctcattgactatccaggtatgtattactttaaaaaaataaaaactaacataaccttaaaacatattagcaaatttccctgacacaatgaaagtaggatattattctaaaatttttcctttatgtatgtagctttttagaaaccctacaaatgtgttttgtgtaaaaggatgtagtctgcaatcattttctgactcttggtgtaataaaaaataagtggcctaattatttaaaagcttgcgtttgaaattattttttgagaaacagttaaag

SEQ ID NO: 54667 - DNA, 361 bp, Homo sapiens
  misc_feature (1)...(361): n = a,t,c or g
aagtaagccacactatatcttcatgagttgcaaatccatggaaacacagtaaaccagccctgaaacaaagcatttccttgttttcagtggtattagatcttggttccacgtctgtctcattcttcactgggccttacaggttagttttaattaactctatggtatttttcttattcttgtttgatcatgttaaaaattggacctaataaaagtattttattcttgcttttccatgcttctctacaggtccaaatactgaatgtctcctttactttttctcttttaaannnnnnnnnnnnnnnnnnnnnnnnnnnnnnnnnnnnnnnnnnnnnnnnnnnnnnnnnncaagctcactgcagcc

SEQ ID NO: 54668 - DNA, 119 bp, Homo sapiens
gtttgccatgaaaaaaggtgtgtgtcccagagacagggtgtgtatggtacaaatggattttgtccatgtctttccttcccttgccagtccagccaccctactgtctttttttttttttt

SEQ ID NO: 54669 - DNA, 1067 bp, Homo sapiens
gcggccgcagacgccagtgctggccctcaggcgggcccctcagccggcgaggggcgggacttccgccgccaatccctgagggggtaacatcgcccgccaatccctgagctgggcagggtgggccccgctcacccccctgggctgcccaccccggggtgttcccgccgacttctgggcggggcctcccgggccaggcctgccgggggcggggcccgagcagccggactggccaggttcagcgcgcctcagtagggttgtattccgtctctcccgaggacacctgggagatgcgccgcgaggaccgccacagcttccgcgcgaactggctgctgcgcacctcagagggctgccccgcgaccaccacgatgagcttgccatcctccaggcccaccagcacgtggctgcgctccttggtcacggccacgctgcggatggccaccttcatgggcaagggaggcgcggcggggagcagtgtgtttagttggaggatgtgcagggcgcactgggcggtgcgacagacacaaagtcctctgtcaccgtcagggctgtaggctgctctgccaggggcagtgaagcccgcaacttcccattgactgaatacaggtgcaaggagtaggtgacctgggccccaggacgttcccacgctgagctctgtaccacaatctggcttcggaccccaatgccaggtggaaaataggtccagggaatgtggcacccagaggccgtagtgccgctacaaactgtccgcggcgtacagtgtgtatgatcacagttccatcctcagatccagacacagccatgtcaagttcagtgctgatggccacacagctcactgcagccccatgcccatacaggacctgcacaggctttggtgccaggcctactgacagaccaccctgatgcaggagccgccacaccatgcacgtggtgtcccgggagcctgagatgaggtagatgccacaggtgtccagtgcaaggcaggttactacatcaaggtggcagctgagctggctcaacagcttgccacggggtagtgcagtcacccgcaggctgccatcccagtggcc

SEQ ID NO: 54670 - DNA, 110 bp, Homo sapiens
gggaagagaaaaacgtagggtgttgggagcagaggcgggaggcgggagatcctgcgaaatcggagtccctttggagtgggggaggccgtccaggcgtgcaagggcccggc

SEQ ID NO: 54671 - DNA, 401 bp, Homo sapiens
gtggacttctttgatatcagtgatgaaagtagtggagaaggaagtggaagtggctgtgagtatcagcagtgcccttcagagtttgactacaatgccactgaccatgctgggaagagtgccaatgagaaagccgacagtgctggtgtccgtcctggggcacaggcctacctcctcactgtcttctgcatcttgttcctggttatgcagagagagtggagataattctcaaactctgagaaaaagtgttcatcaaaaagttaaaaggcaccagttatcacttttctaccatcctagtgactttgctttttaaatgaatggacaacaatgtacagtttttactatgtggccactggtttaagaagtgctgactttgttttctcattcagttttgggaggaaaag

SEQ ID NO: 54672 - DNA, 313 bp, Homo sapiens
aatcaaaatgctgaatccttaaaaccagacaagggcttatttgctttattacttaagggtttctataaatagccagaccccatggagtttgaatatcattctctttacacaattctgcctacttataatcttaaaagcattgagcttcctctaactgtaccactgtaacttaaaatgcatctgaagctaaaccatagcatttcatgcagttgctgtgaatatgactttacaattgctttacgaagattctacctcacagataataatttattactgtatgatattcctctttgactaaaactttggatttttt

SEQ ID NO: 54673 - DNA, 860 bp, Homo sapiens
ggagacctaattatcctaaaagatcatacattttctacctatgaattttgctgcatacagaaagtgccctttcctcaggaagttgctgtgtttcatttctttggatggactcttatctagaatacatagcagctctgcaaagaaacagtttttaaaaatgggaacttctacattgaaaagtccccatttttgtgccaactatgattagtgagaggaagaaatcttattctatggcatatgtatggaagggtgtaaagattcttttgaaaggtttattcacattgtagaacagcaaatgacatttttacagtatttttttgtaaagcaaactattttgtgccttgaatttggtatatgtgtattagtgaaacattgtaaaggtgaacttctacctctgtatctaaatgtataccatccacttgtaaatgactataaactattatgtgattgcttttttttttagaatgtcttgtttaaatagtggccaatgtttaaggctgttaaaataagccaacttttactaattggggagttttataaatgactgattaaatttaaagaattaacttacatgcaattgtgtgattattagttatcagcagtgttgtaaggaaaattattgtgtttttttttatgatcattatcccactttaggtaaagaaaaatattggaatggaatagtgttgggaaacagacattaacaacctagggtgcctgcactcaaatagccgatgttactgtccctagattagagacttgattaagggcttgtttgtaccaaaagtggggaaacaatgccatgacctgtgttttagtttggctgcaccacagatcaaatctgcactgtgtctacatatagg

SEQ ID NO: 54674 - DNA, 930 bp, Homo sapiens
cctcgtgctgctctgcagttccagctggaccaaatggactgcaagggaaagaaaagagccagctgcagaatagccgagacctggcccagaatgagcagcgcatcctggcccagcaggtccatgcactagagaggcgtctcctctctgcctgctaccatcaccagcagggtcctggcctgaccccaccgtgtccctgcttgatggccccagctcccccttgccatgcactgccacccctctactcctgcccctgctgccacatctgcccactgtgtcgagtgcccctggcccactgggcctgcctggccaggggagcaccacctgccccaggtgttggaccctgaggcctcaggtggcaggcccccatctgcccggcccccaccctgggcacccccatgcagccctggctctgccaagtgcccaagagagaggagtcacagtgactggactcagacccgagtcctggcagagatgttgacggaggaggaggtggtaccttctgcacctcccctgcctgtgaggcccccgaagacatcaccagggctcagaggtggggccggggttccaaacctggcccagagactggaggccctcagagaccagattggcagctccctgcgacgtggccgcagccagccaccctgcagtgagggcgcacggagcccaggccaagtcctccctccccattgaaggccaagtgggaacccaggagactgctgtgtgacctcagactgggctccacactcttgggcttcagtctgcccatctgctgaatggagacagcagctgctactccacctgcagctgggctaggggcggggactgggggtgctatttaggggaacaaggggattcaggagaaaccaggcagcaggggatgaaatacatgaataaagagaggcatcagctccaaaaaaaaaaaaaaaaaaa

SEQ ID NO: 54675 - DNA, 334 bp, Homo sapiens
gcttacttatggagttatctcccaaggagaggactcagacacaggtggttgctgtgtaatatgttacttcccaacaatggacctcatttggctaggcatcacaatcacctagggagtcggtgcaaaacaaaatatcccagtcccctcccctgaaacactgactcaggaggtttggttgggggccaggagtctgttcctaaatattccaggtagttctggtgcaggtaagtggccctgagacagtatgttgggaaatgctgacgtaaaggtatcagggccgggcgctgtggctcatgactataatcccagctgtttgagaggccaatgcaggagg

SEQ ID NO: 54676 - DNA, 570 bp, Homo sapiens
acaaatttgaggggggaggctttccatatggaatttaagatatttttggatatatattcaacttttttttttaagagttgggggtcttgttatgttgctgatatggtttggatggctgtcacttccaaatctcatgttgaaatcgtaacccccaatgctggaggtagggcctcgtgggaggtatagaatcatggggcaaatccttcatgaatggcttggcaccatcaccttggtgatgagtgagatcttagttcatgtgaaatttggttgtttagagtctgggacctcctcctctctcttggctccctctctcaccatgtgatatgctccgctcccattttgccttctaccatgattgtaagcttcctgaggccctcatcagaagcagctgctggtgccatgctttgtgtacagcctgcagaaactgtaagccaattaaatctctcttttgcaagaattacccaatctcagatattcctttacagtaatgcaaacagattaaaacagattagtactgacagtggggcactgctatacatattggaaaatggagaaacagctttggaactg

SEQ ID NO: 54677 - DNA, 371 bp, Homo sapiens
cttcttcctccacttcccctaccctccaccgtccgggagccgccgccaccgccgccgaggagtcaggaagttcaagatggccgccgcggagacccagtcgctacgggagcagccagagatggaagatgctaattctgaaaagagtataaatgaagaaaatggagaagtatcagaagaccagtctcaaaataagcacagtcgtcacaaaaaaaagaagcataaacacagaagtaaacataagaaacataaacattcctcagaagaagacaaggataaaaaaacataaacataagcataaacataagaaacacaaaagaaaagaggttattgatgcttctgataaagagggtatgtctccagcaaaaagaacg

SEQ ID NO: 54678 - DNA, 688 bp, Homo sapiens
cattcttttctggtcctattttaatccatcatttttatagcagtcaatacaaatcaaaagaattttggaaatgattcattttttattcaaatataactacatttaacaatcaaggtcatgtggcttagaaacctgagcttggttttagactcagacagacagttcattgtcggcagccattaaaacaatgttcttgacccaagaccagatgaagagaagggacaaaagcaatgttttcaagtacacattaaatttcattcaataatagtatgtcttcataaaactaccatgaataaaacaaacgattctaaaaggcagtgggcataaggagggctgcttcacagtctaccccagtcaccacattgaataatcgtattgtgtttatatcataaagtgaagttctagtctcatcccagtgttgagttcacctgatgaaccctgacccttttccctgcccaactcatcctgcaaatagaaatcttacttctaagggaatccatttgtctttcttcccattactgtggttcaaaaactgatactacagctgcagaaggcaacccaatatttaaggattttaatcacagaatcctgtaactaagactttctttaaagaaagacaaccagttcttttttatgtcatttatttagaaaaacccatttgcccctagtgaatgtactaaccttattt

SEQ ID NO: 54679 - DNA, 679 bp, Homo sapiens
ttttttttttttttcccggcgctggcttttattgcctcctggcagagaggaggtgtcccaggccaggccaggcaggagagggctggggccaggggagtttcagtctatgtggtggaggctcagatttggagctggaggggttggggcggttcttagagctgagcttggggccaagggtccctgggtctgggctgggagactcagtcagaaataggtattgcttatcctctgggactatgacagcccctccctggggttgggggtgtgacagggacagaagccgacccagggggtccctgagagcccaggggcaggaggatgcctgggactgcatctgcctcctgcggggcctggacagggagggggccagaccacagcggcccctcctccggtcattgtgcgggcctctgaggctgtggcaggtgcgcggggctcacagctcatcgtggtgccgggtcaggtcctcaccatagttggtggcctgactgcccacaaacatgttccaattacccaggatttacgctttgctcagccgcccgtccttgtccgtgtcgctctcgtgcagcaggtggttggcttccaccaggggctggtcctgggcagggggcagcacccagtggcccacctcactcctcggggtgcaggaaggctgtcagctcctctcgacctcgttccgaat

SEQ ID NO: 54680 - DNA, 381 bp, Homo sapiens
  misc_feature (1)...(381): n = a,t,c or g
ctcctccaacccttggtaactttattctgctttccnnnnnnnnnnnnnnnnnnnnnnnnnnnnnnnnnnnnnnnnnnnnnnnnnnnnnnnnnnnnnnnnnnnnnnnnnnnnnnnnnnnnnnnnnnnnnnnnnnnnnnnnnnnnnnnnnnnnnnnnnnnnnnnnnnnnnnnnnnnnnnnnnnnnnnnnnnnnnnnnnnnnnnnnnnnnnnnnnnnnnnnnnnnnnnnnnnnnnnnnnnnnnnnnnnnnnnnnnnnnnnnnnnnnnnnnnnnnnnnnnnnnnnnnnnnnnnnnnnttggggcacacatatctctttgagccctttttaataattttgtaacacagcaataacaatagctatagatcacttgtatagacatacc

SEQ ID NO: 54681 - DNA, 412 bp, Homo sapiens
ctcccagggacactcttgatggcaggaatgaaaatcttcaggaaagtgagattctaagtcaacctaagagtcttagcctggaagcaacctctcctctttctgcagaaaaacattcttgcacagtgcctgaaggccttctgtttcctgcagaatattatgttagaacaacacgaagcatgtccaattgccagaggaaagtatccgtggaggctgtcattcaaagtcatttggatgtcaagaaaaaagggtttaaaaataaaaataaggatgcaagtaaaaatttaaacctttccaatgaggaaactgaccaaagtgaaattaggatgtctggcacatgcacaggacaaccaagttcaagaacctctcagaaacttctctcattaactaaagtcagctctcccgctgggcccac

SEQ ID NO: 54682 - DNA, 377 bp, Homo sapiens
ctgaaatgcatctgtaattcctggccacaggtccttattgccattatttttaagtatcttcattggagatgaacactgacttttgcatatggtctcttacctcagggaagatcacttgctagcaactcatactactaatgacaggtttttgagaattgtactgacatcacatgttagctactaaatgcaaaatgtataaaagtattgttttatgtagttacctaccaatactatctgctactgaataactctctaaatatgtagacctcactaataactaacctttaggtaaaaaatttacttctgtcattaattacacttcaactggtcaatatagtggcagcataaagtgtttatttcagaatatcaatacagtt

SEQ ID NO: 54683 - DNA, 396 bp, Homo sapiens
tgctgtcattcattgggctactcgtttgtataacaaacctttaatgagtgccctttcaagccagatcctctgctctcctctgagtggatgagatgggtcagagatgactccgcaaggtcccagctctcagggagttggtctggtggggaggcaaaccacacacaacgtgactaatgccagacacagtgtcccgagtgtgaaccaagggtgcaggacacagagcaggtcatttgaacttgtgtgtgctggggaaaatgccacagaagggatggccaagctgggcctctaggagcaaaggcacagaagtgtgtgacagaggcatggctagggagactcgaacgtctagaacaggggtgcccaacccctgggccatagactgatagtcatccatggcct

SEQ ID NO: 54684 - DNA, 371 bp, Homo sapiens
cggacgcgtgggttctaaatgaatcccatcttgccattaagccccactacaagtccctccagctccatgaaacctttcccaataacccagtacaccctcatccctttttctgaatcattacatataattttattgtattacccaggttacttttgagagtgaaagtaggcactattattatttgtgcagagccaacaggcataaactagaaagtgtcctggaaaaactgggatgtatgttcaccctatctatatgccacttcctcattccttaatttatataaactttgactgcagtttttcagaggtatgcaatcttttcccttattagaacttaaatacttagtcatatttaattgcacttagcacaca

SEQ ID NO: 54685 - DNA, 388 bp, Homo sapiens
ctgctcccggcagggacttcctaagcggcagcttgtggcgctagggccaccagatgaaagggaggtgcacaggaaggagctgtggagtggaaagagcgcgggctttcgagcacatacaaacctgattacaaaagtcagatttctttatttcgtcttgggcacgtcattttaaccccgctcagcctctcttttgtgtatgaaactgaaagtaatagcttctgctgtgcaaaatgattagaggaatttgtgaagcgcttggcaacatactaggaccccagtaaataaatgcgggtggtaactttcctccaaatctgggtcccatccgcagttcctttaccaatgaatgactctaaccattcagtcgaccaagcctgaaaatatggcttta

SEQ ID NO: 54686 - DNA, 227 bp, Homo sapiens
ctttcatcttcctaaatccattattttcagtttttcagttacgtcatattgggggctgactgtgtgtcatgcagagtcccaggcactggggatggggtgtgaagggccggacttcaggatgagggacaactgtagagagcagtaatagatgcctttctctgtgggggcccaggctagaccctcctgagactggctgaggcctgacctcaaaggacagcaaatgctgg

SEQ ID NO: 54687 - DNA, 2480 bp, Homo sapiens
  misc_feature (1)...(2480): n = a,t,c or g
caccgccaccgcctggtccaggcccaagcccaggccctgcgcggagcggagcggcgcggcgtccacccgggcccagccagccggcgcggcgggggcgggtccaggatcttcggcggatcttcggcggatcttcggcggatcttccattctcagggcgggagccggagtccgggcgcccgggatcgggctgggcccgcgcccatggcaagcgcggcctgcccgggccctggggaccctgccatgtgaggcaggcccgggctgggggcccggccatggccggggaacggcccccactgcggggccctgggcccgggcctggagaggtgccgggggaggggcccccggggccggggggcacgggcggaggcccgggccggggccgcccctcctcctaccgggttctccgcagcgccgtgtctagcctggcgcgtgtggacgattttcactgcgcggagaagatcggggccggcttcttctctgaggtctacaaggttcggcaccgacagtcagggcaagtcatggtgctgaagatgaacaagctccccagtaaccggggcaacacactacgggaagtgcagctgatgaaccggctcaggcaccccaacatcctaaggttcatgggagtctgtgtgcaccagggacagctgcacgctcttacagagtatatgaatggggggacattggaacagctgctcagctcccctgaacccctatcctggccggtcaggctccacctggccctggacattgcccgaggcctgcggtacctgcactccaaaggtgtatttcaccgcgacctcacatccaagaactgtctagtccgacgggaagatcgaggcttcaccgctgtcgtgggtgacttcgggctggccgaaaagattcctgtgtatagggagggggcaaggaaggagccattggccgtggtgggctccccatactggatggctccagaggtgttacggggtgagctgtatgatgagaaggctgatgtctttgccttcgggattgtcctctgtgagctcatcgcccgagtacctgcagaccctgactacctaccacgcactgaggactttggcctgggatgtgcctgcttttccgaactctggtgggggatgactgcccactgcctttcttgctcctggccatccactgctgcaacctggaacccagcacccgtgcccccttcaccgaaattacccagcacctgggaatggatcctggagcagctgcctgagccagccccactcaccagggaccgccctggacacacaatcagggctctgttgcaagagggggtccctcttgccacgcttcccagggccagatccccggctttcccgaagccggtgcagacctcttccttgcccccatcaccagaatcaccccccaactggggggancaaatcttgactcgagtcaaccccttctcactacgggaagacctcaggggtggcaagatcaagctcttagacacacccagcaagccagtcctgcctcttgtgccaccatcaccattcccatccactcagctgcccttggtgaccactccggagaccctggtccagcctgggacacctgcccgccgctgccgctcactaccctcatcccccgagctcccccgccgtatggagacagcactgccaggtcctggccctcccgctgtgggcccctcggctgaagagaagatggagtgcgagggcagcagccctgagccggaacctccagggccagcgccccagctgcctctggctgtggccacagacaacttcatcagcacctgttcctcggcctcccaaccctggtcccctagatcaggacccgtcctcaataacaatcccccagctgtggtggtgaactccccacaaggctgggctggggagccctggaaccgggcccagcatagcctgccccgggcggcagccctggcagcggacagaaccctcgccacccccttcagctccccgggagcccgatgaggggctgccctgtcctggctgctgcctcggccccttcagctttggcttcctgtccatgtgcccccgccccacaccagctgttgcccccgtaccgcaacctgaactgtgaggcgggcagtctcctctgccaccgagggcaccacgccaagccacccacacccagcctgcagctgcctggggcacgctcttagcagtggagcccgtggtctcaggcctccaactttggccttcaggacaccctgtaagaacagagcacacttgctggacagtgccagttccagatgggctgaccggctcttctccccgtgtaggggagccccagcatggactcaagggacagagcacttccagtcgaccccccggctcgcgttcccgtggggatcactgaaccagacacagcattgctgacacatgagactaacacgtgcaattatttaaaaagatttcaataaaactgcctggctggctccgggccgcccctaaaaaaaaaaaaaaaaaagttct

SEQ ID NO: 54688 - DNA, 299 bp, Homo sapiens
  misc_feature (1)...(299): n = a,t,c or g
acgttttggtcattgagacccacatgtgtgacagtggtcccataaggatgttgctgaaaaattcctgttgctgcctagtgacactgtagccatcgtagcgccatagcacgacacgttactcacctgttcatggtgatgctggtgtaaacaaacctgtgctgccaatcatacaaaagtatagcacaatgacaattatgtacagtttatcataattctnnnnnnnnnnnnnnnnnnnnnnnnnnnnnnnnnnngattccactttttgtcattattttggaatgtactcctactaattataa

SEQ ID NO: 54689 - DNA, 1612 bp, Homo sapiens
taaaactaagtcagatttttatttttttttccatagaccacatcatttaataataaaaaaaataaaaataaaaattgaacaaaaggaaaaggtggatataaagtggaacctgtgggaaagaggcaagggctgcaggacagaagagactgggaactgcaggggccctgggactcaggaggagatgctgattcagctcataggtgacccagtcctggccccggctgttcccaagagaaggctgtaagtacccagggaggtggtaagcaggatggaggaaaaatcagaggactggggcacctggctgttccccatctctggccaaccacctccttgcctaacctagctcttgcctctcagactttaatgggaaatgagagggagggtcgggcttaagtcccaagagataggttaagggggtgtgtttggggggaaaaggatggccacttttccatttggtatgtatgtagggataggtgatgtgaaagacccttggctccagggtggtggagactgtgcctatccctctgtggccataaccccctggggccgagtggctggtacctgcagctctagtgttttcccagctagcggcgcccaccccggtcccgcacaggtgtgctccgactccggcttctgctgtggcgcttggtgtccctgcgatccctttccctgcctcgttctcggtccctttccctatcccgatctcggtcccccctgtcccgctccctttctctctctctctccctgtccctctcccgactgtgctcccgacgtttctctcgctccagctgtcggttccgttcccgctcggcttccttctcccgctccttttgctcttcttcttcttgctcctttcgccgcttctcccgctccttggcccgttcggcccgctctgcctctttctgaacgatctggctgtcagtcagtgggagccaatagatgcagggagctgccttggtctttcggaaaaggtcatccagcagcttggcaggtggttcctcctgggctttctctttcttctcactcttcttttctttagacttcgcacgttccttgcggcggcggtcacgggaccttgatcgggaacggggcccttctcgaactttgtcccgatcccattcacgctctgatcgagtccgctcccgccgctccatttcccgttcccgttctgcccactgttcccgcactgcccgttcctgctcccgctgctctgcccgggggtgctgtggtggctggaccgggggtgggggtggggggtgcaggggccgtggtattccctgctcctctgtcttagtttcagagggacggtccaccaagaggcctcggtgataatccagctcatcttgctcggcatagtcagcacaaaggaatttgggattggactggggccatttgaccccgtgcagagctgtgcgggtggcaacagcttcctctactgttgagtacgttacaaagcaatgagatttgatcttgtcaatccagaaggcctcttccaccaaggttcctgtgcgccccaacaactcctttagctggcctaaagtgaaaggacggaccaaattggagatatggacaatgttgctaatcttgccccggggtggggagggcacctggg

SEQ ID NO: 54690 - DNA, 992 bp, Homo sapiens
ttgacaactggaagactgagtagggctgggtttgttaggcaatggtttctgtggtagagttggtagctgtactgactcagataacagttcattcatcagaccgtacgcttgtgagattcgacgactatagtgttcagagagcagcaatctgtctttttcatgcttcatcttttgtctcagccttatttcccttgaagtcatgtaaagtggattgcttctgggacagaaaggatcatgttcttgccctctcttttctgccagctcatttaagtactttgccattctttcttttcgttttcttttcatccaggcttgaatctctcttctttccttgtcagttctttgtgaatgtctgccagaataatgctgaattctggaggtgcccatagcttgttctgttaagccaagttcttcactggaaactccgtctttaattataaggtcatcaataatgtctgcaatatcagtcaatccagtcatctggagcggatgtactgaaacactctcacacaattcatcactgctattcataccaggagaagtagtattctgatcactggaactggaaaggctgacagctgaatcggcagtaggaaacacacaggttttctgaccagaataattttctgttattgaaaattcaggttctgaagtctcctttttgtcactttgatcttcttcatccatatgggtcaaaaaacgcacttcttcagaaatgctaatggtttttgaagctaatgtttttttgaattcagggccagaagagaattcaatgtgatccactggtccaatcttatcacaatgtagatctagcatttcaggcttggggaaatcctgttctatgttttcagcaatgttctgtattgctaggcaactgctcgtcaattttctgaaggcttaggcactgagatgctctagttgggtgaggctggcagagcttgggtgccaggggcaagctgcaggaggacaccttggcaggccgttttccacat

SEQ ID NO: 54691 - DNA, 394 bp, Homo sapiens; identical to SEQ ID NO: 44377

SEQ ID NO: 54692 - DNA, 487 bp, Homo sapiens
cctagttctaaatgtagagcaaggattgcaagggattatttagacaagttcatcaattaagtaaaattagacatgaaggatataagaatgaatgataaagcaagctaaaaatggtgaaacaagggatgtctgattggaagtagaagatatttatttaggttctaggacattagtatcagtgaggacagtaatttcctgcttgtttgtatttcagtgatcacatacacttctttacctgataacgtctctcttctctaggctggttttggttacggcttgccaatttctcgtctgtatgccaagtactttcaaggagatctgaatctctactctttatcaggatatggaacagatgctatcatctacttaaaggtatcccttgaattcaatagcaaaatcctgtttctaaaaccattgctccttttatagccctgagtgctatggtccggaagtgaattccccaaactgagttaatgcaaataatgac

SEQ ID NO: 54693 - DNA, 6560 bp, Homo sapiens
  misc_feature (1)...(6560): n = a,t,c or g
tggaagctaatctcttatcagatatatgacttgcaatatttatttcatttcaggggttgattgctttctcactctgattgtgccctttgatgcacagatattttgaatttttcatgagtccagtttgtcagttctttctattctatctgtgctttggcgtcatatccatgaaagcactgtcaaaccctatgtcatgaacattatacccaatgtttttttctaagatatttttatgttttagttcttgagtttagagtttaggtctttgattcattttgagttaatttttgtatatagtacaaattaagggtccaattttatattatttgaacatccagttcccccagcactatttgctgaaaagatggacttactctttgataccctgtcacctgcccaccccagtggacactagctggtccatccaattgctgtcctggggccttgtcatgccactcttccactttgaacccaagcccacatcattgctcccctctgggatactgaccccactataaacttctctagggctacaaccttcctaccccttgtgcctcatgaccaccccctcccttgtccccaccatgcccatgatgagtcttttctcaaggcagctcgccttgcctccatctcaccctcacctgtgcaccacagccacactggacatgggtccctctgagcctgagtcccttcccattcccactgtcccctctggcaagaccttccttccaacactgccttcatgctcctcccttgcccctgcagggcagcctctccccttggcccctattcccttagggggcttgtggccacccagtcctggcacctgacctacaagtttgccatcttcattcccccttcttctgttcatcagccccctcctctatcctcccaccctcacagttttccttgtatatgaaatcttcgttcttgtccttttgcccatgtgcatttcctgcctcctcagggaggtcgggacagcagacctgtgtgttaaacatcaatgtgaagttatttccaggaagaagtttcacctgtgatttcctcttccccagagccccacagtcttcgttacaacctcatggtgctgtcccaggatggatctgtgcagtcagggtttctcgctgagggacatctggatggtcagcccttcctgcgctatgacaggcagaaacgcagggcaaagccccagggacagtgggcagaagatgtcctgggagctgagacctgggacacagagaccgaggacttgacagagaatgggcaagacctcaggaggaccctgactcatatcaaggaccagaaaggaggtgagagtcggcaggggcaagagtaatgggaggccttctccaggaaagttggagacagagagcagggacctgtctcttcccgctggatctggctgggggtggggatgaggaatagggtcagggaggctcagcagggtggtgagccggaactcagcccacacagggaggcatggaggagggccagggaggggtcgccgctgggctgagttcctcacttgggtggaaaggtgatgggttcgggaatggagaagtcactgctgggtgggggcaggcttgcattccctccaggagattagggtctgtgagatccatgaagacagcagcaccaggggctcccggcatttctactacaatggggagctcttcctctcccaaaacctggagactcaagaatcgacagtgccccagtcctccagagctcagaccttggctatgaacgtcacaaatttctggaaggaagatgccatgaagaccaagacacactatcgcgctatgcaggcagactgcctgcagaaactacagcgatatctgaaatccggggtggccatcaggagaacaggtaccgaccctggccaggggctctactgttcccgcaattctgctagagttgcctcgcctcccagctctgtccagggaaaccctccctgtgctatggatgcaggcgtttcctgttggcatattgtgtcctgatttgcctctcctgttagagccattggataaagacagtgggtctgggactgaactgtccagtgttgtaatctgggaaagcagtgggccctctgacagaagcctgagcctggggtgggagttaggcaggagaggaagccctcagggccagggctgccccctctgcctcccggcctgcccatcccggagagttccctcctggccccatgacccaggagtccacccttgacatccccctcctcagcatcaatgtggggatcccagagcctgaggccacagtcccaaggcccatcctcctgctagcctggaggaattaggccccagggtgaggacagacttacagaaggtctgggatctgtgagggattcagccagagtgagaacagtggagaggagcagccctgttccctgcatctcccttagaggggagcagggcttcactggctctgccctttcttctccagtgccccccatggtgaatgtcacctgcagcgaggtctcagagggcaacatcaccgtgacatgcagggcttccagcttctatccccggaatatcacactgacctggcgtcaggatggggtatctttgagccacaacacccagcagtggggggatgtcctgcctgatgggaatggaacctaccagacctgggtggccaccaggattcgccaaggagaggagcagaggttcacctgctacatggaacacagcgggaatcacggcactcaccctgtgccctctggtgagcctggggtgaccctggagagggtcaggccagggtaggaacagcagggacggctgtggctctctgcccagtgtataacaagtccctttttttcagggaaggcgctggtgcttcagagtcaacggacagactttccatatgtttctgctgctatgccatgttttgttattattattattctctgtgtcccttgttgcaagaagaaaacatcagcggcagagggtccaggtgagaaaaggggacagtttctggagatgggaaagctcctttctaggcagtagggtctcctcattgctcctgcccagacaagacgtaggtgacaaggctgctggaacaggggatggaagctggggtatttgggaggggaatgggagctgcatctccatctacacccataagtgcttctcaagccagggctggggcaaggccttcgaatatccagctgtggcctcctcctgctgcaagtgaggagtgggcagcagggagggctgtggcacctgctctgtccccatcccagcctctctgtctctcgggctcactagggtgcgtccaggtggggtgagttgggaatcacgtgctgattgctgagggcctggatgatcatggtgtcagagggaggaaatagtaaaggtggctgtgatctggggagggccagaaactggagaggaatccaaggagaggcggtgcccacccgtgtgcctcctccaggaggcactttccaggttcccaccacctggcctccctgagtttccttgcagatgacacagatgaatagataagcagatgtccctgggccatttgaggagcggggcccagcccctcatcagggcagttgtggtccctgttttcatcctacctccagcgtgttttcttctgcagtccctgagggacacagtccccaggcgccatctctttgaggctttgttctgtgctctgtggccttaccttgccctccctgagccaatttccctttctcaaggtggtcactgcctggtaagtttggagtaagggacggtcagaagcatttcccccacagtcaggttgtttgatgggggatgaaaagagacagcagaagttttgtgtttctgcaaaaacagaggcagtgcaggggacagtgagaggctggggtgtccaggagacctgagtctggcggtaggggcgctggtttctcatccttgaacctaattgcactgtcagtcggcccctcatgcctgagcagatgggaaggttcgtcccctgccctgcagcaagagggccctgtccaggaggcacccacagcaggggcagtgcaggtctgtggtcactcctgctctcacctgcggcgtctcccgtggagggattgtcacttctggttccctgtgggcaggaatggtttcctcgtaggtcactggggttttggccaggaaaagggtatgaaattcatgtgccagtttatcaaaattcctgctttcaatgttgatgtccaataaagatgttcgtaatttcagctctataatcttaataggatttcctctaatactgctgttgtaaagcatattaaataaaacaggaactcaaatttggagccccctctccagaagggtctgtgtggagatggtggctgtggcagcggcagttcccaggtgcagagggtgggcagaggcagcctcaggctaaggggtctcccctactccacgtggagaaaagtccttgtaggttgcaagggcagtggcctgggtggaatccctgctagggacagagcaggaaggcctcgcagcctcaccaagcagcagccctggggtgaagtaagtggaccaggagtaagtggaccaggcaggagcagtagtgactcaacagcaggtcacaggcctaggtgggtgctgaaggtcatgggaggccaggcctcctcgagcaaggtggggggtcccagggtcatgtcaggtgcagatcctgtggcagccatgtctttccatgctgggcctgctgggccccccaggcttcctgatggggtccccagttaggagctgcctgctcagggctgggaggggaggagtgctgagctgcagatagagggcagggcccacagtgggcagggcctgccctggtgtgcaggtgcctctgcaggagaggagggcctggggactgagagcaagggtcagggcctctctttggggaggcctctcactgtaacaggactggtcaggcctgagaggagggcactgggttccctcttgggtcttgtccttttgtcttggggccctttcactccctgcacggtgagtggtgggcacaggacaggggctgatgttgatggagtgatgggagagaactgacaggggctgggaaaagcaaggagggaggaagaaaaaagtgggggcctcatcttctctcagagaaagggtgaatctgattttggggcaactgaagagagaaaagtccttagggaataaacacaacactgcacccagtggagcatttacccgtttccctcttctccagagcttgtgagcctgcaggtcctggatcaacacccagttgggacaggagaccacagggatgcagcacagctgggatttcagcctctgatgtcagctactgggtccactggttccactgagggcgcctagactctacagccaggcggccaggattcaactccctgcctggatctcaccagcactttccctctgtttcctgacctatgaaacagaaaataacatcacttatttattgttgttggatgctgcaaagtgttagtaggtatgaggtgtttgctgctctgccacgtagagagccagcaaagggatcannnnnnnnnnnnnnnnnnnnnnnnnnnnnnnnnnnnnnnnnnnnnnnnnnntannnnnnnnnnnnnnnnnnnnnnnnnnnnnnnnnnnnnnnnnnnnnnnnnnnnnnnnnnnnnnnnnnnnctccatggtgctcattggagttatctactgggtcatctagagcctattgtttgaggaatgcagtcttacaagcctactctggacccagcagctgactccttcttccacccctcttcttgctatctcctataccaataaatacgaagggctgtggaagatcagagcccttgttcacgagaagcaagaagccccctgaccccttgttccaaatatactcttttgtctttctctttattcccacgttcgccctttgttcagtccaatacagggttgtgggggcccttaacagtgccatattaattggtatcattatttctgnnnnnnnnnnnnnnnnnnnnnnnnnnnnnnnnnnnnnnnnnnnnnnnnnnnnnnnnnnnnnnnnnnnnnnnnnnnnnnnnnnnnnnnnnnnnnnnnnnnnnnnnnnnnnnnnnnnnnnnnnnnnnnnnnnnnnnnnnnnnnnnnnnnnnnnnnnnnnnnnnnnnnnnnnnnnnnnnnnnnnnnnnnnnnnnnnnnnnnnnnnnnnnnnnnnnnnnnnnnnnnnnnnnnnnnnnnnnnnnnnnnnnnnnnnnnnnnnnnnnnnnnnnnnnnnnnnnnnnnnnnnnnnnnnnnnnnnnnnnnnnnnnnnnnnnnnnnnttttattatattgtaatatattttattatattagccaccatgcctgtcctattttcttatgttttaatatattttaatatattacatgtgcagtaattagattatcatgggtgaactttatgagtgagtatcttggtgatgactcctcctgaccagcccaggaccagctttcttgtcaccttgaggtcccctcgccccgtcacaccgttatgcattactctgtgtctactattatgtgtgcataatttataccgtaaatgtttactctttaaata

SEQ ID NO: 54694 - DNA, 387 bp, Homo sapiens
  misc_feature (1)...(387): n = a,t,c or g
atttttcattcttatatcctttgttaataaggcctctggttgattttttttttttaacagctctgttaaggggcagtttacatgtaataaaatcggttcatttaaataaagtttgatgacttttggcaaatgcatgtagttctgtaactaccgtttcattcaaccagggtaacgtttccattactgcacaaagttccctcttgctcatttgcattcgtcccctcctgctacccccctgtcctaaaaaacctctggtctgctttctgtccctgtcgttttatggcttctagcatttcatgtaattggaataaagcaaaatttatccattcattagtngananacattaatctaccanctganggacattnaaatnatttctgatattt

SEQ ID NO: 54695 - DNA, 182 bp, Homo sapiens
tttttcccaccacccactggggtcttacccagagtcctggggttcctgaattcgatgccctcactatttcctaaaagtaggctgggatttgtaaagatgctcacactgtcctctgattcctgctagagccccttcctggttcagcggctccagcaatgtcttaaagtaagagggaagatgac

SEQ ID NO: 54696 - DNA, 371 bp, Homo sapiens
ggttttgaaaatgcaggcacccaagagaagtggggttaccaaggatagatttctctagcaacacaattttgaggatagcaaaccttgcaatagcatcaggacttatcttctgtgcttaaatcctgtagacgagttcatattttagtttgcatgtcactctttccctgacagtggaaggaaatattctctggatggaagcttctccaggttgggactatcagattccacagattaagatcaagtaattcactgtcagaaatccctaaccacatgcgagagacagcaagttaccttgaataagaaccaacagaaatattaaatttagatatccctgtcaagagatttcgtacattagaattatcagccaggcc

SEQ ID NO: 54697 - DNA, 896 bp, Homo sapiens
aatccttttctgattccttacagatttgtagtgatgaggtttagatttaattttatatatggtttaaataattgttaagcttatataacctgatctgaattgcagttgtttgcatttcctctatgaaaacttcatttatctaataaggaagtcaaatgctttgtagactatttaccttacttttgttgcaatcactgttgttgggttgctgtatatatattccgggcaatatatgagtgcaataacaatacaagatattgaataatttatgctttaaaaaatcccacaaattttatgaaattttacagccctgctacttttgcttttgaatctcttgccaaaagacatgggtaaaatatctgcctctctcatagagattttaagagcacagcaagtgaattattaaaacaaagtctatacttaatacaactctttatatggaccctttacattttcagtatttaaaaaaatgaggttatcttaactctatagaattttaaaagtatatttagaattgttttttctgtagttcactgtataaagtatttggttttttaaaaaaagcaaaaccattgttatgtgtgactcttgataggacacagaacgagtgaatgagcatgagtgaggccactttcttggatggctgtaagtagcagggccagggtagacctggtcagcggatgcactttagcagatggaacttctagtttatctgaatatttatctttgacaaggtaggggctgagcctacatttgcttttgatctatctagtataagaaatattcacagaaattgtatgtagataccctttgttttgaaaatgctgttcagaatcatagtgtaatctttgggacctatgccatgttcatttcactccttcccatattttttgtgt

SEQ ID NO: 54698 - DNA, 636 bp, Homo sapiens
gtgataaaaaacaggtagtaactgccattgtttgtttgttttcctaataaggcctgaaaacagccattccttgttaagaaagtgtacaatgtaacatatttgctagagttacatggattatatatttcttaaagggaaaaatttgagagtatcatggactaccaccagcattattattacagtagttactcagatttggttaaggaagcccaagcaatgtatagtgaaaggattattatctctctgctaagattcagatattgtttcagaaatctcagctccagtaattccacaacatctaaaaacaaatgtttgtgatcatgtgtaagcatgaaattgttccaagtaagtgaggatattttagttatgtgaaagacagtttcatggaaggtatttgttttataccagtggctgggatggtggaattggggttatttctacaattattcttagacgattactaaactgttaagaaatgccccatatcatttttgtatctaggaaagaaaaaaatcagtttcatactgttgtcatctgtcagaaatgctcattttattttgaattaaatgtggcttttgaagtacctagttaccttgaattcctggtgaccacatgtttttatctggaaaacctggg

SEQ ID NO: 54699 - DNA, 351 bp, Homo sapiens
gatagtatatacatcctgcagatgctgtgaagctgggccaggctgaactagttgtgattgatgaagctgccgccatccccctccccttggtgaagagcctacttggcccctaccttgttttcatggcatccaccatcaatgggtaaggtactgtgggcaggagtccttactcccgtggcaggctcttgcagattcaggggcatgtagacggatgtggcctgggcctggacagccaagtctgattctcagagtctctgagtgtttgaggctgcttcattctctactgggcttctgcaaatggaaactggtctcttaatgaactgttacacgtctctggcccgacatgaaatg

SEQ ID NO: 54700 - DNA, 432 bp, Homo sapiens
agtggcctcaggacggaggaaaaacctcctttccaaagtgactggtctggaagttccagagggaagtacaccagatcgtccctgctcagggagacagagtctaaatcctccagttacaagttttccaaatcccagtcagaggaacaggacacctcctcctaccacgaggcaaatggcaactctgtaagaagcacttcacggttctcatcttcctccaccagggagggcagagagatgcacaagttctccaggtccacgtactacgagacctcaagtttccgagttggagagcccaaagccctacttcttacgccggaccccagagtcctcagaaagggaagagtccccagaaccacagcgcccaaattgggccaggtccagggactgggaagatgtggaagagtcatccaagtcagacttctctgaatttgg

SEQ ID NO: 54701 - DNA, 212 bp, Homo sapiens
gagctcggggatggggggatgtgtctgctgtcagggaggtgccatggtaagttgacagggcctgatattagtgaaactacactgggatagcagcagccatttaaagtaataatggtaagacacagcggtggtggtggtttggtttatatttatgaccttttaaaagtgtttggcattttcagggaggtttgttttttgttttgttttttgag

SEQ ID NO: 54702 - DNA, 1428 bp, Homo sapiens
ggggggtttgggaaggaaggaatgtaatattatggatttagccttaggctttaagttttaggctggcaaaagaaatgttattcagtgggtttgaggtttggactactttcttcaaacttagagaattataacaggatggtgtttactttgttcacctggatgtccccaagactctagcttcttctatcagtggttggtctgatagaagaggtaaaaattgctcttgaaaatgtcctacaatttatgcagtttctttgataatatttttctgtttaaatccctgcttctgtttttggtctgttacctaaatatagttcaagtttaattctgtaagagcaaagaaatgaatttgatgaggaaattaagcatccaatggaggattggtcttgaagaccttaaaggtgctttccaacctgcactgctccagtgaaatgtggtacttttttcttttaaaagcaaccaagagagctgggaatatctgtgtacgcaaagtaattgcattttgtcccttcattttgactttcttagattcataatttgatacagtgcttaaacttccaaggaaattttaaacaattactacattacctgttcaaaataaggcttgttggaaatcctagtccatcaactaatttcaaaaatttatttttgatatgagtagcaacagctggtcatataccctatcccaaaaggaagaactgtcttgaacaagatgaatggaaaattgtggttaattctgaatttcatgtaatgacaacatattctttcataaaactatggcctgtttaagatggaactttgtgtgtgtctgctggggagggtggggtacatgtgtatggcgtgtgttcttgaaatgatgtctctctgaatatccaaaaaagtactgtactgtagaaatgctctttgaaaaagtctatcgactgaccatgatcaatctagcatatgtatgttcagtgggctagccttggtcctcagggacagtgtgtgactctagtggtcttcctaaccagtctcttgcctaaagatatctgggacctctactggctttaatgacaaataatgttatgttgaggttatgcttcctttgttatttgctgattttcctactaaatgtagcatttcaattagatccagctttcacattttgagataattgtaaaaagaatgaaattatgcagaaatggccaatatctcttatcaatctgttcttttggaaaccctcatgtactataaattgtgtacagttaaaaaaatatatatatatatatattcttacatgagtaaaaagcaccctctcccagcaatcgtatgccattggtatttgaagagaattcccaaataacccattgctgctgctgctgtttttgatatgtatgggtttttttgttttgtttgtttttgtgtggtaaactgatatttaaaaaaaaa

SEQ ID NO: 54703 - DNA, 710 bp, Homo sapiens
  misc_feature (1)...(710): n = a,t,c or g
gggagatgtaagaaacatggtggctgagcctggtgaagtttctcagcatctctgtttcttgcatgtgtctcacacccttgtctaaaatgccttgctctcatctaacccagagttctctctcaactaaggcagcagggttggcgtgaggggggcaaaggagggaggaggaaggcaaccagcctcacaagtgggggccactcctcacagccacgagcagctgggccacatgcagcactggcagcccaggtggcctgttacggcgggcagtacttccctttgcctcccttcggaatctgtcagcacttttatgtggagtcttcatcccatgttcaaccctgggggtttttaaggtgtttctcctttgctttgggattttcaaacatgggcagctcatagcactgtactgtcatttcttctgggatgctagggatgccctgcctacttgccctacctcgagcagatgttctgaatgtcaagtcagcattgnnnnnnnnnnnnnnnnnnnnnnnnnnnnnnnnnnnnnnnnnncactgttactagttctgctatgtctggctcatagacaaggatgtaaagaagcagtctaacattctgccattgacaaactactcctttttaaaatgccaaattcttgtaattctgcttattttcaataggctatgtctggccaaaatgtctgcttgaattggctaattaaaccaaaatatcta

SEQ ID NO: 54704 - DNA, 744 bp, Homo sapiens
  misc_feature (1)...(744): n = a,t,c or g
ggcccccctttatgtttgtttttctgcccggtgatatacatgaacccggtagtgtgtgaaataaagcatcttagtcctcatttcagtgaatcagaagaaactaaaaggcatggttatttctccctcggtatgatgaagtctatataatatttgcaaaatctcctttggtgaatttgtataaacaatctatcacaaagaaagtattgttttctatatgggcttaaaggatttttggaaaatgggcagaggattttcccatgtattccctgagcctggggaatggaaatcatctcatggagacagatgaccacaggctttccacccagtccccgtggcccactagaattgtccagcatgtttcagtggttatttgattgggctcaagaccaaagttggaactgaatcaaatgatggtctggttcagaatatttctccgttttggtacgttttgaaaacctaggtttgatgctggttgcagttgttcaacagattttttaaaaaaaactttgagtacaacacacactgaggccttttgcnnnnnnnnnnnnnnnnnnnnnnnnnnnnnnnnnnnnnnnnnnnnnnnnnnnnnnnnnnnnnnnnnnnnttatannnnnnnnnnnnnnnnnnnnnnnnnnnnnnnnnnnnnnnnnnnnnnnnnnnnnnnnnnnnnnnnnnnnnnnnnnnnnnnnnnnnnnnaaacattttaaaaagaaaataaaaagagaagatttttagaaaaaaaaa

SEQ ID NO: 54705 - DNA, 591 bp, Homo sapiens
atccccagcccagacttccttctcatccaggaaattccaaaatgtctttacatacatattcttatattgtgtaataaaagattctgaagtccattactggctagaataataactagaaattgcttaatattactatacattgcatttgaacttaatctccacagtaacaattaggtagtattacttggatttcatggatgaagaaaaccaagatacaaaaagttcacacagccagtaagcagatgagcctgacttcatagtcatacatagcctgaattgagtcccagcaggagcacatgggcatggacatctaccagatttgggaactggcgtagccaagcaagaaataggagacggaatcaggagttaggattccatgcttaggaccatcccagatggatggctgcctccctctgggagctgcactcttctgaggttgcaggcatccagggccagggtgcttctgtgaggtgtgccagcacgtgccactctgctggatacaagctatcatgttctgagggctgcttccctcagcataagaaggggcttctattgggatgtgtaggcttcattgtagggtccacttgagtc

SEQ ID NO: 54706 - DNA, 2403 bp, Homo sapiens
tggccgcgctctccccgcttcttcgcagtcttcggccctctcctgtcgccgccatgagcactggcaccttcgtcgtgtcgcagccgctcaattaccgcggcggggcccgcgtggagccggcggacgcctccggtaccgagaaagctttcgagccagcaaccggccgagtgatagctactttcacatgttcaggagaaaaggaagtaaatttggctgttcaaaatgcaaaggctgcttttaaaatatggagtcaaaaatctggcatggagcgttgccgaatccttttggaggctgccaggataataagggaacgggaggatgaaattgctactatggagtgcatcaacaatggcaagtccatctttgaggcccgcttggacattgacatttcctggcagtgcctggagtattatgcgggcttggctgcatccatggctggtgaacacatccagctcccaggtggatcgtttggttataccagaagagaaccacttggggtatgtgtgggaataggagcatggaactacccctttcagattgcctcttggaagtcggctccagcattagcctgtggtaatgccatggtctttaaaccttctccctttacacctgtttctgcattgctactggctgaaatctacagtgaggctggtgtacctcctgggctcttcaatgtggtgcagggaggggctgccacaggccagtttctgtgtcagcatcccgatgtggccaaagtctccttcactggaagtgtgcccactggcatgaagatcatggagatgtcagctaaaggaatcaaacctgttaccttggaacttggaggcaaatctccactcatcatcttctcagactgtgatatgaacaatgctgtaaagggggcgctgatggccaacttcctcacacaaggccaggtttgctgtaatggcacaagagtatttgtgcagaaagaaattcttgataaatttacagaggaagtggtgaaacagacccaaaggattaaaattggagatccccttctggaagatacaaggatgggtccactcatcaaccgaccacacctggagcgagtccttgggtttgtcaaagtggcaaaggagcagggtgctaaagtgttatgtggtggagatatatatgtacctgaagatcccaaattaaaggatggatattacatgagaccttgtgtattaactaattgcagagacgacatgacctgtgtgaaggaagagatctttgggcctgttatgtccattttatcatttgacactgaagctgaggttctagaaagagccaatgataccacttttggactagcagctgggcgtctttaccagggacatccaacgggctcatagagtggtaggctgagcttcaggctgggacgtgcttcattaacaactataacgtcagcccagtggagttgccctttggtggatataagaagtcaggatttggcagagagaacggccgtgtgacaatcgaatattattcacagctgaagactgtgtgtgtggagatgggtgatgtggaatctgctttttgaaaacctgcagtgaaacctattgacatggccacgctgtggaatgatgtgaattggccctgtttacagaggcagtacaactgaatgttattttacatccagaattttggcgttcagtataagagaatggttcatgttactctttctctctccatcagcttcctcactgaaaatgtgcattaagtgccttgtagatactaatcaagaaagctgtgattctcctcaaagcgtatttttgtgaaatcttttaagagccagtaacatacttctagagaacaggaaaagagactaggataatacatcttccacacatttggcccactgataatgttaattctctggcgtatttcaaagaacttgttcctggctgatccaagtgcagtggtatttaccaactaattgatcaccaacccagtttgtaggatttctttgttcccttctccattcccactgcttcacttgcctagtcttgaagaaaaaaaacaaaaaacaaaaaaaaaccttgttcctttataggttcctggtagaatcagtagagatgatttcagctcattgacatttttttaagctatatccccttgtcattccattgagaaagctgacaactgggatagggaggggattcgataatagatggggtcaaattctgtgtgaatgtgaacttgcctagtaagcactttgtctctgttcactactgcgatagaggaaatctatctccctatcttgggtccttgaactacagcctgctgtcttacaccagtggagctaccctttaaatgtacaaattatttgtatgctaatgtaatatggtgaaattaaaataaatcacactgttaattgttaaaaaaaaaaaaaaaaaggaattc

SEQ ID NO: 54707 - DNA, 776 bp, Homo sapiens
  misc_feature (1)...(776): n = a,t,c or g
tctgatgccaggaattagtattcattgcctctttaagaggccaatgcaaaaaaaggtagaaaaagccctagcccaggagttgggattgccagttgtagtccctgggttgccttgctgggggtgcctaagtcagtgccataacctcagtttttctaatctgtgtaacatggggatagagtatatgatttccaaggtcactttcacctctgtgattgagcctctaagaaagccaaatcttttcactttgtaatcatgacatttttaaaagatggagttaatatgaatgggaaannnnnnnnnnnnnnnnnnnnnnnnnnnnnnnnnnnnnnnnnnnnnnnnnnnnnnnnnnnnnnnnnnnnnnnnnnnnnnnnnnnnnnnnnnnnnnnnnnnnnnnnnnnnnnnnnnnnnnnncacctggctaaagactatattcttaaagaataaaagtactgcacttcacctctatctcctggtatctcttcaattcaaacacaccattaatgactacaatattttatttaaggccgggcgcagtggtagttggctacaactggaacagtttatcacctcagggtatttgagggcaaggaagatacagaaaaaaaaaaaattaggggtatgcaacacagtttaagtgctcagaaataaattttaccacagtgagaacgaaaccacaatgacatgttactaacactgtgcagacgtcatggttgaatgcctgcgttctgttccttcctggtggcagccgccttggttcattagttctcatgtttgca

SEQ ID NO: 54708 - DNA, 425 bp, Homo sapiens
  misc_feature (1)...(425): n = a,t,c or g
ctcaggtttttaacattcgtgactcaggttattataaattgattaaatccttcaaattttacatctnnnnnnnnnnnnnnnnnnnnnnnnnnnnnnnnnnnnnnnnnnnnnnnnnnnnnnnnnnnnnnnnnnnnnnnnnnnnnnnnnnnnnnnnnnnnnnnnnnnnnnnnnnnnnnnnnnnnnnnnnnnnnnnnnnnnnnnnnnnnnnnnnnnnnnnnnnnnnnnnnnnnnnnnnnnnnnnnnnnnnnnnnnnnnnnnnnnnnnnnnnnnnnnnnnnnnnnnnnnnnnnnnnnnnnnnnnnnnnnnnnnnnnnnnnnnnnnnnnnnnnnnnnnnnnnnnncagccgacatctcttttttaaactttattctttacataaagtaatggcttttctaactatggtcttacccttattccatatacaa

SEQ ID NO: 54709 - DNA, 82 bp, Homo sapiens
ctactttctaccaaactctggctggagtcacacatttggaggaatcagacatcattgatcttgagaaacgctattggttatt

SEQ ID NO: 54710 - DNA, 669 bp, Homo sapiens
  misc_feature (1)...(669): n = a,t,c or g
cgtaaggctaggccgcgagcttagtcctgggagccgcctccgtcgccgccgtcagagccgccctatcagattatcttaacaagaaaaccaactggaaaaaaaaatgaaattccttatcttcgcatttttcggtggtgttcaccttttatccctgtgctctgggaaagctatatgcaagaatggcatctctaagaggacttttgaagaaataaaagaagaaatagccagctgtggagatgttgctaaagcaatcatcaacctagctgtttatggtaaagcccagaacagatcctatgagcgattggcacttctggttgatactgttggacccagactgagtggctccaagaacctagaaaaagccatccaaattatgtaccaaaacctgcagcaagatgggctggagaaagttcacctggagccagtgagaataccccactgggagaggggagaagaatcagctgtgatgctgggagcccaaggatttcattaaggttaggccatcctggggtctttggcagccagcatttgggactcctccagaaggcattacagcagaaagttctgggtgggtgacctcttttcgatgaacttgcagaggaaggggcctccagaaagcaaggaggggganagattggtttggttttnttaaaccccaaaccctttacc

SEQ ID NO: 54711 - DNA, 402 bp, Homo sapiens
cagctacctcgggaggaaggtctcacatctgtctctgggcacccatgctggccagcagtttcccagggctccctggggttgaaaagccccaaggaaacctttgcgggtggggcgttactgccaaaactccagaggcaaagtggacctggcaaccacaagaccctccccataagcaggggaccagcatacccgggagctgtccctgtctgtcacagcacagtggggccacgaggctgacattctctggccttgcacacagtgccccctgagaagttcaacatttatttcttcacgtgtccagaaaattcctcaattcatccttgcctctgcccttcaggagcagcctggaaggaatccaagcaggagtttcatctgcatgggggcactctgcaggccctggaa

SEQ ID NO: 54712 - DNA, 1681 bp, Homo sapiens
caggtatgtggaggggacaagccttacattgcaccttcagatctggagcgaaaacacttggatctcaaggaagtggcgataaaacaatttcgttcagtaaaaaagatgggtggagatgagttctgccgtcgttatcaggaccagcttgaagctgaaattgaagaaacctatgcaaattttataaagcacaatgatggcaaaaatatcttctatgctgctcgtaccccagccacactgtttgcggtcatgtttgctatgtatataatctcaggactgactggcttcattggcctaaactctatagctgtcttgtgtaaccttgtcatgggggttagcactgatatttctttgtacttgggcatatgttaaatactctggggagttcagagaaattggaacagtgattgatcagattgctgaaacactatgggaacaggtattgaagcccctgggtgataatttgatggaggaaaacataaggcagtctgtaacaaactctatcaaagcaggcctgactgaccaggtgtctcatcatgccagattaaagacagactgacagttcatctcctcacggactccactctctttttttttcatgcttgctgtacaatgagaactcaaataaaaataaaccaaagtttacaatcaactgtagaagtagtttagtgtaactggcttcacagatggctgccacagagtgtggaagattgtttgttagttttaaggcattcttttaatggctcctaagacatggcagatgggactggagggagcttggtttaatcatggcacctttgtgccatgtttaactcttttatttctttttactttaatcctaaatgttagtggaatttggtcttatgtaaaaggatatttcagggaaatattttcagaaatctatttagagtctctttaacacagtgtcccattgaaattttaatttttagagaatttatgaatcactgtttcaagaaccagattggaaagacaatgaagcctttattgagccactacattaaaagtatatattgctttactgccttcaataccagtattacatcaatgcatgtatcagaaacttcacagaaattacatggcaactcttgtagctaagaaagtaattctgaggtgtacatttgtcttgcctttttaaatttataaacttgccctaaaaggagatgcatatctgggaaactgaactgtctttttgcagtttagccttcatgtatataaaatatgccattaattttattggggaagaaattccatccaaaaatgttgcctacagctatgagttaagagtgtctgtacagtgtgtagcttttattttctaaaatcacagatagggcatgtatatgacttataaatatataaatacgattttgtattaaaagttttgtagtttatggcaaaatctggtcctgtggtaggctaaataagtactgtccctgtgaaaggaatgtttgtggctcatgtcagtgtgtgaatgcatagacaatttgaagtttttgatatatttgtgatatttatcttgagcactgcaatctcacccccccccgcccaccaagggaattcaatgggaatgtttattgtgactttgtcctctgttgcattttaaagttatttcctgtaatttattttcagtacataattaaaaatttgttgtatatataaaatgaaa

SEQ ID NO: 54713 - DNA, 408 bp, Homo sapiens
gttggactcacagggaaaggtgaccaagtggttcaataactctgcagcttccctgacaatgcccaccctggacaacatcccgttcagcctcatcgtgagtcaggacgtggtgaaagctgcagtggctgctgtgctctctccagaagaattcatggtcctgttggactctgtgcttcctgagagtgcccatcggctgaagtcaagcatcgggctgatcaatgaaaaggctgcagataagctgggatctacccagatcgtgaagatcctaactcaggacactcccgagtttttttatagaccaaggccatgccaaggtggcccaactgatcgtgctggaagtgtttccctccagtgaagccctccgcctttgttcaccctgggcatcgaagccagctcggaagctcagtt

SEQ ID NO: 54714 - DNA, 1386 bp, Homo sapiens
gatttttggttgtataacaaaataaaagtttacccaaaagtataagatacattttttggtaaaccatttaaaatacaaaatcctattttggaggcaataggataagcattgtcttagtgttttagaattatttttgaaacagagttaacaggataaggttacacttgtattagaattgtttttttctaaagttatgttacctgaaaaatcaaggagtgcacctgatttactgttgcttcatttatcccatccttcagagaccaggcaaggttctgccagggccccaagcatctgagcatgatgattttgctgtggacaattctaagatcaaccaggttacttaagtccgctctgatgaaacccagtctctcaataccttcctatttctcaatagtctttaagccctaaatctgagtcagtaattctctaaaaatccttcccaaaaatcagtgtctagggactggttgatctagatgagttataaatggtatttgacttttcataagtagtggaaggtttcactaagtaaagatctgagtttcttggtatctgacgtttgtatacagatggtgtccatttgctcaaccagacaggagttaaaaacctttagactaaagagcatttaacatgccttttagttttcttatttcataatctacttttctatcattaatcatcttaccaggaataatcaacggcccaggtaggtagaagtttttatatagcctgaatactcacttgacttactgctcattttactttttgcatggaatacagccatttagtcctaatatacataccaatgagacaattaaaaattggttggaagatggagcttatcacattgtgctactacgactttattttttcctgaaaataaagccctgagggatgtgaacataaatgttggtatcataaaacaagtagtaataaaagcataaattatcaaatatcaggtgatcttactatggagaagaaaaaccaatatctagttacagatgaaaaaatgtttaatacaaagagctgaaaatgtagaaattgagttatcttccctttgcaaaatttttacactttaaattagtaattctttgtttgcaaggttttcatccctatgctgttgttttctactacctgttttactcttgttcatactgctactttcccatgtttccctatatgcctcccctatattggagaggataactcgcgtttacatatgtgatagttatgcttaatactaattcacagagttggctcgatcattttgagattctagttgctttatctcaaagctttcactgaagggctgtaactgaaaattattaaatgttagtctttagtcaaatctctgcattgtttcatgcagaaaataaagatacaattaag

SEQ ID NO: 54715 - DNA, 77 bp, Homo sapiens
ggtgatattatgactatggctaaatttgcattgtcttgcctaatagacctgagcactgatgagcactgcttccttta

SEQ ID NO: 54716 - DNA, 788 bp, Homo sapiens
ggctggatttggtcaggcataggaaaggaagacatgcagtcgtcctgcctagctcatccccgccacgatggagaagtggggttgctttcgttgtactttttttcatttgtttcttgccaagcccagtggcttctgttataacatgtggcagcttctcccttggagactgattcagtccaagttaccataatatttaggaccagctacagagacgtttcttcccctaaacccatgccaaatctaaatcaaactatcttcttctccttagccgttcaaatagctccagctcttatataaaaatacgagaaatacacaggcctcttttcgttttattcctgttcaaacagataaacaaacaaggcacatcatgcctaggttgctttgagcttgatcacttcctcctaaagcagtcttacgctgtgttgattttaagaattgcaacttaggtgttctagaacatattctgagagcatagtcatagtctgtgatctcagaatatgtttgcttccttctagaacatctgagttctagaaattgcgtacaataaactgctgtcagtgctgctggaggaaggaagagtaactctgacatcactggccttcaacaggtgtggcgctgagcttctgggcctcagaagccctgacttctagaggctgggggccagcggggcagggaggtgatctcatcatggatggccacagatcatccacctgccaaacagttaaccctgaacaagtcatgtcaatttattttgcttttaaaaaagaaagtctgcaaaatagaaaaaa

SEQ ID NO: 54717 - DNA, 373 bp, Homo sapiens
ttcaggattaatatgtgcaccaacgggccaggcccagcggagacaaagggaggagctggacgccacactgcatggccgggaggctactggatgatagatgccaatatgtagccaaaaggataggattaaaatagtgctctcattacagcgctactgatgatgaagacaaaagctctgtacttcctggacaactcagtgcatctaaaacagcactttgttaaacgagggtatggatggaacaagaagcttcccagagagcagcaagtacaaaaacagggagaattaagagaacatggtgcattcagagaacaatgtgataacgaatgcttattttacatacttttaaaatgcagatttgagtatttcaactctg

SEQ ID NO: 54718 - DNA, 343 bp, Homo sapiens
tctttaatatagatttataaggcccctttgttatatattttcaaaaattcaaattaaaactaaatccccaaatgtcccatttattaatgaagtattttgtcatatggatgttttaaagctgtgtatgttgaaatcttttgttttccttttatgattgtttctgtctttggtagtttgcttaaaaataattcctctcagctatctttatagttcctatatttaaaattttgattcatttgaggtttcttccaaatagttaattggttgcctataactcatgatttgaagaatttctcttttgtccgctgatatattacttttatcatgcactaaattcgcatat

SEQ ID NO: 54719 - DNA, 137 bp, Homo sapiens
gagaaggacctcggttggcatgttttgtaaaacaacataggggagcctgtagcacctttccttatgtgagtcagagattaccggtcccaataggttacagttggagacagattttaggtctggttggtgggaagggc

SEQ ID NO: 54720 - DNA, 338 bp, Homo sapiens
ggcagaagggaaaaataatgggaaaggaatagacaatatttgatgagataatagttgagaatgtttcagagctgataaaaagcaccatgacaaatttgagaagctgagagaactgcaagcagaataacgtaaagaaaatatgcttctagagacatcatagtaaaatgaagaacatcaacaacaaagaaaatctcttaaaagttgccagagaataaaagattaccttcaaaggagctgaggcagttacaatgatagctgactatacaggggcaaaaatggaagccaggaaacactggagtgatatctcaatgtgctggaaaaaaatttgccaatctagg

SEQ ID NO: 54721 - DNA, 424 bp, Homo sapiens
ctggcacctctgcggggcagtgccccactcctttgtgcacaaggacacgttgggctcacaggaggagcacaggctcttgggtggcgaagccagcccaggatccattacctggaaggtttctgtaccttgagagcctgaatcagaggccgtcgggaacgccctccctgcagttgaggaagagccactttcctgccagcacatgtttctgggtcttggaggtcacccccaccccgcggatcacagctcacccacgcggcgcacacccctcctgccgttgtcatctgcacctacttgttcccaccttgggagaggacgatgacttgggagggacgcgtgaagggagaaggggtcctcccatgaggctgaggatggcctgaacctggagcagcggaccaggcagacgggctgaagtggggtcccaaat

SEQ ID NO: 54722 - DNA, 471 bp, Homo sapiens
gaaaacaaaaaatctgaaagcaagaaagcatctttaaattttatacattgtctcctttaaaatgttcttatcttctctttctttacttttcacttacgaagcatgcattattacaggtgtcttataatggagaccaggatttccccctatgacttatccaaccttacatcactgaaagcatgcaacaacagttccttcaccctttttaaagaaacagataagtttccagaacaaagaatatttgaagattttattgtaaattcagaaaactttacagctactgcgaggatgacctagcctgagtcccaactaacatcttcatttctttagtgaaaggagacagagagttagctgctttgaactctaggattgtgctcattttatctgtcttcattgatgaccttcatagtctgatatccatttccaaaggaagatgacttcaatctaagagcctcaaagaagacgtcgacg

SEQ ID NO: 54723 - DNA, 421 bp, Homo sapiens
attttgtttcattttcagctggagacttaaatgacaccaagcaaagcctacttagtttagatctccagaaattggctggtggaaaaaaatcaaacatgaagattgcagttttgttttgtttttttctgcttatcatttttcaaactgactttggaaaaaatgaagaaattcctaggaagcaaaggaggaagatctaccacagaaggttgaggaaaagttcaacctcacacaagcacagatcaaacagacagcttggaattccgcaaacaacagtttttacaccagtagcaagacttcctattgttaactttgattatagcatggaggaaaagtttgaatccttttcaagttttcctggagtagaatcaagctataatgtgttaccaggaaagaagggacactgtttggtaaagggcataac

SEQ ID NO: 54724 - DNA, 398 bp, Homo sapiens
ggatgaggaagatggagagaatgcccacccatatagaaacagtgaccctgtgattgggacccacacagagaaggtgtccctcaaagccagtgactccatggatagtctctacagtggacagagctcatcaagtggcataacaagctgttcagatggtacaagtaaccgggacagctttcgactggatgacgatggcccctattcaggaccattctgtggccgtgccagagtgcatacggatttcacgccaagtccctatgacactgactccctcaaaatcaagaaaggagacatcatagacattatttgcaaaacaccaatggggatgtggacaggaatgttgaacaataaagtgggaaacttcaaattcatttatgtggatgtcatctcagaagaag

SEQ ID NO: 54725 - DNA, 415 bp, Homo sapiens
cattcatataccagaaatatgaagagtggcccttctaaaagtttccctaatgatggaagctgtcagttgtcctatctgtgcagaatgtgagtaatagtggcagaaataagtgtgacaacaatgctttgcctgttgttctttttacttgctaggtaatttgtaaagtggggataaagatgtagggaaagtaaacctctctctcactgttacggaaagcctggacttgagttaggtagactgccttaaagaagaagaaatatgtccttttctttggcatcatggttttgttgagtggcagactgttgaagtgagttgagacttaagaacgccagaaaagttgtctagcctggccccagtagacagaatttgttcttctctcaagtaaaaaattacctttttatagcttttatattat

SEQ ID NO: 54726 - DNA, 462 bp, Homo sapiens
gtcagattctactttgaatctgaagtttgcagatatgcctatagatttttggagtttaccactttcttattctgtatcattaatgtaatattttaaattactatatatgttaccatttttctggatttagtaagaaatttgcagttttggtttgatgtaacaagggttttaatgtaatttatgttagattttgcatttttttcattactgttatattttaacctgactgactgatctaattgtattagtattgtgaataatcatgtgaaatgttttgagacagagtactatatttgtgaatataattttatggtttttttcacttagaacctttctgtgtggaaaactaagaaaattgctttctgctgtataatctggcattcattgtagattaaagcttatttttctgtgaataaaacgtattcaataaaatactattctttaaaattaaaaaaaaaaaaa

SEQ ID NO: 54727 - DNA, 360 bp, Homo sapiens
  misc_feature (1)...(360): n = a,t,c or g
caaaggtgcttagtgagtgtgagctgatagacgggttaagcgctggggactttgcagtcagaccacaatttaaatctcagctccattagttcctagtgccagtggccttgaacaaattatttgacctcttagtcttagtctccttatctataaattgaggggtggcaggaagagggggaggagaggattggggtagcagcatttcccttgtaggattgaatgagcttatacatgcagatagctcactccagcttttggcccagagtaagttggcactaaaggttagccacagctgcagtaacaattccctctcttcctgcctgggtggtctcttncattacagacagagtgggaactttt

SEQ ID NO: 54728 - DNA, 724 bp, Homo sapiens
ttttttttttttattgtgaacacaattttctttatttcatttttggagttttctgaacagaaaaatacaattgattttctgtatattgatctagcctgtgaccttgctgaacttgattaattctattacactatgattttttgttgtggttagacccttacacaatcaaatgaggttaaaaaaaaattgtcagagtggccccagaccaacaacaggatgacagtagcctttgcccatacagagataaaatttagtttttgcagtcctttcccatagagattgtatggcagtagcacattctatggcctactgccatacaacctgaactgaagtccagaaagtttaggtgactgggccacagagctaattactggtggagccaagaagagaaattatatccctacctccttgcccactaagctccccattccagtgggctgctttctggtccttttccatgattgggctttagtagctgtcatttcctccagtgtccaagagtattttcttggccttccagtaaagctccccaagttgtctgtgttccgcctcaactgctaacttgcctacctgataaacattttgaaaagcaatctaaattctagaaattgtctctcctgcaaacaaactacagattccatttaaagcatttccttgagtccagaaagttctgagattttcctgttttggactagacttccaaagggcttcatcttaaattgta

SEQ ID NO: 54729 - DNA, 457 bp, Homo sapiens
accttatgacatgattacgaatttaatacgactcctatagggaatttggccctcgaggccaagaattcggcacgagcaggttctgaaaaaaggtgttgtggatgaacaagcaaattctgcagctttaaaggagcaactgaaaatgaaggatcagtcattgagaaaactacaacaggaaatggacagtttgacatttcgaaatctgcagcttgccaagagggtagaactacttcaagatgaactagctctaagtgaaccacgaggcaagaaaaacaagaaaagtggagaatcttcttctcagttgagtcaagagcagaagagtgtctttgatgaagatctgcaaaagaagatagaagagaatgaacggttgcatatacaattttttgaagctgatgagcagcacaagcatgtggaagcagagctgaggagtcgactggccactctggagacagaagca

SEQ ID NO: 54730 - DNA, 796 bp, Homo sapiens
gaaaaataatggaaaatggaagtaattactccagctaaaaaaagcttggacttagatttctttttatgataccaaatgagaaataaaccaggcaaatcagaaggaagttaaagaagcaaatataaattcaacaagtgtcctaattatcctggatattggaatatttgattttccttacaatcccgttctagaatgcctgccgcctttcaacactttcaagagaatttcaacacttacagagtatttatattgttaacagtaattttgctaccaaaaccttcagaataactttaataataaaatgacactgaaataatagactatacaaactctatattttttcagttggtgttaaaataagtcacattttgataccagtacaagatgtcttttaaataaggatgtcatcagtctgatttatatagcattaatgttttatgaagaaaaagttcaaaatgaaagcattaattgctgtgattattagaattctatcatgactgtattgtagtttttgctctatttcagataagcaagatctaagaagttatcaaaactattctttaaaatgctaaagcaggtaactttttcttccattattttttcctcctaccactgagttttgtaatgaattccttgtgtatacaagcaatacaggtgaatactaaactgttatttttagcttcttcaaaagctattttagaaagcttcctggaaataaatgtcttctgtcatttaatttaaataaaaggagtgttattgttcccaaatttgattacctagctgaaacagatattgg

SEQ ID NO: 54731 - DNA, 72 bp, Homo sapiens
gctggtcttgaactcaagtgattatcccacctcacttcctgagaagtaactgggattacaggcataagccac

SEQ ID NO: 54732 - DNA, 666 bp, Homo sapiens
atctgtttttatattttgaatgtatcagctgtaaactgtattccctggatttgttttttaatccagtgtaatgtttgccttttactttgcaaatttagtccacttaggattacttatatatttggaattagttcctccattctatttttttatttctatacatgtcatctgttttatgtaatttttttctcgtttattgtgtggtttggttttgggttttttttgttttgctttgttgttgtttttaattgaaccaggtgtttttgttttgccttcttgtgtttgtttttctcattcctttttcccccataattagtttggaggtttacattccatgtgtccccctcaccttataccatgtgagagagcgagcttccaaagacctactgcttgttgacctgtgtcccttaagtttggggagctcgagaactggcattaagtgctacatctaaaaagctggggcaaaaaaaaaaaaaaaggaaactgtactgaaagaaaatgattattctatcaacactaggacatgaatgggcaggtgtttaccctacaccagaagtggacccggcaggaaggagctggcatggagccctctgtaaatcctgcccaggcctccaaaagacagaattgtccccagacaacctggagatgaaggaaacattcacaagc

SEQ ID NO: 54733 - DNA, 776 bp, Homo sapiens
ctgcgggcgcacacagtacgacacgaggagaaagtgccatgtcacgtgtgtggcaagatgctgagcccggctgacccttttaatttttaagagtgttcaatccgagatgaatcatttgaagtatttttatatgtatatctatttaaaactaatatattattaaagcttaattgccatgccgtttatcttctctgaaagaacttcaaatcttacctgccaacatattcaccataattattttttaatacctttcatacaataacttttttaaaaaaacctcagattgaaaaagcaacctaaattactttcgctctctaatcagcatttcaatgtatttatttttaaatgttctcaaaaagtaactaaaaaattgtgtcggaccctacttttgagaaatctacgtttcccaagttttatgggaactggctattccttgtcccggcacaccttctcattccttcctttcagagcctaaaacctcatttgataagcactcctagtctctggcctgtggatccagtgctattctgtcaccaacctaagaatcccaattgcaccttctgtttctgacagtcacaggtgacagctgtgattctataatacagactggtgtcttagaggtaggaataatacatgattatgaagcatcaccctgctaatacataataatgtctttttatattataagtgattgagtttagttcatttcaatacattgtacatgaaaaaatgaaaagtagaactttgtaatactttaatcaataaaattaattacc

SEQ ID NO: 54734 - DNA, 358 bp, Homo sapiens
gccatcaaccgtttcttaattgacctttttaaaatgctggacatgcaccggctgcacgcagctgccacacattaaatttccagagcaaagagtccaacttggtagctggtgaattgcagccctgtaatatacttaataaatgacgtccacccagccttagtccctgagctgtcaggtgaacccgtgacacgtctcaactgaatggcacaacattcatgagaggaccataccccttctccctgtttcttgcatgaattaaggaagcagcggatttccaggatgatttcctgtcaaggttggctgcatagaattcctgccatcttggttcatgagatgaggatatgacatcatcaaaggc

SEQ ID NO: 54735 - DNA, 334 bp, Homo sapiens
cttgttcctccaccatcaattgagagaattcggattcctctccctttcactggatccacatagccaattagggccaaaatttctctaactgcagcctgaagagtttcatccttaatttgtctcagtcgtaataaatatggaataattctttccttgacagccactccttttccttcaggaaattctagaagatgaaaagtcagttcttcaaccctagtaatgcagagctttgggtcagttggtcttcttaatgcctgaactaatgcccgggtcctgttatcaatactcacccttgcgataatcttttctcgctgaagagataaacgctttttct

SEQ ID NO: 54736 - DNA, 1131 bp, Homo sapiens
  misc_feature (1)...(1131): n = a,t,c or g
gttttggatatgaaaaacagaagagagaaaaatatacattataaaagcagaacatacatgtaccagtttttggatactaaatgacagccttgtttctcccctttgaatcagcagacaccatggattatattctttttttcccttcagtagtgagcagtttgtatgtacagagaaaatggacttacaaaaacttgcagcagtagtttgttcttgctttaaaatttcgtttttggtttagattatggatgcatgaagtaagggagtgaatcagtttcttgtttatatttttttcaccttttaaacaaaaaattctttaaaatattttaatgcattcttttgaagaggtagatgtttggtacattttatggctcccagagcatatattcagttggtgcatgttgtggaagggggaattggaaattaaatgaaaacctatgactttggtcatgtcaatctgtaagacacatcagtaaaagggtattatgctctgttggttttgtttttttgttttgcttttnnnnntttnnnnnncttttttgttttttggtgatgtggcttaaatgcaatagtttcttttttgggacatatttctgccaattaaagactagaagggcacaactttttttttaattaccatagagaagatacattaaaaaaaatcttctgatgttttgtagccataactaaattatggtaaaaatgtgcactattgtgaaaaggagcaacgtagttttgggttttttgttgtttgtttgttttgctttgttttttaagagattaaaatgtttctggataaggattagcttctcgaagtgtccatcattctgtgtagaagcttaaatatgtaatgtaaccaaactccagtattaaaaatctctcatgttgttttctttatacaaagcaagataacggcatataacactgccattacatggcaaaatgtttgctaccttagtttaaaaaacaatctcaaacaaaagacttgcttcaaggtgtttttaaatagcagtgattcagaattttttttaatgaaagtataattgcactaaccttcttcctgctgctctgattctgcatttgtggtacttgtgactacgttttttcaaatatagatagatttaagctgctaat

SEQ ID NO: 54737 - DNA, 437 bp, Homo sapiens
gcttcgtggtccagggctccaatggcgagtttcctttcctgaccagcagtgagcgcctcgaggtggtgagccgtgtgcgccaggccatgcccatgaacaggctcctgctagctggctccggatgcgagtccactcaagccacagtggagatgaccgtcagcatggcccaggtcggggctgacgcggccatggtggtgaccccttgctactatcgtggccgcatgagcagtgcggccctcattcaccactacaccaaggttgctgatctctctccaatccctgtggtgctgtacagtgtcccagccaacacagggctggacctgctgtggatgcagtggtcacgctttccagcacccgaatattgtgggcatgaaggacagcggtggtgatgtgaccaggattggctgattgttacaagacaagaagcaagatttaag

SEQ ID NO: 54738 - DNA, 1403 bp, Homo sapiens
ttttttttttttctggctaattttgttttttaatgagaaacatctgagttgtacatatcacaaacagcttcaagtttctgtaccaaccccccgccccgcacccccgccgtggccaaacagttaaaacccaaagcaaagcatcactttggatgtgaaaaagtcttagaaaattaacttacaaaaacatccctatcaagtcggtagtttggcatttactttacattagtcaaaagctccagctaaaatctaatttttttaaaaaaaaatcgaagtttacattattcatacagattgggcattgttaaaaaatatgcacaaataaccacatccatgcaatacaatttctttaaaaatttaaagcaatataaaagagcagagctaggtactgaacagaacattttggtgtataaccggcagctcaaaattggccagctgattggagtaaaactgattctaagcgtattaaatatgattgattgtttccatcagctaagggtgcctatgagtttctgaaccatttctagggtggaatgtgctcgcttgcttctataatatatgtgatggacaccactgctcattgaccatacctacattataataatgctgttttacaaacaaaccagaattcacaaagtgcttggctcttcaggaaactgacatttccagagatccctaaactaatcaactagttctgccaaagtacccggggcacctgccacacaggttccctgctcctggggaggaacacaatctgaaagctgccctgggctccagggagcccgtgctgtgtaagcccagaagaagtctgcacaggtcccgggaccttgccaacactaagtcactcagattggtctggggccacgtgctgggcacccttggcaatcaggcaggtggtgtagcactgtggccagctatgccctctatgtggggggtggcccattggtgtacctcagcatggggtaaaaggaccgggcaaagttgttggcctgagtgcagctgtagtcttcttcggaggagggcagcaagcaggccaggagcagcagcagcaggaggagcagctgcaggggtagggctgcccggaccacccttgagaggaaggagcgctgtggccgtgtgctgccggggaccctgctctctgtctcctcctcgccttctgtagttctcactgctctgaactttgctcggggagctggcacggatgttgcaggaggctggtcccccgagtctacctcgtcgaagctgggcaggggtgaggctgggttctgggttccctgcaaggccattaaatcttgggacacttgctcccgtaactgtttgagtttcttctcaataacatgcaccttttcttctgcttcaatacagtcttctccatgtcccttaatgagaaggctgtttgaaatctc

SEQ ID NO: 54739 - DNA, 563 bp, Homo sapiens; identical to SEQ ID NO: 26200
  misc_feature (1)...(563): n = a,t,c or g

SEQ ID NO: 54740 - DNA, 455 bp, Homo sapiens
ctttattttaaataatagtgggatattttaatgctggaaattagcattatagttgatatgccagaaattatatctttggttgtgatttaaacttatgctataaactaaattaatgatgtaaatacatagttttaaacattcttttagggacatgtaacttttaagtatcacttcaataatacgtattattataggaacaaagatttgggaataattgattacaggtgaggaagtactggaattccagttcaaggagataccattccatttaggactaaaaggacaagatcaagttcacatgatgggaaaaatcagaaaacctctcgcagacaaagggtatataatggatatgaggcatcaaaaagcatggtatagtcagtgatggggaatagtccagaaaggctgaaacacagcatgtgatgtgagtcaaggtagttgatgcccactgtgaaggc

SEQ ID NO: 54741 - DNA, 3661 bp, Homo sapiens
  misc_feature (1)...(3661): n = a,t,c or g
ggcggacggagcgagccctgggcgagtgaattgtggctgtgggttgacggtggagacaccccccggagggaggcggagggaagggaggcgaggcctcgacctgcatgcttcccgcctcccactccccagcgcccccggaccgtgcagttctctgcaggaccaggccatggagctcgaagtccggcgggtccgacaggcgttcctgtccggccggtcgcgacctctgcggtttcggctgcagcagctggaggccctgcggaggatggtgcaggagcgcgagaaggatatcctgacggccatcgccgccgacctgtgcaagagtgaattcaatgtgtacagtcaggaagtcattactgtccttggggaaattgattttatgcttgagaatcttcctgaatgggttactgctaaaccagttaagaagaacgtgctcaccatgctggatgaggcctatattcagccacagcctctgggagtggtgctgataatcggagcttggaattaccccttcgttctcaccattcagccactgataggagccatcgctgcaggaaatgctgtgattataaagccttctgaactgagtgaaaatacagccaagatcttggcaaagcttctccctcagtatttagaccaggatctctatattgttattaatggtggtgttgaggaaaccacggagctcctgaagcagcgatttgaccacattttctatacgggaaacactgcggttggcaaaattgtcatggaagctgctgccaagcatctgacccctgtgactcttgaactgggagggaaaagtccatgttatattgataaagattgtgacctggacattgtttgcagacgcataacctgggggaaaatacatgaattgtggccaaacctgccattgcacccgactatattctctgtgaagcatccctccaaaatcaaattgtatggaagattaaggaaacagtgaaggaattttatggagaaaatataaaagagtctcctgattatgaaaggatcatcaatcttcgtcattttaagaggatactaagtttgcttgaaggacaaaagatagcttttggtggggagactgatgaggccacacgctacatagccccaacagtacttaccgatgttgatcctaaaaccaaggtgatgcaagaagaaatttttggaccaattcttccaatagtgcctgtgaaaaatgtagatgaggccataaatttcataaatgaacgtgaaaagcctctggctctttatgtattttcgcataaccataagctcatcaaacggatgattgatgagacatccagtggaggtgtcacaggcaatgacgtcattatgcacttcacgctcaactctttcccatttggaggagtgggttccagtgggatgggagcttatcacggaaaacatagttttgatactttttctcatcagcgtccctgtttattaaaaagtttaaagagagaaggtgctaacaaactcagatatcctcccaacagccagtcaaaggtggattggggaaaattttttctcttgaaacggttcaacaaagaaaaactcggtctcctgttgctcactttcctgggtattgtagccgctgtgcttgtcaaggcagaatattactgaagaatgatcctgttcaacctcctagtgcctctactgaattattcctcttttaaatggttaatgaaccaataatttttaaatcataccaaaaatagtaagaaaatatgcaaacactctgtgatcaaacttaaaagtcattgccattcatcattaataaaagttgccatttcaactacgtcccaacattccctaatagggtattcagggaacctggtcttaaattgtgcttatctaaatcttggaactttgagctaggggaggagaatgtattagactaaatacaaactgcggggttgtaagggagtctcagaacctcactgaatccttcactccagttaatggcactgctcacttcctgcctctgctgccaccatcactgtgtgaagctttcaagagcttggtacttcccagggctaccggcagtcctctgtagtccagagaggtgagattagatcttcttggttccctgtgaggtttcaggcactaaaactctatgtggggaagggaggggttactcctcctccaatgggactcaaggacttgacctccaggagtaggcccctggtcagaagtgccatctcaccagtggtcttcattcttcctcattcattctttatcatcctgtgttctgtttagttgcaacaatctcttgtgactaatgtcactcaaagcatcttgtaaatcctagggcttcctggaagttagttgccaaagtcatgcaagcatcacctgtcattcttgtgttggagttatagaattctacatcttataaaacctaactggcatttaaaaaatacnnnnnnnnnnnnnnnnnnnnnnnnnnnnnnnnnnnnnnnnnnnnnnnnnnnnnnnnnnnnnnnnnnnnnnnnnnnnnnnnnnnnnnnnnnnnnnnnnnnnnnnnnnnnnnnnnnnnnnnnnnnnnnnnnnnnnnnnnnnnnnnnnnnnnnnnnnnnnnnnnnnnnnnnnnnnnnnnnnnnnnnnnnnnnnnnnnnnnnnnnnnnnnnnnnnnnnnnnnnnnnnnnnnnnnnnnnnnnnnnnnnnnnnnnnnnnnnnnnnnnnnnnnnnnnnnnnnnnnnnnnnnnnnnnnnnnnnnnnnnnnctgtaataaaagtacttataaacatactaatcctctttcaggaccctaaagttgcaggttagtaggtcttcaaggacaaatctgtaagtttcttatttctgtagtgcaagtaaaatttcactttttgaaactatagagagatccctttctgattagcctacagaacttaaagtgagggaaccatttcctctcacagacaaagaggcctgggatattaggactttggggtttgagagcatcatggggcagacagatggtggatggtctggacaagaagcgagtaagccactgcggttggtcatactgaagggaattgatggcaagaggatcccctgagcaagtcagaagttactctcatcagtcgttcatggtcacaacctgaggtactctgctgagtgggcaaggctgaagaagaggcctgtggaatgcagcattacctgctggacagagcagggcaggcagttctatgccttggagctcctgactgcagggactctgtccccacactcaaaaagactcagctcactcaatgagagaatgtgatttactttatagaacgtataatcaactttgttgaataatttgttctattaaggctgtctaaagtatgtgatgtcttcatcatagtatgaagtgttgaaaattaataacgagcctagtttaggaaaaagctgcttaaaactgtggctctaagagagtaatcataaaataccttagataaaattgcactatggaattttcattgagtatgtttaaattattggcttgtctactaatacacatctgcttcaaaatgaacatatttcataaaattggcatcaattttaatgacgctcctggtatggaacctcagatataccctattggagacaatcctttgatcataaattctccccaactataaatcattttatgtctttatcataaaaaaaaaaa

SEQ ID NO: 54742 - DNA, 829 bp, Homo sapiens
ttttttttttttttggattgtgatgtaatctttatttcttactctgagctccagttagaaaagtttgacaatcattgttatagagctatgttcagaaagtggagactttctgactcactgtgagctctgctgtatctatgcgctccctggagagggagcaacttgctaaggtacagtcctgtccattggcatggatatttattgttccacatgttgggaaaaccatgtgcaataaaaatcaaacatatgaaacaatggctgtcattgtaccacagtatacattgtatcttggtgaaggttcttaaattactccttggagtttcctaattcacttcaggaaggatttgttgtgttccgtctttatgctgtcacttgcaaacacttttgctttgctagttcttgtattagatcttcatatacttgcaaaaagaggtcctcttcagattttgttccatccaggtacactacgaaggggaaaagagagcagttcaaatgctaacaggcttattaatatacaatgtttactttgacacccaacatctcttgtaaatgccaataggtttaaccaaggcacccaggaccataacttaaaaggaaattaatagtgattaaagaaagaaatagatgctagccagctataataggtcaaaaatattggattgttacagataaatccacactggcttatgtgaaaattatttaattaaaagagaagagaaagaaagaagaaaggaggaaagaaacagaagaaacaaagtggtgttctgcatacgccactttaggtgcactgaacgcgttcacccaaaagggtcactcaaggagtaattct

SEQ ID NO: 54743 - DNA, 382 bp, Homo sapiens
  misc_feature (1)...(382): n = a,t,c or g
ggctagcaggggtcagggtcaatcatgagtgagaatcctgcatctcctgactgctcaatcactctccagccttccagaatgcagagggaccctgggaagagctggaggagagaagaggaagaaggatgggagacggaagattctcagttggaaaaaaaaacagcagcaagaaactttgtttaccttgttggtcagattaaatttctgccaccaaaagaaaatcgagattgaaaagctaagtttaattatggagaaaataaagttacatttttttttgccaaaaaaaaaaaanagtnanccanaaaccctnataanaaaaaanantntnanttnnanntngnannntaaagnnaanaaaaaaaaggggggngcctnntntttt

SEQ ID NO: 54744 - DNA, 54 bp, Homo sapiens
tttcaacttttctatgtgtttgaaaattttcataataaaatgttggggaaaaaa

SEQ ID NO: 54745 - DNA, 332 bp, Homo sapiens
gactgccttattccaacataagtttcagagctgtgggattggtcattagaaattcagactgaatttgtgttcctctgcaatgaaatcctttgcccagtgttcatgtcactctgtagacattatggagcagcctagaggccagaatcccagtgctctccttatgcctgctcttcctgggcttcgtgacactcttcttctccttttgtacttttatttttttagttaaaaaattttttttagagggagggtctcactctgtcacccaggctggagcacagaatcacaatcatgactcactgcatgttcttctccttttgttcatggctaatctt

SEQ ID NO: 54746 - DNA, 545 bp, Homo sapiens
aaagccaatacatctgtccaggaatcacactttgcgtatcaaaggtctagatgacattatcattccaaagagtttcttttacaggctctcagatcagtgttcatccactacctgactactgtcattcataggcattctgttccacagcaggccagctaacgtggtatttacaaagctcactcctcttatacaacaatccaagtgtttcttttgtcagttgtctgtgccccaggagatccctctctgccttgccttgccctctgcctttggagaccagcacctcatactcagtgaaggcctggagtgcttaagagggatttcttccagctctcttgccctggtcttcagtgtattagatgtattacctccatgctctcagtagaggcccataggaaagagtaggtaggttatgccagctcacacgcatcctttaaaaatggtttagaagtttagctggtttcttattactcctgtctatggatgtttccttctgtcactctactagggatgaaacagctaatcatgttcaatagttacatttagac

SEQ ID NO: 54747 - DNA, 397 bp, Homo sapiens
ggcatggcccgggtgagctgcaggctaccttatttaagaccgggaatttagtcagcctggtgagccgactctgaggagatggagtatcgctgaggtgatgagagagaatgtggttgttagcaacatggagagagaaagtgggaagcccgtggctgttgtcgcagttgtgactgagccttggtttacccagcgatacagagaatatctccagaggcagaaactctttgatacacagcaccgtgtggaaaagatgccggatggctcggtggcgctaccggtgctgggagagacgcttccagagcagcacctgcaggagctgaggaatcgtgttgccccatgcagtccctgtatgctcacgcagctcccggatcctgttccttcgaagagggcccagggt

SEQ ID NO: 54748 - DNA, 1315 bp, Homo sapiens
  misc_feature (1)...(1315): n = a,t,c or g
ggtttttttttttttttttttctcagagaattatttaataatagaattaccatacttttggcgcaaatgtgtccaacaccaatgtgacaagtacatatatcagaatcactctttcctcagagaatcacaccttcccttggctctgcctgtggatccaaatcaagcctgggtgtgtctgacaataccagggcacggtttgcttcccggccctccatctctactgtttggctacagcttgagttcactaggcatcggctcccctctcaggccagccagcaagttgttagctgccaacaaggacatggtgttgcgggttctgtgggtggcactgccaatgtggggcagaatcacacagttcttcagggtcaggagagggtggtttgtaggcagtggttctgggctcgtcacatccagtccagcagctgcaatcttaaccactggccaaggcctggtacaggtcgtcctggtttacgacgtcgcccctgctgatgttgatgaacacagctgtttccttcatcttctggaagaagtccttgttgcagagtccctcggttgcaggtgttaaggagcaggccacgacgatgaaatcagattgggcagccagctcaggggtagacacaaactctgcctggaattccgctgcttcctcaggcgctggggctggcgccctgtgtacagaaatctctggacaccgaatggtttcagacgccgagcaatggcctgggcctatgcggccccagcccgatgatgccgacagtgctctgcgtgagtccatagccacacagccagaggggcttccacgaggtccagccaccattcttcacttcctcgatggcctccggcaaccggcggcaggtggtaagtagcagggagactgcgagttcggcggtggtatctgtcaaggaacatctgggttgtagccaactcggatcccacgcttcttgatttcatccaaagccaagtggtcgatgcctacagacatggtgctgatgactttgagattggcccctgcagcatcccaggatcctcttgtccacgtggtcggagaggaggcagagcaggccgtgggcccccgccacacctcgctctagctccttggcagggatgggctcatccgagtcccactgctccacctcacagtctgccgcccgggcgagcgcgaccctaccctcgggcgggtatcctgcgggtgacgaacaccttcatgagtcgcaccggtctcatcctcgtgccgaattcttggcctcgagggccaaattccctatagtgagtcgtattaaattcgtaatcatgtcatagatgttggnattcaaag

SEQ ID NO: 54749 - DNA, 358 bp, Homo sapiens
gccttttgtttctgtcataggtcttaccacaatatgtaattgctttatttgttccccacaaaagaatgtaagagaccatgtatgcttgtttaccagtgtgtccctagctcttaaccgcatgcctggaacataactgttcaatatttatttgttggatgaatgagaaaccaaatattgttaacaagcttgttagattgtttaagattttcttctatagtagtctgagttgcatgaactttatgatatctacctcattagggctgtcgggctcacgaccttttcagatgattaatgttcccaaaatttaatattcaaataagagaaaaacaatacaaaagcaccattgggttgagcatgg

SEQ ID NO: 54750 - DNA, 488 bp, Homo sapiens
tactagtctttcacttctggctgaacatttttctttctgctttattgcaccactttactgctcattaaaatcactaattcttcctgattaatttgaaatcaaatggcaatgcaaaacatatacatccaatgtttctcctactttaaaaaagctttggccaaagcttttattattcaatatggtggtgggaaactatcataatgcatgtggtcatacgcctaagtgagctactttgttgcgggacagaagcggataataggagcataggtaatggagccaacaaacttgtacttgaaagccagctttgccactacaagtaagtaggaaagtttatgcatccattggatgaagatccatttgataatcttcctcagtggacagatgggaggatacaatgagaatttatatgtagagcacccggccagcatatgcctaggatagaagccatctaagcaagcgctttgtatgatgtgaaatccttaaacggg

SEQ ID NO: 54751 - DNA, 2267 bp, Homo sapiens
aatgagaaagctaagggtggaagtctagagtgaagctgagttttcagcttgggcagaggcttaaggaataaaagatggaagagtaattaaggagtgggtcgtgctgtgggaagtgctgtgtcaagacacctgaggatggaattggtagccctctgttttgggactggttcagatggtgttttgggttcctttctatgacctttatctctgaaacttgattgtcttaaaatgtattttgtgggagaaaatataattattgtatattttgtgtaacagaatcagtgagaataagctgctgtcgcaaactgtcttgcctagagagagggcagtggcatacagctgcagaaggggccacacgggcctgctgagtgttccgtttcatttcaaattaggtcattctgtcttgattttgatatggatgtttcagaagaccctagcagatgtccctgtttaacttgaaaccatagatcagaaaactaagttcatatttcaattttacagagatttgaatagaaaaagtaatcgagttaaaacctgcaaagctaaaattgaactacttgggagctatgatccacaaaaacaacttattattgaagatccctattatgtaagtacagttcacgttttagggctaatatgaagacccaacacatttgtatcctgccatattaaataacagatgagattgtgttaaggatgtttttgttatgcaggttttgccattttcttctttttcctgtccatttaggggaatgactctgactttgagacggtgtaccagcagtgtgtcaggtgctgcagagcgttcttggagaaggcccactgaggcaggttcgtgccctgctgcggccagcctgactagaccccaccctgaggtcctgcatttctcagtcggtgtgtaatcacgttccagggcccaaagcccagctctttgttcagttgacttactgtttcttaccttaaaaagtaattgtagatggaaatcagttgtgtttggcaggagaatcaataaaaatctttgattcagacagcttatggggtattttaagcattcttagactagttgaacatctcactttgccccagttacaaaaatagtagaacaagcaacataaaacaatgaaggaaaacctcacttgaaggcccaggtcaacatctaagcctgttgagacttagataatcgagtctacctcttcagtaggtttgtgtggatggcctggaggcaggtgccctctgctccccagtgctacctctctcttccctagggccttttgtggattgacagtagtcccctccgtaggagctcacagtctagattagaagtgttttaatttctacacacccatagtgcacacttgtatattgaaaagatagggaagagagaaacatttatggaatcagtcgttggcaccttcaatacttcatgatttttgtcgagtttacttcatgaggaggtcagcccattggctccccatctgaaccactttgcctctgaaacttaattacatccagaaaggaggacacttgtatgctagtctatggtcagttgaggaatatgactgtttttatatgcacatgtaacccaaatgtccaatataaattggcttattttttaaaataattttaaaagttgggaaaagtgttattatttggcatgcttaaatattgaataagtattcttcatcagcatttaataaatgtataggcagatgtaaggtaatttctgtgtattttgagataatgtcaaaatcatgaatatttcaaaataaactggggagttataaaaatacaactagagatataaatctgtgtctgtcctgttgttgattgacaggtaggaagcatttgcaaaacattgtattgtcctttttacatgatctgtgatgttaggcgtgcgtgccatattttagtcttcaggggataaggaagtaagacatgatgaaaagtcagcacgactgctgccccatgtcatcatgtctagtttctgaaggaagtttgaggttctacagctggaactgtccttgcccagtaccatcctctggacatgttgcctctacgctgtgccctcctgtgcagtgatcgactgcctggccaggacatctgcactcctgacctcagtatcatgagggtcccaggcagtgcatgggaggagacacgtttgatcctttgactccctagtatctttgaggataagcttgtttgcccagatgaaaagtgagtagtttcccactgtacccatgtggaagtgcccagggctgtcttcatag

SEQ ID NO: 54752 - DNA, 101 bp, Homo sapiens
gctcccagcatttcacttgttaagtgtgtgtcctacagaaatagacttttctttacctgagttgaatactactaatatgtgctgcatggcattaagttttg

SEQ ID NO: 54753 - DNA, 703 bp, Homo sapiens
tataagattcagttggctgtccttttcctgctcccctcaaaagatttttagtcatacagaatgttaaatattatgtattctgacttttattttcccccggagtcttgtatatttatagttttctatataaactgtagtatcttccatgaaggacccaagggctcaaatttactgtccttaaaaacaattctcataggattattcttttcatggtattttcttccataatatctcattttaaaaagaagttctttatgaacttagtgtccattgtcatgcaatgttttttttttttccattctttttccctgtaattttggaatttctggtcctgggaagaatcaaacaaaatcttaagttctatgagaacttggttcattgacatattctgctgaagaaagaaaaattaaattggtagtaaaatatagtcttcaagtatacgtttgagagtgcttttttttgtattaagttctgctgtcacttcatttcctgtattatatgtgatgttttttcccccattaaaaataccagagataatggagatattttgcactttagccttgatgaaaagtacaagatatgttcaaagcttccctaatttttttcttatttgtagccacataagtttcaagaataacatggcacacagaacaatggaaaaaagtttctttccattggaaaattatatcattttgggttgcca

SEQ ID NO: 54754 - DNA, 244 bp, Homo sapiens
gggccccacttgttgagtgcctcctacatgtcaggcacaaacattgcagaatcagaatggattatcacgcccatgccatggatgcagagacaggttcagaaagcagagtaactcacccagggtcacgtagtatggacatggccctgtgctggaacccaggcctggctctcagccattcctctctgcgtgtgtgctcctctggggatcaggagccacagtctgctcatcagcaaaatgagagcct

SEQ ID NO: 54755 - DNA, 435 bp, Homo sapiens
  misc_feature (1)...(435): n = a,t,c or g
ggcaaccgggaccctggcccggtaatggcctgaaagtcagcaatcgaccaagtccaagctgccctggaagtcaaggaagtatgccgagattttgctgtcctggaggaccacaccctggctcacagcctgcaggaacaagagattgagcatcatttggcatcgaacgttcagcggaaccgtttggtccagcatgatctccaggtggctaagcagctccaagaggaagatctgaaagcgcaggcccagctccagaagcgctacaaagaccttgaacaacaagactgtgaaattgctcaggaaattcaggagaagctggctattgaggcagagagacgacgcattcaggagaaaaaggatgaggacatagctcgccttttgcaagaaaaggagttaccggaagagaaaaagagaaaagaacccttttcnagagttcct

SEQ ID NO: 54756 - DNA, 369 bp, Homo sapiens
  misc_feature (1)...(369): n = a,t,c or g
agtaacctaggaaatacatgttatatgaacagtgttatacaagccttgtttatggccacagatttgaggagacaagtattatctttaaatctaaatgggtgcaattcattaatgaaaaaattacagcatctttttgcctttctggcccatacacagagggaagcatacgcacctcggatattctttgaggcttccagacctccatggtttactcccagatnacagnangactgtncttgaataccncagatttctccntgacaggctccatgaacaagaanngatctttgaaagttcaggcctcacacnanccttctgaaattntggaatgcagtgaaacttctttacaangaagtanctagtntagcg

SEQ ID NO: 54757 - DNA, 399 bp, Homo sapiens
aaatattttacctttcttcgttttactttggatgacctgtttctgttcccagttaggatcaactcaatcatttgcatactgtgattcttttttgcctgctaaaggactttgcgctctctcctgcatcattatagttttttctctctactgaatcattcatgttagcaaacaaatatcctatatcttaagtctttttaaaaaggaactttcccttatgtccttccaactacctctctatatttctggtccctttaacaacaaaactttcccaaaagattgtctatactgtctccagttcatttcattttgaacccacttcactcatggctttctttgtcacagctgttatgaaacagctgttgtgaaatggctcctgatgctatattattaaatccatgg

SEQ ID NO: 54758 - DNA, 386 bp, Homo sapiens
ctttgagcatgcttatgcctcacagtttggaacatttctgggcaacaatgaaagtgaaagatgtaagttgaagctacagcagaagacgatgtctttgtggtcctgggttaatcagcccagtgagctgagtaaattcaccaatcccctctttgaagccaacaaccttgtcatctggccttcagttgctccgcagagtcttccactgtgggaaggtattttcctacgttggaatagatcctctaagtatttggatgaagcatatgaagaaatggttaacatcattgaatataataaagaattacaagcaaaagtcaatatccttcgaaggcagttggcagaactggaaacagaggacgggatgcaggagagtccctgaaaggtctcct

SEQ ID NO: 54759 - DNA, 486 bp, Homo sapiens
cttaaagaagatatagtatgttgtattctcttcttagagctttcttatggaatgccacaatccaattaccccactgtcaattcatatttgaacttaccaaaacaaaggaggattacgtatatgttttttaaattcaaaaaagaatatgaaattatacctttagtatccctttgagacatatagtttaaagaaaactttttttaaaacaaaagtaggaatatatagtaagattgtagttacaatgagtatatgcacttttgatgctaggttttgcttttctccccccagtcatatctcatgatttccacagttgttgtattggtgtggagttttctgaattggctataagctgattacatattagaggtttatttttatgattctatataaacgtgcacgagtaatttaaaacctgcattgggattgattggaatattgtcctaaattaattaaatcttgcactgttttgaatgcatctgctattta

SEQ ID NO: 54760 - DNA, 431 bp, Homo sapiens
  misc_feature (1)...(431): n = a,t,c or g
acctcgcagctggtggacaccgcagttcccagaaaaatagaaccatgagaagattttactgttgtaaaatagcttggtgtaagacagtttttcaaaaaaatctttgtatggtaaaaagaagaaaacacatttcacgtattattttaaatttacatagacctattagaatagtattttataaaatcaaaagctaaatttcttctataaaatgctagtaggatctatttcccccaacacacacaaattctacctaccgaggaagccttgctagtaattaatattatgtcttttcttttgcagtttttaatgggacaaatggattccttgaatgagccctttctaccatccaagtgtgggccaagacttccgcccaggttagaagaggttttggtggataatcacaccaccagagctgangcttgnttggtctt

SEQ ID NO: 54761 - DNA, 488 bp, Homo sapiens
ggactttgcttttgaatatatgtatgcaggataccatcaagtttcaacatcttgacttgtgacccccaatgtcaacagcttttttaaaaagcaaattcctgcagtaatgaccaaaacccattttaaaaattgcttgacaactgcactcaactgcagctcttacattaacttcaccatggaaaccagttccaactccaggaagtcaccattcaaagaattagatcaactagcccaaccacttcattgtacagatgaagactgaaagccaaagatgtgaagtggtttccacagtatgatacagcctataagggtaaagctgggttaaaaatgcaggtttcctggatttggggccccatggccttgccagtgaaaaggttatttttggactcagagggctttaaaataaattttaagatgtatcagatacacaaacatttaatgggcacctatgggttggacactttgagaattcttaaaagtataagtgg

SEQ ID NO: 54762 - DNA, 412 bp, Homo sapiens
gagccaccacacccagtccaaaaagtgattttctaattccatagtttcttctacatttcttaactggaattttgtaaggaagagttatccttattcatttatttacccatttacttgtaggagcatgtatcataaattcttaatctatggggtgtagttagctactgtaaatttgatgcacatatttttccagattcaataagtaggatccccatcaagctatcttctgaatctttaaaaatgtattctccttatttcatgggtatataattattttctgggcaacagtttgttcatggtacatttgtctccagccctagactcagaaaaatgtaatttattttaatggagaatactatttagaagctgcagtctctgtgtagggaggtgttcctaggtaatagtgccctgc

SEQ ID NO: 54763 - DNA, 416 bp, Homo sapiens
ggtcgacgtttcaaaacacaaacataataggtagaggtcaattacttaggggagtctaaacctggaggtaacattagaaatagaaataataaaatgcagtgtttttggatttgtctgttaagattattttaatccaaatcatatttagtggtttacatagttgtatatcaaatttggtttcacaaataaattatatagtaaattaaaaaacgcaaaaaatgtatattgttatacattctgtaacctatgaatccatataacttgggcaagaaaattatataattaaaaataaaacctttctgttctgaattatgttttagggacagctatatagttcacactcacaaaggaatcataaaaactctatgtataatcttggaagtaaaaatatctgttgtatcatatttatgaagtat

SEQ ID NO: 54764 - DNA, 475 bp, Homo sapiens
gaagaggacatcttgtaataaatttattgtattttgttacattttccacttttctcttaattccaactgtatactatataatcaacgctgtttcagaaataaaacgtttcaaacgtaaaaatataaattctgcttcttaaaagtgcatacactttgaataataaaacatacaaataaataacagaaatcagtgacacatctcatgcacttgttctaaaataaatttaaaatgtacgatacacttttcttccagcctctaggaaagacatcctgccttccatattactgtacaactgaaaatgaaaacggacacagaaatcactatccacggtgcatgagtaataccaaagcactttgtgtaacagtgatgtgacatgcagctttcaagacaactacagaaattccagtgtaaaaactggaagagttcaatcaagaaacgacttatgtcaatgggggcttaaattccatttttaac

SEQ ID NO: 54765 - DNA, 323 bp, Homo sapiens
ggccatttatatgtttttcatttactaatatccttttccgtgagcgactctatatgggtaccatttaaataagaagaaaggaatgttctcagcaactccccagggaggcatgtgcaccttctgccagcccagggcaggtcacagagctgggcaggagccagcaaaggtgtaaggcccatgcctggcccaggactcacccagtcttccactctccaaggtcttatttcacttcctggtacacactggccagtacggctgtccccgtaatgggagggttgtactgtttgattttaaataacagtttgctgttaagtcatgaagca

SEQ ID NO: 54766 - DNA, 437 bp, Homo sapiens
gcagactcggatgcccgtcttgtcaggagccgagtagctgcgctgcatctgcctccctggggggtcctggcaggccagggcacccaggtggttgcagtccctcgacgagagcccaggcttctccttggtgtctttctctggatcccctggctcggagctcacaaagccaaaggcagggttgttaggcagcttcttgccccgggcatctccgccagcaaggtaaggggaacagtcgagcaaactttcaaactcagacatggaagaaacagatttggttctgcgaaggacagaggaggaaacgtcgttattagtggaaataacactgagggcacactctggtctaccacccttggtccgtgtgctgcgtgagggcaaagaccaagacccgtcttgtcacctcttgtaaagatgttgttggtgcccagtcccacattctg

SEQ ID NO: 54767 - DNA, 455 bp, Homo sapiens
tcaaaattcaataaataggttttactatgtagatgaacaaagctttaaagtgaataaggacagcagtgaagggcaagtcaaggatagatacttcacaagccaactgaatgaagaccatggattcgttagctctgagccgtttaacatttcatattatacttagcaggaatgtatgacaatattactttgattttttgctggtcccgcttaattactgcatccagttgcttccttttttcattttcttcttgtagttttctttgtagctgtatcttttgatatttcatgtgatctacactctgctctagttcattagcacgtttctcattttggattgacagtgatgccagtttcttactatcttggtgcttcttctgtaagacctgaactctcagctttgcagcatccacctttttacgaaactctttctgtaattttaccttcattgcaacatc

SEQ ID NO: 54768 - DNA, 430 bp, Homo sapiens
gctttctacaatagccatacattctgcaatatttatagtctataacttattatctctagttgacaaacatggttctttgtttcttaaattataaatgtctttaacctaaaaaaattaaatagtcattcagcttacaggtctgcttaaaaaacagaacattttttagcttgttttgaaccaatttttttaatgttcctgtgcaattagtactttttactttaaacatatgcacttaaagcatccattcacattttaggcactcatttcagtattttctttctgcttacattagaacaaaagcaaatgttgggttctatggaatcttttccatgtgcatgtatttgtatcctttcttggtcttgtgatcttgtgatgaagacttctatactaagcttggtttagattttttgttctgctttttttttttttt

SEQ ID NO: 54769 - DNA, 324 bp, Homo sapiens
  misc_feature (1)...(324): n = a,t,c or g
taggtaacacattcaaatgtttctaaataaacaaatagtataaaaagataaacagtgaaaagcctccctaccatccttgtttcccatctacctagttccctcccactcctatagggaaccactgctcctagtttctgatgctccatagcaatttgaatacgacccaaacatcttatcctggccactgaggctacctgggccagatcctgctacttctccactctcatttcctttcactcttctccctactcatggtgttntantnnnanngctttntttggtntnntgaatcaaccaaattatttcctgattnaagtatttacc

SEQ ID NO: 54770 - DNA, 756 bp, Homo sapiens
cggacgcgtgggcggacgcgtggaggaaatcaagcaaggcaatgacaatggtgtccttgaatggccattttggacaaaactggttgtggtagccattggcttcacaggaggtcttgtcttcatgtacgtacagtgtaaagtctatgttcagttgtggcgcaggctgaaggcctacaaccgtgtgatctttgtacaaaattgcccagacactgccaaaaaactggagaagaacttctcatgtaatgtaaacacagacatcaaagatgctgtggtagtgcctgtaccacaaacaggtgcaaattcactgccatctgcagagggtggcccccctgaagttgtatcagtctgatggaacctgttgggagtttcttcaccgaagaatatctttctagccctcagccactacaaatgacagaagtgatcttgaattatttactcccttcagctcctcctttctcctactgacacatttttcctgactttgttcaaagaggaaaggagaaaaacaaacagaccaaatgcccaggagcccatgaagtaatagcgtaaagtaaagtatgatatggaaatgtgaagtttgcaagagaatgatttccaagacaattaagaactactggggcaatgaatgcttttaggcagtaatcaaagattaaatggacccatgatactcttcttcacagtaacaggggaaaagttcaagaatacagacttgaattgcgatgtgtattacttctagggccttgtaatgttaacctc

SEQ ID NO: 54771 - DNA, 1523 bp, Homo sapiens
  misc_feature (1)...(1523): n = a,t,c or g
ttttatgtgccctgggactctttatctaccagtcactggatgccattgatgggaaacaagccagaaggacaaactcttgttcccctttaggangcntctttgaccatggctgtgactctctttccacagtatttatggcagtgggagcttcaattgccgctcgcttaggaacttatcctgactggtttttttcctgctcttttattgggatgtttgtgttttattgcgctcattggcagacttatgtttcaggcatgttgagatttggaaaagtggatgtaactgaaattcagatagctttagtgattgtctttgtgttgtctgcatttggaggagcaacaatgtgggactatacgattcctattctagaaataaaattgaagatccttccagttcttggatttctaggtggagtaatattttcctgttcaaattatttccatgttatcctccatggtggtgttggcaagaatggatccactatagcaggcaccagtgtcttgtcacctggactccacataggactaattattatactggcaataatgatctataaaaagtcagcaactgatgtgtttgaaaagcatccttgtctttatatcctaatgtttggatgtgtctttgctaaagtctcacaaaaattagtggtagctcacatgaccaaaagtgaactatatcttcaagacactgtctttttggggccaggtcttttgtttttagaccagtactttaataactttatagacgaatatgttgttctatggatggcaatggtgatttcttcatttgatatggtgatatactttagtgctttgtgcctgcaaatttcaagacaccttcatctaaatatattcaagactgcatgtcatcaagcacctgaacaggttcacaagcatattgactgactaatagcccaaggaaaagaggagatgaagttaggggaatctatgagtgaaggaaatccccctgtgcagggaggctagtatacccataaataagggtatatttggaatattaaaacataaacccctgtaggatttcattgtcttatttcagttatgaancccccgttgtatcatcattttttatcacagatgttctcagaattgtctacatattaaattagaaacaagacctaaagaaatgtcaatccctgaggacaacagtgaacccctgtaattcctaagtagcagtttgtctctgagacttatcagacacagggttttcaactgccaaaggattacataaatattcagaacataaaggattttagccatcttgagggtgcttactttgactgctaaaaactgaaaagtgattcaatactgcttaagtgcatggcttataatgtaattattgaatcaagttatgttctaagaaattttttatactaatcatttttcaagaggcatattagtatgttataaaatacttgcttttagtatactagaatttaaaagggctacaggaattttttaaataaaatttgtatttaataaaaggaatttgttgtaccagttcaa

SEQ ID NO: 54772 - DNA, 337 bp, Homo sapiens
ggcacgagaatttagaattcataaattcacagttttgcagcagagtgtggttaagcccaacctcctcccgtcatccctggctctttctagcaccacaaagaggtctcctgtacatgctgtgaacaccttgcatgcacgcacaaggtctaagctcttgtactcccatccccaaacaagtactccttggcccaagggtgtacacaagtgtagcacagtcttttctaaggacagacctaggaaagaggcctgtgtgggccttcaaattgagttagaagtgcttgggcaagaaattgcaaagttctgggcacctggagtgtcatttaaaagtggggaggta

SEQ ID NO: 54773 - DNA, 430 bp, Homo sapiens
gacgggaccagagcacgttcctggctgcagaggccacaagtcacgctgtctctgagagtggaatgtcaccatcgccccaggtggggatttttgtgtgttttgttcactgctgtacacccagcccccagcacagcgcctgtccaggacaagtgcccagtaaacacttgggaagcaatgcaagcgtcctcccagcagctcctgcaaacagacccccgacccaagcccttccttctgcctccactgccaccactgctgctcatctctgctggcacagaagtctcttccctggtcttccagaaatcccctctccacactcagccagagggagctattaaaactgcgggccagcccacatcagtccacagcaaagtcctctctaagggatctctgttgcttggagaataaaccctcggattccttccttggctct

SEQ ID NO: 54774 - DNA, 363 bp, Homo sapiens
  misc_feature (1)...(363): n = a,t,c or g
ccctaatcatgttcagctactctagttggctccaggggatgctgagctctccttgtacgactcagaggaggacattcgcagctactgggacttagagcaggagatgttcgggagcatgtttcacgcagagaccctgaccgccctgtgagggctcatccagtcctcatgctgcctacagagtgcctgncacttgggacttccntaaaggatgagcctggggtcacagggggtgtcaccacggaggaatatgcatncnaccaaattaggtgtncttcttgaatgccnntctnnantaccntanntttcttagcncttatgnttatnganngtttcagtggntagcacanngnttggcacntagta

SEQ ID NO: 54775 - DNA, 374 bp, Homo sapiens
  misc_feature (1)...(374): n = a,t,c or g
gtttgttttgggtgaaagagattcttgttctaaagttgccagaacagtttagtttgggggtttgagaattgtcattcccctgctctcatgaacatatgtaggcatgaatgtcagcagtgatctggtcaggggagcttcttgtatgcttactgacacagagtagcattgacaaaaaaagcagacaaagacctactttcttcctagtgcacattaatagaagnnnnnnnnnnnnnnnnnnnnnnnnnnnntaggtaattaacttgtagatatgtctaatatttttctttttatttttataagctcatcccagctgttctaaaagatatgtcaaatttaaatttcagtaagcagttctggtttacaagtaataaatt

SEQ ID NO: 54776 - DNA, 418 bp, Homo sapiens
cagtcaagtgagtataatgttatttcagagtctggctggtaagtgggaacaggacaatagaaagtaaagatagtctgttgtttttaagagaaactactgcattttaaaagaggacacacagcatccagtagagaaggagagatggattaatcgaggccactgagattaagggaggagatggagtacacagcattagaatgttgctcttgggcagttgtccggactaggggatagaaaaagaattcttcttactggtcctacaggatggtaaggatggtaaattagtagatggacaactcacacctgatttgctggacagattgttcacaagggtccgtaatgaacaagtgcagagatggtgcagaaatagacaccatgcatgaatagctctttgttcatgtatcctgagaaaagcaag

SEQ ID NO: 54777 - DNA, 929 bp, Homo sapiens
tttttttttagtacaagtggtttatttctcttccaggtgaggccgcatgtatataagcaaaggtttgcccacctggttccttcaggaactccccgaggaatctgtttagtttccatgcattaaaaacaaccctctagttgccaataatgaaactttaagaagcaacactttgacgtcgcagagttcctctctgcatgtgacgcggatataccaaagtgagtttatggcatacagtatgcatgggttaatgtaggtgagacagggagtcccggctgccctgtggccccattctgttgtggaggcttcgctgggagctgagaacaccctgctgtccatgttttgatgacaggtggttcttccaaaacagaagcaccgagtcaccgcacggcccctgcttcagtgtgcgagggccgtggggctctggtgttgtgaactccaggttggcaggaggttggaagcaccaaagaccccaactctggtccctcaacagggcagtattgggggacatttattccttcctggccaataagctcctgtggcctgggacactgggtggggacaggtggtgggggtggggcagggcagaggcctatcctcctataaagacacagttgtagcactttgctaaaaccttttctggcaaacttacttggagacaacagggaggggacagctgatgtaggcatttggctagtcccctagaacagggaactctggctttccctcttggcttttttctcctcttaaagatcctccctctgtgggtgagatgaacccagatccccaccaaacagtagcttgggacaggatgcctcactgatccttatttaagaatcgactccttcccgtctcctccagatctgcagatctccagatcagtgccagcaaaatctgcaaaagtagtgacctaaccagggtaaggaatgagc

SEQ ID NO: 54778 - DNA, 355 bp, Homo sapiens
gcataactagggtagaacaatgctataaaatcctaagctatacgctgttgccggctataggttccagcccacagccccctggctccttgtgtgtttgagaggtgtttacctttctcctggcataagcaggagatctgcaaagggctcaccccctccctagactgtcctgtccctgaaggtctccgcagctcctgctcacaccctgcttctgggtgtattccagcgcagggtcaatgccccctttgctggccactccagggcgggccacttctggaggtaaggcattttccttcagcgaggggccccgctccagcctgcaacgggcctgtcatcacagatctggtctagtgtctaa

SEQ ID NO: 54779 - DNA, 1078 bp, Homo sapiens
  misc_feature (1)...(1078): n = a,t,c or g
ttttttaatgtggagaaatttttattactttgaatgttttagaatgcaggtagaagagacccggagctcaaatagcttaaataagtaggaaatctattggctaatacaactggaaatgcggagatagggcaggctgcagggctggtggctcagggctcagggggccccaactctctgtgctgctctgaggcactgccttcaatctcaggttggcagcacaaagctgctgagagtcccagtgtcacgcccagaccccacaatgccagggaggaagacaggttctatctaaggagagatcttccatccccacctctgcggacttttactcacttctcagggacctgcatgggatctcaggcccattcctgaagcagttgttggcagacagagtggaatagtgtttacagcaggcaggcagccttggagtggaggcacacagctccaagtctatcaggaagaaggggaaatgggagctgcacagacagcaagcagcatgctcgatagaccacgaggatctgagtctgaattggtgattattagaacaatgactccatggggtgatacattagaagtgctccagggtccagagatttaaatgtaatgaaagatgaacagaaaaataatgaaaaaaagtatgctgcacaacaatagaaaaacaaaaatctcataatgcaaaagcatcaagtgtttgactctgagaagcgccttgtatgcccagttactctcgttctccctcagctcttgcttgtgcttctccacctgccattccactttggcctggtactgcctgtagtcttcctggcaggccccagctccagttctttggagcagctgggcatccaagaagaggtcattgctgtggaaggagccctctcgctccctccccagcctctcaatcacagccaggagctctgcctgctgctgcctctgctcctccacagagccccagttgttgaaggcacagtaccttctctcanactcccgcaccaggtctttcaggctgcagttgtccgtgtttgctacatagtcatccagggcctggccccctaagtcctctttgtgggtgaagaggatgacc

SEQ ID NO: 54780 - DNA, 769 bp, Homo sapiens
cttggctctcccaggaggctacgactggagccactggtcccgcagactccccgcgtcctcggtcgccgcgtccacgtccctctcgcgtccccgcccggcgccacgccgcctccatctgggttcggcctccgcgcggtgcagcgcagtctcaggccgcgggacaagcccgacttaaatctctgcaatggctaacgaagcttatccttgtccgtgtgacattggccacagacttgagtatggagggctaggccgtgaagttcaagtcgagcacatcaaggcttatgtcaccaaatcccccgttgatgcaggcaaagctgtgattgtcattcaagatatatttggctggcagttgcccaataccagatatatagctgacatgatctcaggaaatggatacacaaccattgttccagacttctttgtagggcaagagccttgggacccctctggcgactggtctatcttccctgagtggctgaaaacaagaaatgcccagaagatcgatagagagatcagtgctatcttgaagtatctgaaacaacagtgtcatgcccagaaaattggcatcgtgggattctgctggggtggaactgctgtccatcatttgatgatgaaatactcagaattcagggcaggggtgtccgtctatggcatcgtcaaggattctgaagacatttacaatttaaagaaccccactttgttcatttttgctgaaaatgatgttgtgattccactcaaggacgtatctttgctgactcagaagttgaaa

SEQ ID NO: 54781 - DNA, 1972 bp, Homo sapiens
ctgatcccctgcctcatcaatgaacttcaaggaatgtgaacgcacacatgccccagcctgcaaagcctacatctacacgtacaagcgcctgctcctaacggagctgggactcgggactcccccgcctgtcagtctggccccctgtgctttgctccctgtgctcagtggtcactttcccgctcccacttggggctgggagccgtgccaccatcccctagaagtcctgtcctcttcaccctgccctacctgagccgctgactcttctggcaaaaattctgttgggatttaaggccaagggtcagtgggtggcagggggctgacaatgagcttgtgtgttgttggtctgcttggtgtgtgtgatcgggaagataagctggggaggggtctcctgctggggtcctgatgcctctgtttccaaacaaggtacaggtttcagtccagactctttccccctggggaccaacagcagccagagcagtttagccagtttagttccccaggcctgtggccacaggcgtttctgacctgctgggccgagaatgggtaagttgtctggagtcaggtgggcccacgtaggacagggtcacaaagcctgggtttgtttctgggtactttgcgcctctggggtgctagaggtggggcatggtggctggaagtaaaactgccaactctggccctcagaactctcaggtatagaagcccaggatgtctaataccctgtcccagtgcccgagagctgcctggtgtcaggtagagaggacactgtacctgggtgaatgatcagaccctggtagctaagaaggaacttgtccctttgagtcagtgtgcagaccccctttcaggccatgcctctgtgaaccctgtattgctggggccggaaggagcccctgagcctagccccttcccgtctgccctgtgtcctcactgcgtgtgggtatgacctctgcctggtggctggtgtatcccaactgggcaagagatggcagagggtcccccttgtgggtgcgcttggatgtgcagagccttctccatggattttcttccctgtaagtgccgggcccctcaccccagctgacaggctgttgctgtgcctgctcacacctgctcctgcaggcacactgggctagggacgaggaaggagcagccacaagtggtagaactgccttggtggacaccagcctcgccctgtctttatttcctgaatggtttgtgaacttgctcacctggaccactgtatcctgccactgtccttcctggtctcgcactgccactgcatggcctcctgtcactgtgaatcgtggcccagtctcagtttgtagtttctcattaaattggccctttcactcccccgccctgggcctctgctctcttgcctggcttccttcttttttgagggaaagagggtggggctgcaggcagtctactggcaggacgggaggctgagtcctcagggtctcacaccctcagtgctgatgccatgccaactgcctgggacaacaccaacacgtaaggacctaattaaaccaaaccagagtcgggtgtagaccagccctgggatttccagctgtgactgggccagggcacacgttggtctcggcagtggctgtaaggtcaccttccttcctctgatgctggtttcaaccatctatatatggcatccacgcatgggatctgcaagctggagccctcctacccgcaggcttgagcacagcatcatccagccctggggaggcgcacccttaagcaagacagactgggctgaggctgacaggcagaagactaacagagcgcagtctgcacacgcaggttctgggcgaccatctggccctggccatctctgcactaactcatctgaattatgaaggtggcagtcttggtcagtagtttaaagagtttccctactttttaaccctttttgaaataaaacttttacaggtagtagattcctattaataaaattatttaagttcaa

SEQ ID NO: 54782 - DNA, 731 bp, Homo sapiens
  misc_feature (1)...(731): n = a,t,c or g
gccttcctttctgtccagtcctgctcagctgttaagatccatcatggccattatccttgtcccggactgccccaaagttcccagctggctttggggaacactgtagctcttgggtgtctcttgtctctggcatggttttagcgtcactgcgaacactcctttgcaaacatcaaacatctcaaagacggaaaaggatagatggcttcctccagcctacacgccccgtccacagtggcatcaccctcttatcccaaaagaatatgccagttcccatccagcaccgaagaaaatcagctcctggggctggtggttggaggtgggtctgtccactgtgggggccaaagtgttcccctgctggagacagtttgcaagtaaagaacctaaggatggggacagcatcctgtgcttgggcattgaccagccaaagctcacatttagaaatccctcagtgcttctgtggtttcacctgggcatcgacgacattagggaagcctttgtgaccacaagggcagggcttgtgccctgagtggcgaggtggtgacctgaggccagtgtgatgtggttggatctcagcgtgtactgaatgccagtctggccggcacactcgaacgctaagagaatggtccaatttgatgatcttatttctatntcgntcaggttttgactttttgtagatgaaaactaccagggaaaaggggaagcaggtacccaataaagtttagaaagatcca

SEQ ID NO: 54783 - DNA, 546 bp, Homo sapiens
ctcaaatcagtgatctgtcaaaataggccttgtaactgaaataccttacaaagcagttctaactaatgcaatgtgttttttaaaaatttttaatgaaccttacattgtgaacataattgcaacatgttttaagacaaacagtatttaatccttgaagacctgtcttgtatgtctctcaattttgtcagaatttttattattgtttttcacatatgtgaaataagcagttttttcagggtacatagggtatctttgttttacagatttttaaagatgaggttttgaaaagccctcagaggtttttgttaaaagactatcttgcttaataaatgacaacttgttaacagattcacacattacaagtaggacagtataacaggagattggtgtgtgaatgctacaaaacagtcagcaaaaggaatcatgtttgcttgtgaaacttcagaggtaccctgaaagtcatttcctaaagctagtgcatgtgaatcttttccttgaattgtgcagaataattggattgaggcacatattttgaggagtagcaag

SEQ ID NO: 54784 - DNA, 538 bp, Homo sapiens
gccctgagcccggcgagcaggagaggaggtcttccgggccgcggcctccgagcgcgcgggatttgcagaacttaatatgaatgtgaagaacttgcaaagaaacttgaaaacagccaaagggatggcatatcaagaaataaattggccttggcagaattgtatgaagatgaagtgaagtgcaaatcttccaagtctaatagacctaaagccacagtcttcaagagcccacggacaccacctcaacggttttactcaagtgaacatgaatacagtggattaaatatagttcgaccttcaactgggaaaattgtgaatgaacttttcaaagaggcaagggaacatggggctgtccctctgaatgaagccacaagagcttcaggtgatgataaatctaagtcatttacaggtggaggatacagattgggtagttctttttgtaagcgggtctgaatatatctatggagaaaatcagctgcaagatgttcagattttcctttaaactgtggagcaatggtttcagtttagatgatggggattt

SEQ ID NO: 54785 - DNA, 420 bp, Homo sapiens
  misc_feature (1)...(420): n = a,t,c or g
ggtaattggatgaagatagagataaaagtggacctagaacttctgaatcttcctaagtgatttgagatagattatgagttttcttttggggtgaaacctgggtttaaaggcccaagtgtatcaacagaattttaatgattgatacttttagtaaaataggatgtttttggtcaaaaatattttttaatatatagtttttatattgtatatagaaattcccaaatatacatactaatatagatagatgttgtagcttacaaatactgtgagtacagatgctattttattgacttttttggtcagcggatatttatttagctactagtcatttatttaacctgatatatatctagaataatacgcatactctaagatcagacaaattgaaattttcataagacttactgnacacttggctgg

SEQ ID NO: 54786 - DNA, 1814 bp, Homo sapiens
ctattgttcagttacaagagaaactttatgtgcctgtaaaagaatacccagattttaattttgttgggagaatccttggacctagaggacttacagccaaacaacttgaagcagaaaccggatgtaaaatcatggtccgaggcaaaggctcaatgagggataaaaaaaaggaggagcaaaatagaggcaagcccaattgggagcatctaaatgaagatttacatgtactaatcactgtggaagatgctcagaacagagcagaaatcaaattgaagagagcagttgaagaagtgaagaaattattggtacctgcagcagaaggagaagacagcctgaagaagatgcagctgatggagcttgcgattctgaatggcacctacagagatgccaacattaaatcaccagcccttgccttttctcttgcagcaacagcccaggctgctccaaggatcattactgggcctgcgccggttctcccaccagctgccctgcgtactcctacgccagctggccctaccataatgcctttgatcagacaaatacagaccgctgtcatgccaaacggaactcctcacccaactgctgcaatagttcctccagggcccgaagctggtttaatctatacaccctatgagtacccctacacattggcaccagctacatcaatccttgagtatcctattgaacctagtggtgtattaggtgcggtggctactaaagttcgaaggcacgatatgcgtgtccatccttaccaaaggattgtgaccgcaggaccgaggccgccaccggcaactaacctatgaccttctgacctctgaactcttcacccaatgatgacctgaccatgcctgcctgctgatcagttaactggtaatcgcctttgcttgcctgtcgtcagtgcagcgagctgaggcacttgtccgttcgtcttaccatctaaccaaacaaaagacaaagaaattgttgtcctccaactcagctttttttttttttttttcctgtttgggtgaaagtggttctagaaactgcactgaatagtagtaaagcaataaggcccaattcatcccacagcactgatcatcttttaatatcccaccctaagcgaacggtaagaaggcctctcttaagaaggggagacagatggtccttaactactcaatgacagaggcagttactgtgagagacttctaggaatctttttcttctcatagcgaagtcaaagctctctctgaatgtactgtgtgatgatgcatcatgcatgaaccttcggtcagggatatcattggtgaagtgatttcaaaaagtattcaaaatttgatatgctgtttagtcactacagtgccctcaaagggcagaagttgcagccttttttatattgcctgccaaaatttgaagtattagaagaaagtgtgccatgagagaaaaacttaaggagttttgaaaagtaatgcaaataacaaaactgcaacactatttttaaaaagataaatatctgagttaaaattactgaatctttattttacacctaaaaaaatatgagaacaaggtacatgcattatgtgtcacattactgggcaaactgttcaagtatttttttttaaacctccctgtatagaaaaaaatcattaaggatgtaaaagccatgcttgcctatttgctgtatacatgtaatgaaattgtagataaagtgtagtgcattgaaacaaatgaacaaaaagtagatacttttactatacaagggtgctggtgcagaaaaaaatatatatatttttggaaatgtagcattttatactttcaagtgttataaaaaaaaa

SEQ ID NO: 54787 - DNA, 385 bp, Homo sapiens
atccagtaggtctactggacatctgtactggttgttgtggaggaacctctggcttgctcattaagtcctactgattttcactatcccctgaatttccccacttatttttgtctttcactatcgcaggccttagaagaggtctacctgcctccagtcttacctagtccagtctatcccctggagttagaatggccatcctgaagtgaaaagtaatgtcacattactcccttcagtgatttcttggagaagtgccaatccctgaatgccaccaagatcttaatcttcacatctttaatcttatctctttgactcctctttacaccggaaaacggctccagctgttctagctctccttcagttctttgaaccttcccaccttagggct

SEQ ID NO: 54788 - DNA, 394 bp, Homo sapiens
ggtgtgtatttggctttatatatagccaaagcctcaggtatagtagatgctaaattagttcttgctaaattaacaagtaaatgaattcacacgcttcttcataaaccaattaagtcatagatggaagaaagcaaaaagaactagattaaaccctgttcatactcaacacaattggcaatcataccttgaatgatggccagcaagatgacaatgacgaagaagaaaaaggtaatgtcaaagacaatgcgatacatttcataaggatcaccagcagggtcttcaatttcatcaccaatgccacctcctgctctcactcccacgtacatgtggaaaaggtaacactagagaagaaaaataagggggatttaggcaaaagtcacagttctgtttttag

SEQ ID NO: 54789 - DNA, 321 bp, Homo sapiens
ggggaaggttgccatcttctacacatggcttctaaaccatccaaggtctctctggatgacaataaaaaactgtcagtggggtaaaagaggcactggacatcatgtggaaggtttttgtggcccaggcccagaagtgcctatcacatctgtccatattccattctcagaactgtcactgggcatctaaccacaaggatggctggaaaatgcatagctgtgtgtccaggagaaaaggaaaataggattgttgaacaactaatgaggttctgccatggccttctttttaggtcgccaaatatctgctttcctctctttcccaca

SEQ ID NO: 54790 - DNA, 126 bp, Homo sapiens
aaaatgtgttcctcccattttcaagctttctccctcaatcaacgctggagcactggggacctgggcttcctccctggttctctctttccagactctatgaaggcttccaccttgctattaatacct

SEQ ID NO: 54791 - DNA, 3199 bp, Homo sapiens
gaattcgcggccgcgtcgacccagaagcaaaagtccatggaggctgaacgactgaaacagaaagaacaagaacgaaagatcatagaattagaaaaacaaaaagaagaagcccaaagacgagctcaggaaagggacaagcagtggctggagcatgtgcagcaggaggacgagcatcagagaccaagaaaactccacgaagaggaaaaactgaaaagggaggagagtgtcaaaaagaaggatggcgaggaaaaaggcaaacaggaagcacaagacaagctgggtcggcttttccatcaacaccaagaaccagctaagccagctgtccaggcaccctggtccactgcagaaaaaggtccacttaccatttctgcacaggaaaatgtaaaagtggtgtattaccgggcactgtacccctttgaatccagaagccatgatgaaatcactatccagccaggagacatagtcatggtggatgaaagccaaactggagaacccggctggcttggaggagaattaaaaggaaagacagggtggttccctgcaaactatgcagagaaaatcccagaaaatgaggttcccgctccagtgaaaccagtgactgattcaacatctgcccctgcccccaaactggccttgcgtgagacccccgcccctttggcagtaacctcttcagagccctccacgacccctaataactgggccgacttcagctccacgtggcccaccagcacgaatgagaaaccagaaacggataactgggatgcatgggcagcccagccctctctcaccgttccaagtgccggccagttaaggcagaggtccgcctttactccagccacggccactggctcctccccgtctcctgtgctaggccagggtgaaaaggtggaggggctacaagctcaagccctatatccttggagagccaaaaaagacaaccacttaaattttaacaaaaatgatgtcatcaccgtcctggaacagcaagacatgtggtggtttggagaagttcaaggtcagaagggttggttccccaagtcttacgtgaaactcatttcagggcccataaggaagtctacaagcatggattctggttcttcagagagtcctgctagtctaaagcgagtagcctctccagcagccaagccggtcgtttcgggagaagaaattgcccaggttattgcctcatacaccgccaccggccccgagcagctcactctcgcccctggtcagctgattttgatccgaaaaaagaacccaggtggatggtgggaaggagagctgcaagcacgtgggaaaaagcgccagataggctggttcccagctaattatgtaaagcttctaagccctgggacgagcaaaatcactccaacagagccacctaagtcaacagcattagcggcagtgtgccaggtgattgggatgtacgactacaccgcgcagaatgacgatgagctggccttcaacaagggccagatcatcaacgtcctcaacaaggaggaccctgactggtggaaaggagaagtcaatggacaagtggggctcttcccatccaattatgtgaagctgaccacagacatggacccaagccagcaatgaatcatatgttgtccatccccccctcaggcttgaaagtcctcaaagagacccactatcccatatcactgcccagagggatgatgggagatgcagccttgatcatgtgacttccagcatgatcacctactgccttctgagttagaagaactcactgcaaaacagtttaccccatttaaccttagttgcatgttaaccccaagtttgaattaatacctggcaaaaatagaaccaaaatttccataaaacccacggggtagtgggtccctttgtgtggctttccctaattaactccaaattgaatttccccccaccttggccacagggtgctttcaaatatttttaaaattaattttaaaaaaaaaatttattgatttaaccttttaaataaccaaaataattaattaactccttgtctatttggggtttggcaaaagaaccccctattcaaaggaatgtcgcctgttcgctataaaaaaaatggttccaaaattttccataaaaccgtgaaaactgaatgttcttcttcattttgctcccgtgttaccaacctaaattgctgcacactttggggggcttcggttttttttttttttcccccccttcaaccccttcaaaattctccccaaaaggaaagttttcctctcccccccccgcctatattaaacccacacttaaactgaacccccccaccccccccctctaaaaaaaaccaaatggttttttggttcgaccatctaaagcatctctgctcataacaaattccttttttttccatggcaaagctattaccttgtacgatgctctaatcatattgcatttaattttattttgcacagtgaccttgtaggccacatgaggaaaggcactctgtgtttttgttcggtctcagatttatctggttgagttggtgttttgtttggggtttttaattttgcgtgtttgcatagcataaaatcagtagacaacaccactgaggtcgttacgatcaacgatatccacagtctctttttagtctctgttacatgaagttttattccaattacttttcatggaatgacctattttgaacaagtaattttcttgacaagaaagaatgtatagaagtctccctgcaattaatttccaatgtttacattttttaactagactgtggaatttctacagattaatatgaaatggagctcatggtccgtttgtgtgttagatatgctgtagctgaagccctgtttgtcttttaaacactagttggaagctctcaataaaaatgcctgctgctcacagcacagaaaatggggcagggggagcctcaagcacaatctagctgtcctcctaaagactctgtaatgctcactcccctcgcgttctcccggcgctgtcgggaggctgtgctggtggtcgtgtagaggtccttctcctttcacatggtgcagagagcgaggacctctcctcctcgttcagttgcacttcagtattttcacggatatgaatgtaaaatatataaatatataaacctgcggctttaacaactgtaatacaaccttttgaattagttccgtgtatagataattaaattcttcatacaaaagttaaaaaaaaaaaa

SEQ ID NO: 54792 - DNA, 321 bp, Homo sapiens
ctcatctatcaataataaacttgaatgtaaaccaattaaattctccacttaaagcatacacactgcctgtatggatttaaaaaaaaaagtggcccaactatatgctgcctacaagaaattcactttgccagtaaaaacacatataaactgaaagtaaaggaattaaaaaaaaaatttcaagcaaatgaaaaagaaaaacatgcagataaaacaggctttaagtccaaaactgtaaagagaaaaaaatggccattatataatgataaagagatcagttcaaaaagagaatatatatatatatatgtttttaattgcagatcc

SEQ ID NO: 54793 - DNA, 409 bp, Homo sapiens; identical to SEQ ID NO: 37158

SEQ ID NO: 54794 - DNA, 416 bp, Homo sapiens
gtgatccatgattaaaggcctcattatcactaagaaaattaacttaatgaaaaaaattataatgagcaatgacggtattcctataaaacctccctgtgggtatcaagagacatattacctgccaaggccagattttactttttaaggtttcctctctctcaccaaagacactacgtgggcacagaggtgacactagagttagaatgttaccagagtcatttgcattagacagtttatctgatcatgaacatgttcccagggagattagaaaaatgggaagcaggcctctaaagatcctccttggacatttgtaaaaaggctggctgcttctccaggaatgtctgaattaagcaagaattgtgccactgaaatagcttcttgtttttatattaaacaaggaacgattgtgcagtgga

SEQ ID NO: 54795 - DNA, 360 bp, Homo sapiens
gactggaagctgataaatttgtttcattttaaactgttatgtttgtggttatctattacacagcaatatgggcttattccaaacaggctgtatgaattcaggtccctgaccaaatctggttgactgtaaaaatgaaaaaggacaacctgagtgccttaccttacgtaaatatttcctaactcctgccctgtgtctgtggcagacaccctgctccgctgagtttgggtgctattactccggaaaatctagtcatctgcagaaaccatttcagctaccttctgtcctgggatacactgtaacaaaccatttcacccaaggcattggttcctctggttcaactcaagggagtatcaacatctt

SEQ ID NO: 54796 - DNA, 383 bp, Homo sapiens
caaaaggtgaataaagccccacctctgacctctggagtggacacacaagtggacagacagagtgacaccaagtgagcagaaccacgctgtaagaaaaaactgatcaggggaaaagaaaggatgggggcaaggcatggccctgatttgaggtagggtgctctttagggctttctctaacagagaaaacgtgcaagcgcttgaggagtgtgaaaaagtgaaaggagaggagagagaagggaggagaagaagaggaagaaggagaagtggtggctgacctgtgcaaagtgaaacactctggagccatctagtatcgaaaaccaagggccttcaggccaatgccataacgcataaaatgagcaacctaggcagtggagatgggtgtc

SEQ ID NO: 54797 - DNA, 1069 bp, Homo sapiens
gattggagggctatatgatccagcattagcttcctggtgtgccaagcatgcttgatccgggaatttttttttattattattattttttagctgtagctgaaggcatttctcggatgtggagaggagaatggaaatcgcagaaccaaatcagtttgccctgccatatttggctgtggtctgtcattgggcatttctgatgtgcttttctggattcaggaagagctgattgtcctccgagggtttgaaaaaaaaaaacagtttcagaaacctgaatccagggccttatagttctcctcattatctatcttcttctcccttccctcgcccaaggggagtggggggaaacacttttcactgcagagtttgctttaaagttttcccatcttgcgtgcattatcccttgatattaaaattattttctcagtttaatccaactcctgctgagaagctgtgtgagatttaggctgtggggtttttttcttgtactcttttggatggtgttgcatttttcactcttaacccgagggtgtgtttcagcttatgttcgttctgtttcatgcaggtttatagcacggtagagtagaaggcggcttctgatttttagggtatttttagaattcattcctgagtgaggggttcagacacccagtctcctcggaacaggggtgaggggtcgactgagctttgttgagaagcctccagttaggcttcgggcgggtctccatgttatattgtgtgtttactgagcttcccactggtagaagatgacacatttgtccatcgtcctgtgtatctgctttccagaggacaccggagcattctcctggggtcactcccacatggctgcctcacatagctgttttgcaacagcctttattgccaacacccttggaagaacatctcctgtagaagtacaagttttgcaatatggactttggaagtggttttgtgatgttcgaattttctgttagcctattgctcaagcactacagaatgtacatagtccctttggccatcctctcaccccagaatatcctaataaacatggttttcttttttaaaaaaaaaa

SEQ ID NO: 54798 - DNA, 315 bp, Homo sapiens
gctctgagaatggcatcataggcagatgggaatttctattatggagcacagtacgtatcatgaagattctttgatgcaaattgaataggatttactaatgaccttaaagcaaattcaaacgctaggggccaagtacattttgaagttgggggccttggttccagttcagagcctctccaaacctactgccttggtacaaaacgtgacccctgcagtgatttctggatccccaggctgctcctttcctcatttacagacagctatgttttcaggttaggaatgaaagtaggtacggtgggtgcattaagaatgatg

SEQ ID NO: 54799 - DNA, 123 bp, Homo sapiens
tgacagtaaagggcaggaagggaatacaaaggtatccatggaggtagcaccacaggaagcaggcatcacacttgaggcttgggaacaaggggaagatgctggactcattgaaaggtggttgct

SEQ ID NO: 54800 - DNA, 360 bp, Homo sapiens
  misc_feature (1)...(360): n = a,t,c or g
ggatggtctactgcctggagcagggcctcatccaccgctgtgccagccagtgcgtcgtggccttgtccatctgcagcgtggagatgcctgacatcatcatcaaggcgctgcctgttctggtggtgaagctcacgcacatctcagccacagccagcatggccgtcccactgctggagttcctgtccagtgagtccccgccctgcctgcgcatgcacccgagaggttcgggctgtgtaacctgtgcgggcttctctggtgccctctctcaggactccttggggaacctgggtgtctcgccttctgctgcctcagggcctgggccgtctctgccccggctgccatgantgctctctttctggc

SEQ ID NO: 54801 - DNA, 784 bp, Homo sapiens
  misc_feature (1)...(784): n = a,t,c or g
ggaaaagcttattcaagctcaagacataaagatggaccctttgatatatcttctctccattcttagtctgccttcaccttatctaacaaaaaacaacatgcagctactgagttgtatgtagagacatactcttggtgggccagggaaggtaaaaacagggaccagcaatgtcaagtttttgaactagaaaagtgggatgtttttagttttgtctataacctgtagctgggccaacccttgagaggacttgtgcaaagcatgtgtgcccagacccatcagactcctcagatatggcctcaaatacctagagatgtagaagtaccgtggagggcctccaataagagggcaagcacacagatgggctagaagcctgtatggcttctggtcaggatgaacccttggccaagttcttgaggaaaccaggtctatattcctgaagggacagttcagtttgggactctattaggtttcagtagtaatataggctgcttgcatcattttaacattcatagggaaaatctctttgagccaggctataaatgaagctgttgcaggtagggaagaacaggacctgaaaatgggaaccaggaagtgagatcctgttggcaaagggaatgtagagcttccagggtgcattgcccactgttctcattgcataccagtcctccaagtccagtctagcctttactgtacacttgacaagtgcttactccagccaagtccccagnacccacgggccttttaatcctccccaagactgggctttgggcccatgnaccttcct

SEQ ID NO: 54802 - DNA, 1269 bp, Homo sapiens
tttttttttttaacaaacaaaactttattttcctttaatacaaaattaaatagcaaggggttttctttgtacagtgataaattagaaatttacagtacagacatcgatgcagacatacttttgtacatccttaaaagcagggtccatttcctttgaaatttagcaattcattcagggcatgtgtagcaggaagtttgcctggtacctctttgtcaaacatctgaaagtcccccagattggcttcaaggttcctggagctgtggggtggcatgaggacccaagaaaggccacagagcatccagcccgactgctgcacagagcaggggaagtcacattttatctttttttcagattacatccgatatttcatctacctttcttacaaagagctcaaggggccatcattttttgaccttttcaagcctcacaacatccctgtgaggtagacaaaattcagaaacacctccatgcctcactgggagagatctagaaagcagcttacccctcccaaagcccacagccaagtcagggccccagccctattagtacaatttgaaaaactttccacaaccctcggagagaagatggaccccaacctttgtggcgccagagtggctcttgcccctcttttccagaagccttcctaggatgacagtggtcatgtactgaatattgtaggagagcaaggaggtttaaaagctttgaggacatggctcatataggaccccaaaaaggtcctctacaaattgcctggggaaattctgggaattggctgatgcaaagaagaagagaaaaaaggtacatcagaaacagaaacatgctactatcagggcaactgagcttgccaaggggaagaggcatgtcgggggatctgtaagtcatttgtctcctggtactgtcaagtgtgtaatcaccgcacaagtgcatggcaagagacagcaacagaaagctctatgtaggctagagtgaaatgaaatctattatgtggggctccagtatctgatccttggtaggagcaaaatgctctctaaggagtttccaagatctatgatctaaccctggaggaaaagtgataacccaggtcatttgccagacataatacaaacccagaagggaactctaaactcaaataaaataaaggaaccaataggattttcagagtccagtgactcgacatgattgactggaatagcaactctctccagtgtcctccatcacagaacaaaatacaagacgtaaactgattttaagaggttccttccaggccag

SEQ ID NO: 54803 - DNA, 523 bp, Homo sapiens
gtcctggtagttcttggactcatccacgatcttctgcggacatcgccaggaggctcttcctgcggccattgtgatttttagggtcagaaaattatttggaaatattttttattctgcaaatattttctatacattttttcttgagtgttttcccttagtatttagtaaaacttcttttgaaaatgctggcctgctgcacctgttctcagaggggcatgagaaaagaggattctcttcctagggctgtgggaagccccttgagatgttggaagcagggcagggcaggagaacccagggagggcacagagctgtggacgagggctgggaaagccatcccgcctccccagggggtctccgaggagtgctgctgtggccaaaccaggggggccactttgtgctttctgtttaggtgatgggatgcttctatctcctcagcaccccacaccaaatcccctgttattgccagatgatgtgcctaatgatcaaattgcttggaactcctaataataaaactttaaatcta

SEQ ID NO: 54804 - DNA, 315 bp, Homo sapiens; identical to SEQ ID NO: 44879

SEQ ID NO: 54805 - DNA, 662 bp, Homo sapiens
ggcggattgtctgtcgttgcagtagctgtaggaaggggaggccattttccgtttctgggaggagtgaggggcaacgggtcggagaaaaaggaaaaaagaagggctcagcgcctccccgccgggccgtggacagaggggcacagtttcggcaggcgggtgaggtcgctgagggcccgccggagatgttttccttgtcgagcacggtgcaaccccaggttacagttcctctgagtcatctcatcaatgccttccatacaccaaaaaacacttctgtttctctcagtggagtgtcagtttctcaaaaccagcatcgagatgtagttcctgagcatgaggctcccagcagtgagccttcacttaacttaagggaccttggattatctgaactaaaaattggacagattgatcagctggtagaaaatctacttcctggattttgtaaaggcaaaaacatttcttcccattggcatacatcccatgtctctgcacaatccttctttgaaaataaatatggtaacttagatatatttagtacattacgttcctcttgcttgtatcgacatcattcaagagctcttcaaagcatttgttcagatcttcagtactggccagttttcatacagtctcggggttttaaaactttgaaatcaaggacacggcgg

SEQ ID NO: 54806 - DNA, 1208 bp, Homo sapiens
cggacgcgtgggcaacccgtcccttttgtggtggcctgaggggattttcttaatcccaatgttgccctgaaatttatgtccaggattcaaaaagtttaggactgctaagagacattactgccgggagtgttgagtgaagggaccaggtggagatgatgcctcaggagcagtacactcaccaccggagcaccatgcctggctctgtggggccacaggtatacaaggtggggatttatggctggcggaaacgatgcctgtatttctttgtcctgctcctcatgattttaatactggtgaacttggccatgaccatctggattctcaaagtcatgaacttcacaattgatggaatgggaaacctgaggatcacagaaaaaggtctaaagctagaaggagactctgaattcttacaacctctctacgccaaagaaatccagtcccgaccaggtaatgccctgtacttcaagtctgccagaaatgttacagtgaacattctcaatgaccagactaaagtgctaactcagcttataacaggtccaaaagccgtaggaagcttatggtaaaaaatttgaggtaaaaactgtttctggaaaattgctcttctctgcagacaataatgaagtggtagtaggagctgaaagattacgagttttaggagcggagggcacagtgttccctaaatctatagaaacacctaatgtcagggcagaccccttcaaagaactaaggttggagtccccaacccggtctctagtgatggaggccccaaaaggagtggaaatcaatgcagaagctggcaatatggaagccacctgcaggacagagctgagactggaatccaaagatggagaggtgagggatgagaaggacagaagttcaaagagctacagcttcaacaggccaacccttcccataactggttgacctcggagttggatcctacagtgtatcaacaaaaggagccaagcaggttttatttctgaaacaattaattgagcagcatgattataagccaaacccacaatccatcaaagtgatgatttcttatttgtaaaatgcggagataatggcatgtattccaagtacagaattatatgaccatgaaaatgaatgctattttcaaattctctcttgtcaccttaaaataagattttgttagccaacataattaagctgtatatattatacacatctggctcaagatgaaa

SEQ ID NO: 54807 - DNA, 301 bp, Homo sapiens
ctgcaaacagtgtcgtgatgaattacctaattctgtgtatgtgtgtatattggtagaaaaaattcccggaagtagaattgctagaacaaagatttatgcattttaaatattcctttattataaaactaatgaaagtaaacatgttggctatgaccacgtatgctctatgctcagtttttctagagttgtgtatgcttaatataggagtaagattcttttaaaatggtatattcattgccttatttgattttcatagtcaatcgttttaatttttcagtctacatatataggtgtttggaag

SEQ ID NO: 54808 - DNA, 606 bp, Homo sapiens
cccaaatggtcaaatggtcagtaagctttttaaatgaactagctagatttttagttggggattttaattcttggtttgaattgctaaaagctatcttgaccttaggaaaatgaaagcttacatgaggtttagccacttaaaacaaagtatttctttgtgtctccagttcatgtgaaacctgacttttatttacaatatttatgttaggagcacttttattaggatcttttgaagcctttcaagagttttctttcagttattattaatagtactaataaagaaggtgagcaggatttaaagctgaaaggagcatcagagataattgaactttgtttatgccattcattgttaccctatgcaatgtcttttgtttgtttttaattaattgccaatatttaagaagagggtcatagaacagtcattattccagattctcttgaaaaactggaagatctggcaactacaggtttatgttcttgcatgttaacaatatacaggggctggaattaacctgctctgagtccctttagatgtgcatactctctccgatttgccacagttcccaccaattcttatttctcctctctttacttggcccacatcatt

SEQ ID NO: 54809 - DNA, 402 bp, Homo sapiens
gcggcctcggctggcggcggcaccaggatggcagaggagcaggagttcacccagctctgcaagttgcctgcacagccctcacacccacactgcgtgaacaacacctaccgcagcgcacagcactcccaggctctgctccgagggctgctggctctccgggacagcggaatcctcttcgatgttgtgctggtggtggagggcagacacatcgaggcccatcgcatcctgctggctgcgtcctgcgattacttcagaggaatgtttgctgggggattgaaggagatggaacaggaagaggtcctgatccacggtgtgtcctacaatgctatgtgccaaatcctacatttcatatacacctccgagctggagctcagcctgagcaatgtacaagagacactggtg

SEQ ID NO: 54810 - DNA, 362 bp, Homo sapiens
ttcctgatgtaggaaatagtaaaatttcagagcctatggcattggctttcaccacctatgcgattttctacacatctgaaaattaccagtttatctaactccttaaatgttcctctcttcaacaacaaaaaacacaaacaaaaattgctggaagaaacaggaagcatccaggtccaaatgacagcataacagactatgaagaaacagggcttaagtgcccatctagaacaagatggtctagattacaataaggaccccatgggacagaacatcaaaacattcaactttcaagtaaatgtcttggaagtaaacatttaaaatttataggacttcctctggcatgtaggtatgatattagaaga

SEQ ID NO: 54811 - DNA, 335 bp, Homo sapiens
ggagctgtagctaatgagaatcataagatgcatcttagcctcaatgttctgagaaatgttgatgccagagattgtatttcaacagttaagatgctttaaggaatacaacttttgttgttatttactttggattaatgagctaatgttaatttttatagcttttctaattccagtagagtataagggtaattccttacaaaaaaagacaaaaaacaaactaacaaaaaatcctgtatcaatagggtaagttggccaggcgtggtggcacacgcttgtaatctcagcactttgagaggccgaggcaggcggattgtttgaggccaggagttcgagat

SEQ ID NO: 54812 - DNA, 799 bp, Homo sapiens
gcttttcagggaaatcatggatagggttgaagaaggttactattaattgtttaaaaacagcttagggattaatgtcctccatttataatgaagattaaaatgaaggctttaatcagcattgtaaaggaaattgaatggctttctgatatgctgttttttagcctaggagttagaaatcctaacttctttatcctcttctcccagaggctttttttttcttgtgtattaaattaacatttttaaaaagcagatattttgtcaaggggctttgcattcaaactgcttttccagggctatactcagaagaaagataaaagtgtgatctaagaaaaagtgatggttttaggaaagtgaaaatatttttgtttttgtatttgaagaagaatgatgcattttgacaagaaatcatatatgtatggatatattttaataagtatttgagtacagactttgaggtttcatcaatataaataaaagagcagaaaaatatgtcttggttttcatttgcttaccaaaaaaacaacaacaaaaaaagttgtcctttgagaacttcacctgctcctatgtgggtacctgagtcaaaattgtcatttttgttctgtgaaaaataaatttccttcttgtaccatttctgtttagttttactaaaatctgtaaatactgtatttttctgtttattccaaatttgatgaaactgacaatccaatttgaaagtttgtgtcgacgtctgtctagcttaaatgaatgtgttctatttgctttatacatttatattaataaattgtacatttttctaatt

SEQ ID NO: 54813 - DNA, 440 bp, Homo sapiens
  misc_feature (1)...(440): n = a,t,c or g
cggacgcgtgggcaggctgctgtctcacagagcgagaaggtgtcaggagcagcccagttgtgtctctctctctacctctgtgaagggcgcgaatgggcagagcagaacttctagaagggaagatgagcacccaggatccctcagatctgtggagcagatccgatggagaggctgagctgctccaggacttggggtggtatcacggcaacctcacacgccatgctgctgaagctcttctcctctcaaatggatgtgacggcagctaccttctgagggacagcaatgagaccaccgggctgtactctctctctgtgagggccaaagattctgttaaacactttcatgttgaatatactggatattcatttaaatttggctttaatgaattctcatctttgaaggattttgncaagcattttgcaaatcagcctttgattgga

SEQ ID NO: 54814 - DNA, 361 bp, Homo sapiens
ggagatttctttcaaggcaaatgacactttgattgggtggagggtgaggaaggggaacggttaccgtttctgaaacaatcccggggtctgtaatacttccacaagattctgtttgaatatctccctcttctcccctcatccaactcttactactggttgggaactggtgttttgtcattgatgggttcctttcttctgtgacctcaggcaaggtcagcctgtatatcccatcacgggtggattcaggcaaccctacccatcctcactgtcagtcgacacttccatgtccaggtaggtggaggtggaaactggggcgctcgaggacaagttgctcttctcgtgcttgcatcctgtgcgcctc

SEQ ID NO: 54815 - DNA, 337 bp, Homo sapiens
gcagttttacttggcataattcagaatttgagaataatgctgtcatattaataaagacaaataagtttttttcacaaaccaaacgaatgattgctggttgcaagagctaatgattaaaaactgaggagacaaaaatatgaattactctttgaagtactttgcattttcactttagaaatctttttatttttatggttctgcattcaaactgaactctttgacagtgcttttccgttatgttttcttgaggcattgctgttgagctaagtagtcatgaatttggtgaagaatggacttggggggaaagatgttccactgctgattcactttggaagta

SEQ ID NO: 54816 - DNA, 343 bp, Homo sapiens; identical to SEQ ID NO: 43989

SEQ ID NO: 54817 - DNA, 370 bp, Homo sapiens
gtgatcttggacaaattatgtagccagttgagacagagcctgacacaaggatggggcaagggcggaggctgacaggggacctggagatggccccggcccctctgtgctgctggagagggtgctggatgttgggtcctgtccacttgcagccccgcccagacccttgagtggcctctggcatcccccagtggcccacactggacattgcaggcctgggtctgttgcctcccacacatatcaggccccgcccctcttcctggctcagaggcgtggcagagtgggccagagggtgggctgggcgccatctaccctccagtgtttcctaacaatcccccatccaggcacaaaacctctttaagctgttgaacct

SEQ ID NO: 54818 - DNA, 388 bp, Homo sapiens
  misc_feature (1)...(388): n = a,t,c or g
gaagtatgacatgaaccttctctttttctttcttgagttaaaacagaaactacatctttgtgtgcaacggttctttgaacaattaggacagcagtgatcctatcagatagctttaaaaccctcctgattcatactgctgaactgagtggtacaacttgttgatctttctggtaacattgttatctctaaggattgataaagaattgatggcagacatggtggttcatatctgtaatcccagcactttgggaggctgaggcaggcagatcacctgaggtcaggagttcaagaccagcctggccaacatggngaaaccccatctntactaaaaattaaaaaattaccnngcttgggggcangganctggaatcccagttcttggnaactt

SEQ ID NO: 54819 - DNA, 298 bp, Homo sapiens
gtggaagggttcagagaaggtacgagatataccacttccagaagagctcattttcattggggatgagaaagttttaaatgacatcaaccaagctaaagcccagtatctcagggaggcatctgatctacagattgcggcttatgcctttacatcttttggcaaaaagctaaccaagaacaagatgcttcacccggatacgtttattcagcttgcacttcagctggcctattacagacttcatggacaccctggttgttgctatgaaacagctatgacaagacatttttatcatggccgg

SEQ ID NO: 54820 - DNA, 294 bp, Homo sapiens
aagccaggtacatttttattcctctgtgacagatgaggatgctcaggcacagataagtgacttacctatagtcacacagctaatgactgctggaacgtgaacatgaactctggtctgtcaaactgcagagttctgcaaatagtggcatttcaggttttcttaggaaaagatgagattgtgggagaggcagttccaatccccatcaaagatggagctgagctgtttcatcatccttctattacttatggacctgttctttttgtttggtttttgtttctttttctttctttcttt

SEQ ID NO: 54821 - DNA, 1172 bp, Homo sapiens
cttatcagtcccttgtatttacctgggtcaccctccatctctgagggtatgggggccagatggctcttgctgccctgatgttttggggggtctgcctgggcccctcctggtgtgtcacacgcgtccagtcctggccccctaggaggcagcatggcgggagctggaggccgagcgggcccagctgcagagtcagctgcagcgtgagcaggaggagctgctggcccggcggaaggctgagaaggaacagctgagtgaggagattgctgccctgcagcaggagcatgacgagggcctcctcctggccgagagcgagaagcagcaggccttgtctctgaaggagtctgagaagatggcgctgtcagagaagttgatgggttacacggcacagcctgggccaccatctccctggagatggagcggcagaaaccagatgcccagagccggcaggagcaggaccgggtaggcctgccgtcgtagggaggcttgcggagcaggagcgccctctctccaccgagctatcccgcggtttccagcatcccatctggcggactcctcttcctctctcttctcctactctgggtcttctatcctggtgttccttgaatgcctatcttccttttgtgcctcggaacctctcacgcctgccacaagttactcttttccttggtagttctgaactttaaataaggtaatgcctgtaagaatgccataaatgctcaataattgtcatctgttattattttcatcagtaacatcatctgaatcatcagtattgtctgcttttaacagctgcatttttcattgtccaaatatagtcacatacatttgaccattttataattattgaataataaattcgttctgctattttacaatgaaaaataatgctgcagagagcatttttgcacatgtatcgtggcagatgtaggccagaggctcttcttttatccatcctatggccaacctatgaatgtatacacgtttaatgagattttgccagcaatcaaagccttcagggaaaatgtccctagctctttactacatcagatcaaggactctggataattggcataacatcctggaatagctgaaacagagatattattctctgctctcctctgttgtctttgtcttttcacgtcttaataaaagtgctggtgacaagagtgaaa

SEQ ID NO: 54822 - DNA, 393 bp, Homo sapiens
  misc_feature (1)...(393): n = a,t,c or g
gagatctctcgaggatccgaattcgcggccgcgtcgactgaaaaaataaataaaatcactgaggcatagactgatgctaaatgttaaccgagaacagttagaaaccctttcaaggaaagagtttctggttggggtcggcaaagatgtcgggaagcaggtgtgcttgccctggactttgagcaggtgatggcacttctgagatggtgatgctgagatggaggaagaggaggaggatgtcacggatctctattttaggctttggnaggncgaggnggncggatnacanngnnnnaanangnggaccntncnnnnntttgannnnnnntgntntctaaantcnnnnnttannngnntnnngnnnnngnntnnnnnnnnnttnttgnnananttttg

SEQ ID NO: 54823 - DNA, 366 bp, Homo sapiens
aaatctcccaaaaaaaggactgaagactcctaaaaccaaaatgaagcagatgactttgttggatatggccaaaggcacgcagaagatgacacgagccccacggaattctgggggtacacctaggacctctagtaaacctcataaacatctgcctcctgcagccctacacctcattgcatactacaaagaaaacaaagacagggaggacaagaggagcgccctgtcctgtgttatctccaaaacagctcgtcttctctctagtgaagatagagctcgtctcccagaagaattgcgaagtcttgttcaaaaacgctatgaacttctagagcacaaaaagaggtgggcttctatgtctgaagaacaacg

SEQ ID NO: 54824 - DNA, 355 bp, Homo sapiens; identical to SEQ ID NO: 38324

SEQ ID NO: 54825 - DNA, 394 bp, Homo sapiens
agactttttttttgtcattatccacatttgccatagacaaaaataattcctaccaatcctgggtaaaataataaaaacatttataatacaagtaaacaacttcggaccttgtaaattaagtatgtttctagaaaccccatagttgagtttactagggaataattctgaactatccctagctggactgcaaaggccaatcactcacagttcatctcttgcacagctgggtgggagctctccagggtagtagagctccaagcaagggcagtcatattcggggccagttggactagggtttcccttgattagaattcaaggtgttcttattcaaagggcatcatcacctccctgccctaactctccacacttgtcctcaatgtggctggtagagccc

SEQ ID NO: 54826 - DNA, 384 bp, Homo sapiens
gtgttctatgtgttctcaagcagataaatcctgccttcttccagccagcgctgaccctggctcctcctcctactacctctactgcccacctgccttggccttggaatgaggaacaaggggcagatgtggttgtgattgagcccccttcctgtcactgcaatcactgatgaggtcacaggaggggagctgctgagtcatacgaggggagctgctgagtcagagtcctcccttagggagaactcaggagtctctgagtggagctgctagtggctagtgaggcccagcctgtatatttctaacagggcgccccatgccccagcaccctccccactgggaccactcctcatagaatagccccactccaaagcatttatgacttgaacc

SEQ ID NO: 54827 - DNA, 360 bp, Homo sapiens
  misc_feature (1)...(360): n = a,t,c or g
gaaaaagctagaccctgtctcaaacaagcaaataaatgagaggtataagtcctcctttaaaagtaaaggaagagatttttctttccttttgtctcttagaacattcaattagaaaatttgtaaattcattttctctgtcttctgaggtttttttttttanacanagtttttctntggttncccaggcttgagngcaagcnnnnnnnnnnnnnnnnnnnnnnnnnnnnnnnnnnnnnnnnnnnnnnnnnnnnnnnnnnnnnnnnnnnnnnnnnnnnnnnnnnnnnnnnnnnnnnnnnnnnnnnnnnnnnnnnnnnnnnnnnnnnaaaaattaancnttttttnagttnaaggncccngggg

SEQ ID NO: 54828 - DNA, 2206 bp, Homo sapiens
ttttttttttaaggcttctggtagggacattttattttttggtaaagccacaatagatagaaatgccataaaaacaaacatgtaaacaaggtatcagaactttggttcactgaaacatctcacacctaaaacacctgaggtacaaaggcaccttgctaggcgctagacagctaactctgctgcagccactttgatcctagccttggggccagggatggcacaggctgaatggaagggctgggacttcagtcacacaggagtcgccctagtatggtctccctctgctccagacaaacattcatttctccaaaaatcagcctgataggaacatacaaaggaacatacaaaggtgtctgtcacgttgacatgggctgaaggaccaggaaggggaaggacagaaaaggatgtcagtcaacttctgttgatccacaaggtctcaagaactcctgtcctcgttcatggaaccacttattggagacccacttgcagcccacaagcacagggcaggcagcatgtcttgttcggtagtcaccttccccgctccgcaagaggttgtaccagaacacagctgtacccttcttaggccaaattgcagcccccagatcagggaagacgggtggcaccaccagcttctacatcactcatgtagttaagaaacgtcgctaacctattcccctctgttttgaggccgctgtcaaaaggtcgcctagagaagtcgaagtgcggttcatactgtcctcccactccataatttgcaacctgtaacaattctgcagtctttactgttaaccctgtgatatgctgcatccgacgatttactcgggccacaacagggtcatcatcttcctctagccaggagcttttggaaacccggtagctggcgacagtgaggactcctgtcttgggatcacgaacggtggctcgtgcaagtttaggttttgcgatctccttgatcctctcgatttcctcatcagacatgacatcgtagtacctgacgatgtgcgggctgtccccactcgtcctcctctttgaagggggcaatgagcagctgtggggccctgttgccatggtggtacctacagaaaagcctcttctgtctacggggtgtcagtttgacaccctccccacgacagaggctctcgtaaacatccctctcaggcaggtagtccacaggcctctcatagatgccttctggggttgctagctcagcttctgtctgatttgttaacgttttttctctctcttcctccaataactgctcaaagtaccgcaggattccctccagctcgttcgtggcttgggtcaagggagagcaggcggcgggtgagctccagggcacggtgcagatcacccaactggaagacagcatagctgaggtagtccagcacctgtgacttggttgtggtggcctcctccccggcatcaagctgctttagcacctgctccatccacaacaccgtatgataatagtccccttcattgtaggccgagcggcccatcccaaagcagtcatccacactcagcattgcctggtacttggttcctggaagttcccctctggaaattgtgcctgggtccagcctgtatgtgtcctgaagtctcatcagggctttggcagctcctatctcgtcctcatcagtggggaagaactgccgctgcacagagaggttggcgataaaacctgcagctgagtcctgcaggacaaggtcctccagcgcaggccagtctgtgtttagccgcttcaccagtttgtaggcattcacagggtgagccaggtagccctcagcatcagcagctgacttgctagtcaaggcttccattttgttggcccagctcttaatcttggaaagcttggcttcctccacaaggatgtactctttcagagactgcaccagctctttctctgcataaatcaggtcagtcatgtgcccaatagaggtgaagaattcggcctgcacacagctcaggacaccaaaccaggccatcagcaatgcagacacccagagtttcatggtcacagagggaagtgtcacactgctctgggccaggaccttcccgctcttccaatccgcctgtcccactgggttagcaactgcttgcggtttctggcacacagaagggtcccgtttgttgaattagttaacgaattatcacgggtctccgcagctggacactcgcagctcccggcgtttccagaacctcccgc

SEQ ID NO: 54829 - DNA, 380 bp, Homo sapiens
ggcttgactctgagtgattcgcgtcaaccggagtcagacgcatgtctgcacgctgcagctataatgagagtccctttgtcattcttcaccttttcatcctaagcatctttcagagattaattatttggccattaacaatgaatccaaatcatatcatactgacatcatctagacatgatttggaaggaacagcttaggacctcctgatgaggtcacattgttgtttcttttaactagacttggcaaagaaaggcaaaaattgaccagcctatctttctgctggtgctgccttaaggaggtagtttgttgaggggagggctgtagatcattacttctttctcttcaggaagtggccactttgaaccattcaaataccacat

SEQ ID NO: 54830 - DNA, 341 bp, Homo sapiens
cggacgcgtgggcttgtacacacaaatttaaatgtcttagctttacagtattgcttgctcagcgaatatatgtcatgagaaaggtctgtcagattcatacagtaaacttgagcaccaattatgtgttttgacactactgggcacaaagacaatggaaaagaaaaggtgtaacaaatcccctgtctgagattaataagccccaaggcaacaatttgggcttttgtttgttttgtcaatctgagaaatgcagtttcagaactttgataggtggtactgttagccctgatgacattcaaagtcctcatttcaaatattcaaggtagaaaattcaaaactcagtt

SEQ ID NO: 54831 - DNA, 1711 bp, Homo sapiens
ttttttttttttttcaagtttgagaaatgtagttttattaatagaagggcatgtcttaccatacacactgtccccagataaataaaatcccaacatctttgaaagcacacaaacacacagttttacagggtacaatacaaagtgaactttgatgatgttcttacttgcatttactaaaaatctgagaaagactgtaatcagtctctaaataattatcttgcgtaaagagaaaagtagagcacaatatatatatatcacaaaccaaatcacactctctgtaacattacaacatggaatttacttaatcaaaaataaaagcaaactggctgaagaaggctgtatcatttttttctcaatattacgctaatttctatttttggcatgaattattaaccttttcccattagtaggcaaatgtgctctgcaaattctcggatggcaccacggccaccattacatttgcaaatgtatccaacagccttctgggcagtagaacaggcatcagcaggagcgccacttaggcccactctcttcaagcactcttcatcagacacttcatttccaagatatgccacttctttccagcacaggcccatttcttttctccattcatctacaactgctagcttgtctgatacactgacttccattttgcaatccagttttaaagaagacagcgtctgctttgaacaggccctttctgagattagcctcacctcaataccacttttctttaataaacttatcccaatagcatcttttacatcataagatattatttctttttggtctcctgatacataaatgtggccattggtgagacatccatcaatattgcaaaccaaaagttttatttccttaagcttctctttgccaaaatagccatatcttaatactctttgctctgcaataggccaatcaatatccacatctatatccacactatgttcagctcgcatttcgtagtatgccatttttccaccctgcaagtaacccatctctatcaaatgtcttttagcaaaataaaatgagccattttcatataattctccatcccagtcttgtcgacgaggccgtttagctggatttaaattcagaggttcggtcacttcacgaactcctttctgaatttcactccatcgaaactgatggcgtctcacaacagagaaaacagaatcatatccttcttctcgaatcatttctgcaactttttgaagatcagtaggatgtaaacatggagaagtagcttgaatatttcctacaatgtcaacctcattatgataattaacgaaattctatgatggcatctagtgaggtagagctgtcttttgaaacttcaagaacttcttcgatgaacttgtgcaccaaattgtttggccacattctcaatttcatcatggtctgtcgaaacccatacactctggaaggcccctgaatcccagggccgcacgcaggacccagccaatgagcgggacccccgccaggtgcttaatgttcttcagggggatgcctttgctgcctccccgggccagaattagggctgccaggtgcgggggcttctccacacctcggccctggccgccgcgagagttgcgctgcagcttcggcggccggccccgggacggtcgcccccgcgggttggagacggaggtggcggcccccttctccaccgagtccatcttcctcccacgccttctccccagcttctcca

SEQ ID NO: 54832 - DNA, 414 bp, Homo sapiens
gcaataaatgtaagctgattaaatgtgtctattaaaaattggagaatatcagattagaatttttaaagtattcagttataagctattttcaaaagacccacttaggccaaaccacacaaataaagagatgacaaaagacataccacaaaatgctaaccaaaagaaaggtgggtggtgtcacagtaaggcaaatggaatctagggaaatatatgttaatagggatagagagatatataatgatataagaaaagataatattcatgaacctatatgcccctaaaaacataaccttgaaattcaaaacatgtaaagcaaaaactaagaaaatgtaaaaatgtaaaattgtggaaatttaaatttatttttacagaaatttattaaaaacataaagatataccacaactgatatatcc

SEQ ID NO: 54833 - DNA, 349 bp, Homo sapiens
gcggcacgaggaatattaggattgataacagagttcagtctccctgtatttagcttaccttattactccctacctctggattttaaattagtttaatacctggtgtttctcctttgtcctttgtttcattcaccttatatctgtttctcagaaatttggtatatatatattacagtccaaggtaagagaattagggaaaattcatacttccccctttcctcaggtacatatctcagagtcccatccttgctttgtcctctagagtagctgctgtcctgatgctattctctgttccctgctccccttcctcttcttgtgtctgtatctccagctaccatttagtcagtca

SEQ ID NO: 54834 - DNA, 160 bp, Homo sapiens
caggactggccttggtagtgctcagcccccagggtccccttatatacagggagctgggcccagccaggctgtggccattggtcaggtgaggggagggggctgcaggggtggtgtttcttatcagatccagtgacaaagggtcgacgcggccgcgaattcc

SEQ ID NO: 54835 - DNA, 1312 bp, Homo sapiens
acacagagacaccggggcccagggccctcctatggaccctgcccgctcccctcccattgtccacggctgtccgcccacccccattctccaagcttcagccccctccttagttcggcatctgcacagcactgaagaacctgggaatcagaccctgagaccctgagcaatcccaggtccagcgccagccttattcatgaccaaggagtatcaagaccttcagcatctggacaatgaggagagtgaccaccatcagctcagaaaagggccacctcctccccagcccctcctgcagcgtctctgctccggacctcgcctcctcctgctctccctggggcctcagcctcctgctgcttgtggttgtctgtgtgatcggatcccaaaactcccagctgcaggaggagctgcggggcctgagagagacgttcagcaacttcacagcgagcacggaggcccagggtcaagggctttgagcacccaggggagggcaatgtggggaagaaagatgaagtcgctagagtcccagctggagaaacagcagaaggacctgagtgaagatcactccagcctgctgctccacgtgaagcagttcgtgtctgacctgcggagcctgagctgtcagatggcggcgctccagggcaatggctcagaaaggacctgctgcccggtcaactgggtggagcacgagcgcagctgctactggttctctcgctccgggaaggcctggggctgacgccgacaactacttgccggctgggaggacgcgcacctgggtggtggttcacgtcctggggagggagcagaaatttgtccagcaccacataggccctgtgaacacctggatgggcctccacgaccaaaacgggccctggaagtgggtggacgggacggactacgagacgggcttcaagaactggaggccggagcagccggacgactggtacggccacgggctcggaggaggcgaggactgtgcccacttcaccgacgacggccgctggaacgacgacgtctgccagaggccctaccgctgggtctgcgagacagagctggacaaggccagccaggagccacctctcctttaatttatttcttcaatgcctcgacctgccgcaggggtccgggattgggaatccgcccatctgggggcctcttctgctttctcgggaattttcatctaggattttaagggaaggggaaggatagggtgatgttccgaaggtgaggagcttgaaacccgtggcgctttctgcagttcacaatgataacctgcaaactgcagaaagcgccacgggtttcaagctcctcaccttcg

SEQ ID NO: 54836 - DNA, 1132 bp, Homo sapiens
tatcagctcaagccttacaccacccacctcatcaaggacctccactttttccttcgagtgctcatccaactgtaccaccgtatccctcacaagctacacatcataccactttgggaccgggaccccagcaccagccttctggaacagggccacattgtccattacctgtcacaggtcctcatctccagccccaaggaccaaacagtattccaacacctactgcttcagggttctgtcctcatcctggctctgtggccctgccacatggggttcaaggacctcagcaggcatctccagtgcctggacagattccaattcacagagcacaggtgccaccaacatttcaaaacaattaccatgggtcagggtggcattaaaatggactccaaaaacatttttttaaatgttctgtaagataaactgtatatttcatatgtacctgttaaggtactttttaaagcttgtacatgaacctttgtataaaaaacaccagtgctctttcgttgtatttttctcatttttgcttttaagattcctttaaaaaatgtgctgttaagccagtattaggtatctttattttgtaagtgaacattccagctgtttttttctggcagatctgatgctgatttgatgctgtatgatcttttttttttttttaggttaaattcatttagtgaatgttctattattttatacatacacattaagtactcagctaagtaatggcactatgaggattttcttttttctttcctgtcagcagcagttctgtgaatgcatcttaggtataaaaatgcaatacagatttttatattttggtgtggacatggctcattttgttttaccagttatttgcaagcaaaatgtaatttaatgtatagatgatttctaatgtctcctgacaaactgtaaatactgcatttcttttgcgtatataattgcttacagcttttctcatttgatatatagcattgtacatatgacaagtcttttgcaaaactgtgtgatctttgtgaaagtagtacagtatatgacctttaatttcttttttattttaaatatactgtcacactgaagcactggttgggcattttaattcatgttaataaatcacaattatgtcagttttacc

SEQ ID NO: 54837 - DNA, 506 bp, Homo sapiens
aacagttgtgcatcaactacgccaatgagaagctgcagcagcattttgtggctcactacctaagggcccagcaggaggaatacgcagttgagggcctggagtggtcattcatcaactaccaggacaaccagccctgtttggatctcattgaggcgaagccccatcagcatctgctccctcataaatgaggtggggaggaatgccgcctcaatcgacccagcagcgcagcccagctccagacacgcattgagactgccctggcaggcagcccctgcctgggccacaataagctcagcccgggagcccagcttcattgtggtgcattatgcggggcctgtgcggtaccacacagcaggcctggtggagaagaacaaggaccctatcccacctgagctgaccaggctcctgcagcaatcccaggaccccctgctcatggggctgtttcctactaaccccaaagagaagacccaggaggaaccccctggccagagcagggcccctgtgtt

SEQ ID NO: 54838 - DNA, 414 bp, Homo sapiens
gcgaagccagctgctggaggtgccgagaatctgagtttcggcaagcagccaggtctggaaactaatattttaaaaatgactacaccaaacaagacacctcctggtgctgaccccaagcagttggaaaggactggaacagtacgggaaattgggtcacaagctgtttggtcactctcatcttgcaaaccaggatttggagtggatcagttacgagatgacaatctagaaacttattggcaatcagatggttcccagcctcatttagtgaacatccaattcagaagaaaaacaacagtgaagacattatgtatttatgcagactacaaatctgatgaaagctatactccaagcaagatctcagtcagagtaggaaataattttcacaaccttcaagaaattcggtaacttgagttg

SEQ ID NO: 54839 - DNA, 3708 bp, Homo sapiens
tcatgtgaacacattcacgatttattaagcttaaatcatctttattcagctcaggagtggggtggctggaagcataagcttcaggtccaggaagatgggtttggatccagcctctgccacttgctctctggaataatactcaaaacatttaactcctccaagcttcagtgtccttataaaaaatgaggaaacaatactggtcccgtgacattgtgtaaagattgaatagtacataatatgctgtattagaagtgcttgtcaaggttcttggcaaatgataggtgctcagtcaatagcctctgtgtatagtaacagttctggtagtaattttggtagctggggggatggtaataactgtgacagcaacaagtatcttattcccatttcacagatgaagacataagctctgggaaaaaaaaatcttcaactgtcactgattaccttgcccaccccacgacatatcctaagacctggcacgtgataattttaatgaaatatctgggtgaatggattaatgaaaggagaaagcagagccagtggtgtggggggtgatgtgaatgcccactgaaatctgaagtagggtgcagatttgttcatcagttgaaagttactcgggtcacatctgaaggcggctctaggtcaccctagaggcctaggctggctgtcttcaggtcagggggctgagttgccattcaaagactcaaaggagtgaatcgtacacatcaatcatggggttggcttggccaccaccctgctggaacactacctggccttctaacctcatggagagcctgaccaggcctgccacagagacctcagagtgccagagaatctccactgtgtccttagctctgcacagtcagggcttccccgaagtctgcctctctctgtcattatgcttggccaggattgctcatcctgatggcactgggttgcagagagagagctgaggggaccaggaggcaggcactttgtgtgactttggagggtccttctaccccaagacctcactgctgccatctgtaagtgaaggaactggaccagatggggaataaggagggctccatctcatgtcgaaggccaaggctaagagtggctgcctggggtgcagtgctgggagagtttgcaaggggagtgtcaaggctggtcagtgattatggggaagagtcagggcccatcagaggaatgaagtggctaagggtgcctccagtcccaatagccacaagtgaattctgttgaaagggagttctagcatctcacagaccaagtggagcctcaggatgggagcgaaggccagagagcgtcctccctgtcccatggcctaaatgcctctcagaactcacagatggtcagtcgggagtacaggcagttcctgtcattccactgcccatctgtgtacatctccacacactgctcttttccccgacctgcgggctcccctcggtaccagttggtgtagtttacaggggtcccgtctgagtagcggaagtctccagggctgggaccctcagtcaggcctacataggcatatgtgttgtacttcttcacgaagcttgcaatggcctcattttcctctggattccttgggacagcaatgcggccgcctgctctggcacatgcctcctgaatggcatcaaaagtgatggactgcccattgctggagaagaccttctctcctactgtcattatggagccctgcagactgagggctgagagcagaggagtccgggtcaggccactgaccactttgtctctaagccacctccctcacctggggtctctgctaccagattctccccagtctctccatctctgcctctctctgtgtcttctcttcctcttccaattgcagttttctaaattcacttttagactctcctccatttattcattcacctaagtaacaattacttattgccagaaatggtgcaatttcctgtgaattcagtggaaagcaaggcagatagagaacttgctttcctatgaaatcggggaagtgaattgtgtctgcttctgtctcctctgggccattcaaaagacatcaagaaaagcaagcgtcaattcctttccccaagacctgcatgtgaatgcctatttgtaatctctatgttctagaagctggtgctgagaatgaggggaatttgtgggaaactcctaccccgtgagcccagggggtccccttacctccccttgtctgcaggatttgatgtctaaagtcgtggagtgtggcttggagctcctcatctagatgagctcgaagccctgtggagagtgccccacacagaaggaggggcaggccagtgaagactcccacttgctgccacgaggtgttttgccatctgcaatcctggaactctgccctttcattgctgttaggcgccaccagacctaggctcagagggtccacaagattccagtgtgtctcagacccgtggtcccctattctttagtgaagccttgcccctgctgagacccccaccccttgtcctctttcctgctcttgtcctcgaggggttctgtctgcccgcctctgtggggcaagtccctctcccgcaccctccgaccgaagggcaagcatgatgctctctgcactgccctgatggacttgcttaccgctctgagcttcaaagttcccctctgtctgtggggctcctgatcacaccgtctgtctggatgcctcgtccgcattcacccttcagacagccccagggcctccatcccaggacatgcctcccctgcctcccagtgctgtccctcatcccacacctgactcagtgtgtccccatcggtggtcatgaggcacggaggacttcccacacctgcctttccctgaattgtgaccacactccccagacacctcagctatctccctcaagcttatcctctcttacttaggttgagccaaatgcccttggggaacctgtagggtttgtctgatccccatcatccccgtgtaactgacttcagggtcgctgtgcccatgtttccactgcccacctgccccaccctgctcacctggagggcccctctcgccaggctcccccttctctccacactctccagggataccaggggctccaggcagcccatcatttccaggaggacatggcatttctccaggtggacccatggggcctgcagagaaaagagacatggatgtgtaggatctgtcacccacaactggttggagctagtgagactcgatgcccattatcaccagggctggctcagctatcactctatcactccgtgggcactatgaggacagactctccaggatgcgccatcataagggccccaggaacccaccagccctgcagactgaagtcccacccagcttactatagcccccagctcactatggcccacagcctaggggcctggacagatgggcctcctgaaaaggggtctgtgtcctcagctgagggtggggtctgcagcacagtacctggagggccagggtctcctttgacaccatctctcccgtccctgcctggcaggccgtgggatccaggagtgccggggataccagggcttccaacacaaacgtccttcacttcgcacgcagcaccagaggctgccatcaagatgaggttgagggccagagggcacagccacatggctctgggtccagtcgctgctctttcttttcaggctccaagaaactcagcgacccacacacagagcctccagctgcttgggtctccg

SEQ ID NO: 54840 - DNA, 1176 bp, Homo sapiens
ttcattgctgattattcagcatactgttgattcgtcatttgcaaaacacacataataccgtcagagtgctgtgaaaaaccttaagggtgtgtggatggcacaggatcaataatgcctgaggctgattgacgacatctacatttcagtgctttttccctaagctgtttgaaagttacgcttttctgttgttctagagccacagcagtctaatattgaaatataatatgatttgtcaggtcttataatttcagatgttgttttttaagggaaattgaccatttcactagaggagttgtgctggtttttaaatgtgcatcaagaaagactactgaaaagtattattttgtaactaagattgctggtactattaggaaaaatctgtgtgtattgtatagctctagctgtttgactatctgtaatgaaaatgctgcacttcaactggtatttcattagagaaccgtgtgtgtgccgtgtgtgtggtgcctttgagcaactttattttatggttaccatatttttaaaaagattttttgtcagggtgacttaacatggactcttatagggtattaaaacaatctagattattccttttcatcctaaataagcctaccaaatttcatgctgttggtttgccatgaatgatattacttcctacattatatttgtgttttttcaaatctgctatggaatgaacttattcctagatttggatatgtaagagaaacctgcagtcatcttttgatttataaggcaattcttgtggataaatagtgatttctcagcctctgacccattttataactgaaatttagccctttagagcttgttatatctggttttcctacgtttttctatgtaatattattccattccagtagcattattgatagaaatagtaagtatttatggaatagtaaaatatggacaaattacgtgtgtgacatatctgtcaatataagttagaagcttattcttggtttgtgtaatgaatttatgtattgtagtgaatacctttactggtgtgaagataattatgcacaaaccctcacaatacgcgttaacattgaaacctgtgaaatgtccttagtttgggtcatataaagccaaccatttttgaggaccatgtacctagtgctttgaaaactctaagtcactatatgaatatgacaatatgtg

SEQ ID NO: 54841 - DNA, 165 bp, Homo sapiens
tttttatatgtacataccttgtggaatcgctaaatcaagctatgtaacagacccaaaatcctcacatacatatctttttttttctggtgaaaacacttaaaaactactctctagagactttccctttgtctagctgaaattttggtcgacgcggccgcgaattcc

SEQ ID NO: 54842 - DNA, 444 bp, Homo sapiens
ttcccaaagaacagcaaatatgagtatgaccctgacatctctcctccacgaaaaaagcaagcaaaatcccattttggagacaagaagcagcttgattccaaaggtgactgccagaaagcaactgattcagacctttcttctccacggcataaacaaagtccagggcaccaggattctgattcagatctgtcacctccacggaatagacctagacaccggagctctgattctgacctctctccaccaaggaggagacagaggaccaaatcttctgattctgacctgtccccgcctcgaaggagtcagcctcctggaaagaaggctgcacacatgtattctggggctaaaactgggttggtgttaactgacatacagcgagaacagcaggagctcaaggaacaggatcaagaaaccatggcatttgaagctgaatttcaatatgct

SEQ ID NO: 54843 - DNA, 421 bp, Homo sapiens
cactcctggcagggctgctgcccctgggggactgagctctgcaccagtgttattggtcatctgtaggagaacgctccccagacggtcttccagagactgtattttctgatcaacaagctgcttcaagtcacccacctctccattaatggcgccccgaagggtttcctcaatgtaaaagcaatgttcttcagcgttcttctccgtcacattgatccttgcatcgagttcattccattttgcatcaaaatccacatctggctctggaactataaggcggtcaaactcattgtccagtcttccattcagcattctggtggcttcagcaactctctcgattttctggtccaatgtcttgatctgttgaccaatgtcaccattcttttcactgtcgcaacaaatttgcctgggctgaaggctcctg

SEQ ID NO: 54844 - DNA, 397 bp, Homo sapiens
cggacgcgtggggtagatccccaagtaaaaatagaacagattccagggactcaaaatgagaaggcggaggaagaacaactcttatttaagaaaacaacctacagttctattcaaaatcataaaatggatgattatatttcatataatttggataccaagtgttgaataattcaagattgcacttttagaattcattttaccttgggattactaataggattctagcatctgctattgatattgcaacaatataggattcagaattgctaaacaacttcctctttataaaaatgactaaccttaaaatacagtctgatttacaaccagtaatctgaagaccaattttaactcatactttctaccttctgaaaggcttttacactaattaaataaacat

SEQ ID NO: 54845 - DNA, 836 bp, Homo sapiens
  misc_feature (1)...(836): n = a,t,c or g
tttttttttttttttttttaagaagaaaaggctgtaattttattttcaaatttttggaagtttttcagaaaaaaataaaatgacaagaacacatacaaatattgaaattattcattgaactataaacacttagcagaggaagggacttttgatgtatttgaatccacctccttctgaaagcaggaatcacttctaaatgtctctcatatctttcttcaaggagtggttttccaggaggttcccagcctcctcaaatctttcccaagtttgatgcacttcacctcataaaaatannnnnnnnnnnnnnnnnnnnnnnnnnnnnnnnnagacagggtcctgccctgttgtccaagattgagtgcagcagcatgatcaggactcactgcagcctcaccctcacccaagctcaagtggaccctcctccacctcagcctccccaagtagctgagatcacagatgcacatcacccacactcggggtaattttttttactctctgtaggggatncagtcttgctatgctgtgcatggctggcctcaaacttgtaggctcaagtaatcctcctggctcgggcctcccaaagtgctagaatttacaggcctgagccaccgtgccttgccacaaactatttttaatcattaaaaaagaaaaaagaaaataaggcaggccggcttctcacattacatgcttttagaaaaaggtctcatccttgaagcagctttgttatatgcagagcacagtactggcttcaaaaaatatataaaggttctgtgcactggcactgtttacatgtgaagaattgccatcaacttctgtgaaaattagcaagctggcac

SEQ ID NO: 54846 - DNA, 407 bp, Homo sapiens
ctgccagcctcttatgcaggtgaggacagacccaaggtccaggcaatgctggcctttggaacacaagaacctggctcactgactcccactccagttgtcttttccctctgcctctggagcaaccctctctcctccagagcaacccctgtccctccttcctacctctctctagggctgcacccccagctcaccttagacctggcccttcctacctgttgcccctactgtcttgtcccatcccagtggtcaggagggagagtactggccaaaggcccagctccacctgtgacttaggggagtgccaggcatcacccagaggtcccggccctcgggggcctggcaggctctgctgtgggggaagcagagttagaactggggctgcttcaccactggccgtttgtctctgt

SEQ ID NO: 54847 - DNA, 563 bp, Homo sapiens
ctgctctctccctttttcccccaggcggcccgaactctccctaaggcccaatcccaggggcctcgggcaacacccaagcagggcatcaaggctctagattttatgcggcatcagccctatcaacttaaaactgccatgttctgttttgatgaggttcccccgactcctggccctatcgcctcagggtcccccaaaactgcccgagtccaggagattcgccggttttccactccggcaccccagcccactgcagaacccctggctcccactgtgcttgccccccgagcagccactacactggatgagcccatctggagaacagaactggcctcagcccctgttcctagcccagcccctcctccagaggctcccaggggccttggggcttctcccagctcctgcgggtttccaggtagccaggccccgattttcagccaccagaacaggattgcaagctcatgtgtggaggccctggggaagggcacagtgaacaggcacaggtcccaggaccaaggagaggtggaacatccagttcctaaaagttgcttctcctaccctatccc

SEQ ID NO: 54848 - DNA, 2848 bp, Homo sapiens
  misc_feature (1)...(2848): n = a,t,c or g
cctgccccgagagccccacccccgtccgcgttacaaccggaaggccgctgggtcctgcaccgtcaccctcctccctgtgaccgcccacctgacacccaaacaactttctcgcccctccagtccccagctcgccgagcgcttgcggggagccacccagcctcagtttccccagccccgggcggggcgaggggcgatgacgtcatgccggcgcgcggcattgtggggcggggcgaggcggggcgccggggggagcaacactgagacgccatttcggcggccgggacgggcgcaaggcggccgagcgggactggctgggtcggctgggctgctggtgcgaggagccgcggggctgtgctcggcggccaaggggacagcgcgtgggtggccgaggatgctgcggggcggtagctccggcgcccctcgctggtgactgctgcgccgtgcctcacacagccgaggcgggctcggcgcacagtcgctgctccgcgcgcgcgcccggcggcgctccaggtgctgacagcgcgagagagcgcggccctcaggagcaaggcgaatgtatgacaacatgtccacaatggtgtacataaaggaagacaagttggagaagcttacacaggatgaaattatttctaagacaaagcaagtaattcaggggctggaagctttgaagaatgagcacaattccattttacaaagtttgctggagacactgaagtgtttgaagaaagatgatgaaagtaatttggtggaggagaaatcaaacatgatccggaagtcactggagatgttggagctcggcctgagtgaggcacaggttatgatggctttgtcaaatcacctgaatgctgtggagtccgagaagcagaaactncgtgcgcaggttcgtcgtctgtnccaggagaatcantggctacgggatgaactggccaacacgcagcagaaactgcagaagagtgagcagtctgtggctcaactggaggaggagaagaagcatctggagtttatgaatcagctaaaaaaatatgatgacgacatttccccatccgaggacaaagacactgattctaccaaagagcctctggatgaccttttccccaatgatgaagacgacccagggcaaggaatccagcagcagcacagcagtgcagccgcggctncccagcagggcggctacgagatccccgcgcggctgcggacgctccacaacctggtgatccagtacgcctcgcaggggcgctacgaggtagctgtgcccctctgcaagcaggccctggaggacctggagaagacttcaggacacgaccacccggacgtggccaccatgctcaacatcctggccttggtgtacagggatcagaataaatacaaagatgcagctaacctactgaatgatgccttggctattcgtgagaaaactttgggcaaagatcatcctgcggtggcggcgactttgaataaccttgcagtcctttatggtaaaagagggaagtacaaagaagcagagccgttgtgtaaaagagctctggaaatccgagaaaaggttttggggaaggttcaccccgatgttgccaagcagttaaataacttggccttactgtgccagaaccagggcaagtatgaagaagtagaatattattatcaaagagccctcgagatctaccagacaaaactgggacctgatgaccccaacgtggctaagacgaaaaataacctggcatcctgctatttgaaacaaggaaagttcaagcaagcagaaacactgtacaaagagattctcactcgtgcacatgaaagggagtttggttctgtagatgatgaaaataaacccatctggatgcatgctgaagaaagagaagaatgcaaaggaaagcaaaaggatgggacatcttttggagagtatggcggctggtacaaagccctgcaaagttgatagtccaactgttacaaccactctaaaaaaccttggggcactttacagacgtcaaggcaaatttgaagctgcagaaacgttagaagaagctgctatgaggtctcgtaaacagggtcttgacaatgttcacaaacagagggtggcagaagtgctcaatgaccctgagaacatggagaagcgcaggagccgtgagagcctcaacgtggacgtggtcaagtacgagagtggccctgacggaggggaggaagtgagtatgagcgtagagtggaacgggatgaggaaaatgaagctcgggctggttaactgacttgctcagcgtcccatggcctagccgcccgtgactctcacactgtctcctgcatgacgggtggcgcctcccgcagcttcccttctctctccagtgctgcccgctgtgtctagcagcctctaggatcttgtcagagctgcacctctctgtgaactggccattcctttcggtgctgctgtcctttttgggggggttcctgatttctgtatacatgtagctttgccagatatgtacttagtaatataaactgtaattaaataaaaaccccatttactgtgtaatacacgagtttaaaaattaagagcgattagctgttcactttggtaacaggtagttaagtgtcacacaaggtgttgttgcaatggcatgacggtgacctgttgacgtaactaagccttagagcaaggcatgtgtccgcacgtgcctccgtggtacttagagccctgggggccccgctcggactccgggtctccctaggatatgccccagtagcatttgctgtgtagtctgtgtgtgaaatttgggcattctgcttttctctactaatcttgaagtgctcagtgatttgtgtatttgtgtctttctaacttctaataaactcactccgactg

SEQ ID NO: 54849 - DNA, 332 bp, Homo sapiens; identical to SEQ ID NO: 39659

SEQ ID NO: 54850 - DNA, 433 bp, Homo sapiens
gaaagacccaacaggcaagatgtgtaccaggggtccttctcttgaaggtcacaaaatcatcacaaccataggttttcttagtgtgaaatatgaactcatgagcatctggcctgggaactggaccagttttaaatctcgtgttgagagccggaagatgctggagaaggaatgtggtggaatgactgcctgagaatgaaccattctccagtgagagggggcttcgacattgaaagggcaatttggccttaacttggaaatgctggagattgattgcatacaatctgtcctgctagtgagagaagcaaggactgcatctaagtgcaacatgaagacttttggtcccaagctttcctccaacttcagtgggaggcagcccaaaaccaccgtcggttcaagaatacaagtgacctgcaattcttggaaagactccccc

SEQ ID NO: 54851 - DNA, 799 bp, Homo sapiens
  misc_feature (1)...(799): n = a,t,c or g
tttttttccaagaaagatgtgtattctccctaacaacaacaaaagagacctaaatgggctgctccctgaagagagccctcagctcttttaccgtgatgcacactcggggctgggtgtaggctgtgtgatcaaatgtatgaaggaagaaggaacggagagaacgtgggcaatcaaggcctggcactgccctacaggaggcttacaggtcacactcccagaactgtctctatccccatgcctctcctagtaagattcattacctatggtttcaaagaaagtgcagtttctagggagtgaaggaacacgtgaaatacagaaaataaagacagaaaaacacacaaattattaaataaaatttaaacaatagagggaaaaaaagtgtagtttgttctgcaagccacagcccaaagaagtctatttcctcccacaggatggctagagtttaggagccacgttctcctctatagctcaccagaggatgcagcctgaagagctcagggtttgaaggttgggccttgggcgggagtcagctactatttctagctgttctagaaagacctagaaacttcctgtgtgaaaacaggattaggaagctctgggggtgaaaatgccatgcacggagctggcccatgccaagtcccttctaactattttaaattacatctttgggccagggcacggtggttcatgcctattaatcccagcactttngggaggccaaggtggggtggataacctgaggttagggagtttccagaccagcctgggccaacctggtgaancctgtntctactaaaat

SEQ ID NO: 54852 - DNA, 357 bp, Homo sapiens
ggcatttcattatgccaacattatttgattcacatgaggaatttaatgaatggttttccaaggacattgagagccatgccgaaaacaaatctgctattgatgagaatcaactttctcgcttacacatgattttgaagccatttatgctgaggagaatcaagaaagatgtggaaaatgaattatctgacaagattgagattctaatgtattgccaactgaccagccgacagaagctgctatatcaggcactaaagaacaaaatttccattgaggatttattgcagtcttctatgggctctacccaacaagcacagaacaccaccagcagcctcatgaatctggtcatgcagtttagga

SEQ ID NO: 54853 - DNA, 1540 bp, Homo sapiens
  misc_feature (1)...(1540): n = a,t,c or g
ggcacgagcaaatntggtgagacttctcttaagccagaagattttgattttactgtactttctaaaaggggtatcaagtcaagatataaagactgcagcatggcagccctgacatcccatctacaaaaccaaagtaacaattcaaactggaacctcaggacccgaagcaagtgcaaaaaggatgtgtttatgccgccaagtagtagttcagagttgcaggagagcagaggactctctaactttacttccactcatttgcttttgaaagaagatgagggtgttgatgatgttaacttcagaaaggttagaaagcccaaaggaaaggtgactattttgaaaggaatcccaattaagaaaactaaaaaaggatgtaggaagagctgttcaggttttgttcaaagtgatagcaaaagagaatctgtgtgtaataaagcagatgctgaaagtgaacctgttgcacaaaaaagtcagcttgatagaactgtctgcatttctgatgctggagcatgtggtgagaccctcagtgtgaccagtgaagaaaacagccttgtaaaaaaaaaagaaagatcattgagttcaggatcaaatttttgttctgaacaaaaaaacttctggcatcataaacaaattttgttcagccaaagactcagaacacaacgagaagtatgaggatacctttttagaatctgaagaaatcggaacaaaagtagaagttgtggaaaggaaagaacatttgcatactgacattttaaaacgtggctctgaaatggacaacaactgctcaccaaccaggaaagacttcactggtgagaaaatatttcaagaagataccatcccacgaacacagatagaaagaaggaaaacaagcctgtatttttccagcaaatataacaaagaagctcttagccccccacgacgtaaagcctttaagaaatggacacctcctcggtcaccttttaatctcgttcaagaaacactttttcatgatccatggaagcttctcatcgctactatatttctcaatcggacctcaggcaaaatggcaatacctgtgctttggaagtttctggagaagtatccttcagctgaggtagcaagaaccgcagactggagagatgtgtcagaacttcttaaacctcttggtctctacgatcttcgggcaaaaaccattgtcaagttctcagatgaatacctgacaaagcagtggaagtatccaattgagcttcatgggattggtgcaccctgaagaccacaaattaaataaatatcatgactggctttgggaaaatcatgaaaaattaagtctatcttaaactctgcagctttcaagctcatctgttatgcatagctttgcacttcaaaaaagcttaattaagtacaaccaaccacctttccagccatagagattttaattagcccaactagaagcctagtgtgtgtgctttcttaatgtgtgtgccaatggtggatctttgctactgaatgtgtttgaacatgttttgagatttttttaaaataaattattatttgacaacaatcc

SEQ ID NO: 54854 - DNA, 68 bp, Homo sapiens
ggagagagctagcactcaatacactgccatatttttaggcaccctactcctggtaacaaaattcgtat

SEQ ID NO: 54855 - DNA, 807 bp, Homo sapiens
  misc_feature (1)...(807): n = a,t,c or g
ttttcatgtttccagaaatctcttttatttctttagatatataaaacactgttactttatattctctctgataattctagtatctgggtctagagtcaatctgttgcttctgctgggtctcatagtgtattgtttccttgtggtgtttatgaatttttaaacctggatctctcattttctttctttctttnnnnnnnnnnnnnnnnnnnnnnnnnnnnnnnnnnnnnnnnnnnnnnnnnnnnnnnnnnnnnnnnnnnnnnnnnnnnnnnnnnnnnnnnnnnnnnnnnnnnnnntgagatgttccttttccttggaacttgatcaacacaaaatcctgaggcctggtgtgggtgtgttcctctggggcagattctcaactggggacacttctgcccccaaggacacatttcaacatcctgagacatttccgggtgtcatcacagtgtgcacgcacgtgtatgtacctgcacacgctactggcacctcgcggatagagcccagggacgctgctcacatcctgcacggagactgacccgcccagcgtcctagggcaggctccaggcagggtctgcatgtgcctctgccagccacctagaccctgccagccggggcctttaaattctcccctcgtggtctccagggccactcactagcctgatttcaagctgtaaactgggaggacctatttcttttcaccttgcacggaacaccaaggctgaaaggcagtttttccggaggtgccagcctgtctcacatttacgcttcagctgcggggtccagctctatgtgggcggtctcctgatgaat

SEQ ID NO: 54856 - DNA, 1266 bp, Homo sapiens
  misc_feature (1)...(1266): n = a,t,c or g
tagagatgcccttttaaaaaaacatattacaaattggaatattcaaagggcagctgttttattttcttccttgctgaaacataaaataatgacgtgttttaaaatttatagaatctttgatttgatcaaatatggtaatgtaatttgccattctaacagatcaaaatcagaatcagtatgatcatcctatccttgatttgccgagaagcatcttgataatattcaaaaattccatttatgaaaaaactcttggcagaggagaaacagcaaagaatttttaaaatataaagggtatgtacaaaactgtagtaaccatcttactgaaagatcaaacttgttccctttcagcttgggaataagacagagcttcctattaagaccaccacatctactcatctttaagctggtgattctcaccaacacatctaagcatgaaagaaataaaaattataagataaaaaggaaagaaaactctcagtacttaaagatgatataattacatagaaaatcaagaagattccatggataggcttcccaaaaaacaatatgtaacataccagcaacaaatggtaagaaaaacacgttgttttttttttaaagtacattttcagtgacattaaataataaggattcaggaatacaacgaatataacaaaaatgtaagatatctagggatgcgtataacaaaaaaattataaagcttcatttaaaacatttttaaacaaaataagtagaaagtaataccatctttatggaacagagtcagtattataaatgtgtcagttttcttcaactggtccatagacaacacaattttaacctaggattccaattgggatttctgtggaacttgatgagttagggccaaaagtaatcaagatattcatgaggaaggataacagaatggcaaaacttgctttaataatttgtgcagggatagacaaatactgtacaccagtctctcaatagggagatcaaaaccaaattcacacagacatgaaaagttgatttatgacagatgatgttgcagtccctggggaaagaatggaaatggtgctagaataattggtttctatatgtatttctatatatgtatatgccattacattaaagtcaatgcctatggagtttgggaggagtgatcaaaatgttctggaattagatnnnnnnnnnnnnnnnnnnnnnnnnnnnnnnnnnnnnnnnnnnnnnnnnnnnnnnnnnnncatggtatgtgaataatacctcaataaagctgttataaaaaat

SEQ ID NO: 54857 - DNA, 382 bp, Homo sapiens
gattaaatttgagtgaagtcctcagagtcaggacaaacatgaaatagttgggagtgcaagaaaccaagaatttgaaactccacctggtgggggctttctgtcactgcaggtgaatgtaatacaaatgcagccccaaatattttaattcagagtgattgttgattactcttaagatttaactctctcagctaggttgtcaggtggcttgtataccactcttgtagatttgctgtctttggtagtgtttatgaactatacttcaccatgcagagaagagatgggatttgactcatggcataactgaatacttgagtggatgctttgacatgtttacataattggagggtgacatcatcacaataactctaggaacaaggatttg

SEQ ID NO: 54858 - DNA, 775 bp, Homo sapiens
cagaatttcacaaaaaaatcaaagaggcatttgaagtctttgaccatgagtcgaataatacagtggatgtgagagagattggaacaattatcaggtcattaggatgctgtcctacggaaggagagctgcatgatctgattgcagaggtagaggaagaagaacccactggatacattcgattcgaaaaatttcttccggtgatgacagaaatactactagaaagaaaatacagaccaattccagaagatgtccttcttcgagcttttgaggttttagattcagctaaacgtgggtttcttactaaggacgagctgatcaagtatatgactgaagaagagacaggtaagctaaggtggggagctgtgaagtgacttgctcaagatctcagagctcgtgagaggcagccagcatgtggatccaaacttgtgctttaaccactcagttatcttccttccatctttcatcaaatactggggcttcaagttaatcctctggtaatttcaaaagttttaatctaaataaataaccttgttcatgatgtctgtatgtcttcctactgttttgcctgaaatgacgtgttctagaggttgcttgatctatgacatctgcaggctaaaaaaagtccagaatctaccagggtgtacaatagccttgtctttgaacctctggactgtcgtgatgtcctggctctacagctccagggagcgtaactagtggcactgtgggagcttgtggggctccatggctattaagctggctagtggaaagaaaaaaa

SEQ ID NO: 54859 - DNA, 1092 bp, Homo sapiens
  misc_feature (1)...(1092): n = a,t,c or g
gactggaggggaaaatagaaaacctttaaaacctattttaaaactcctttccaaggatcccattcattcagaggcacacatcttgtttgactctctatgagttttacagataaggtcttccatgcaaaacagctggcggcaccaggttgtaccttgcctgacccagtctgtgtgctagtgtcaattcccagacgtcagtggtccagtctgaaatctctaccacatctttttcagcagctattacaaggatgagactatcaaacgcactcaaacatgtctggattgaattagtgctgtatgccctttcagttacagtagtttaaaattagaatatattaatagtggagttaaaatcccagcctcagctgtgtttgttagataaactcaaagcttttttgacagttcattgtcagaaagaaaagagatgcatattaagatgcttcactttcacgtattagctgcttccaacaaactatctaatgacagtattacaataataaattccaagagcaaactgagaacaactccccaaaatttaagaccgacattttaattctattattacattatgtcaaagcagttcttccccagcacccataaaagaatggaaaattagaatgcttttcaagttcaagtcacacaggttaaaatctaagttcccgaaatatttangcaatctttatcttaagnggccttcaatttaagaagcaatactcancttaaaagggctctggaattacttcttaacgagaattaaccangaaaancctatttaaaatattatnccccngggattaccangaaatnccaaattagagattttgnaactaattggaaanggaaaaccntttcccttaaaagggnttnnaatananaaaangggtttcngggnaatttttacctttncctnntttnggannannnccttncccaaanggacctttttcccggggggtnaaagggtnaaaccccnganccnnnnnnnnnnnnnnnnnnnnnnnncccccnnnannnccccccnnnaannttttncccnaactttgggaaaantttnccnnnnnnnnnnnttnnnnaaaagggnnccnnnttttt

SEQ ID NO: 54860 - DNA, 516 bp, Homo sapiens
  misc_feature (1)...(516): n = a,t,c or g
gttttttttgactgaaaaagaaatgttttaataaatacaaaactctccaataatgactctgctcagctcaggggcagcaggagtggagtgtcgggggcccttggtgctgagtgaagataaattaaaaatcccaacaagccagtgacattatgtacaggaggaaaggggtggggcttccaggacagaggccgagggtggcagggcaggacttggagtggctgtgacctcggtctggcccagctgcctctcccccttgtggagctgtggttcccagaggtagtgggggtgggagtagaggcaggacagatggagcaaaggcactgggcttcccacaggagaatgcaagaaggtcctcgatgccaccccttccccagctcaggccccatcctcttaggtcacttggccctctggctgctccctaaaagacttcggcttctttctccagctctggatcagttctgggtctctgggggccgccggttggnccgttgcagctggaaaaagcatcgactcttt

SEQ ID NO: 54861 - DNA, 61 bp, Homo sapiens
gatcatttattcatagaagatcctctcttatggagaattaactgaagcttagaggaagaga

SEQ ID NO: 54862 - DNA, 338 bp, Homo sapiens
  misc_feature (1)...(338): n = a,t,c or g
gctgaatgcagggtatgggaagctgctgcactgtgctccaagggtgtctctgcagattgtcccagtctctgagaaggtatttaggagtcaccaacatgacctgctgatatgtaagagaaaagaaaacatgcatttattgtggatcatgccctgtgctgggagtttaccaatggcctcctgtttaaatcctttttacaattctgcccatattacnnnnnnnnnnnnnnnnnnnnnnnnnnnnnnnnnnnnnnnnnnnnnnnnntgtcattattcaccaagtcccttctgacaccatcaaattacctgacatttgcctcttccctttatcttctctgtgc

SEQ ID NO: 54863 - DNA, 350 bp, Homo sapiens
  misc_feature (1)...(350): n = a,t,c or g
aacagaaactggaagtccaccacagaattttttattcagtaggtctgggaggggggaagttataaacatattttaaatatatttttatctagaagtatattataacaggcaatttcaggaattttgtgagtcagttgttaaacatagcattactcaaaattaaattatataaacttattattaaataaatcatattaaaaacaaagataataattactcaaggatcatcacttcctagttatgctattaaattttactactaccnnnnnnnnnnnnnnnnnnnnnnnnnnnnnnnnnnnnnnnnnnnnnnnnnnnnnnnnnnnnnnnnnnnnnnngcctggcaaaaaagg

SEQ ID NO: 54864 - DNA, 916 bp, Homo sapiens
agtgacattgtcacatcagaactcatgaaactgatgtaaggcaattaatttgcttctgtttttaggtctgggagggcaaaaaagaggtgggtgggatgaaacatgttttggggggggatgcactgaaaatctgagaactatttacctatcactctagttttgaagcaaagatggacttcagtggggaggggccaaaaccgttgttgtgttaaaatttattttattaaattttgtgccagtattttttttcttaaaaatcgtcttaagctctaaggtggtctcagtattgcaatatcatgtaagtttgtttttatttgccggctgaggattctgtcacaatgaaagaaaactgtttatatagaccccattggaaaagcaaaacgctctcactgagatcagggatcccaaattcatgggacttatataagaaggacaattaatgctgatttgggtacaggggaattatgtgtgtgaatgtcatctacaattaaaaaaaattagcacatccctttacttacttgttatcagtggattctcggggtttggacttaatgttgagctaagaagcattaagtctttgaactgaatgtattttgcatccctggttttggacgacagtaaacgtaggagcactgttgaagtcctggaagggagatcgaaggaggaagattgacttggttctttcttagtcctatatctgtagcatagaaaacactaaaaggaaagtctgtggaatcactagtgactaaatactgggaacctattttctcaatcttcctccatgttgtgttctttgtattcttgagatgataatatattatgtatttgaattcctgaaaaatggaaaatgtttaagatatatgtatataaagtgtatgctgtattggtgcaataatggtaattaaaaatatgaaaa

SEQ ID NO: 54865 - DNA, 1225 bp, Homo sapiens
  misc_feature (1)...(1225): n = a,t,c or g
ggtcatctgtcctggccattcaggcaactccagcctggggcttcaatcctgggagttctgtctggtcactatcagaaggaacactttgaggggaaaccctggtgcagccagccctgaggaaacatggcctgagtgccctcactggtgggtgggaataaaatggaagtgcacagaggagatgtcagaagaccaaaacttggtgaatagtcccagtgctaggtcatataggaaacagaaagcatgacagtggccttttgggaacccaagttacgtcctggtgaaagcagaaaggaggagacaggatggctgtcaacaacgtcagcatgggcatggctcccaggcatggaggtaattgggtcttggcttcaatgccacccttttgggaagccctaaaccaagtgaggtgttcttttcccttgcttcccatatttgtcccagttgcagccctgttgttatgtatttactcttcaatttcttatctataccctcactcaattgttaattctttgggttcagtctcatgccatatttactcctagtacctaatgcagtgcctggcacacagcaagtgccccttgagaacttgtagagggagtaaaaaagtgcatggataaatgactgcagcaaatcacaaattttgaactttgacccttttcttttagtcccaaatagtggcattccatagctgagggtagtaggagcagttcaccctgggagcagacaataagaggaagaatgaagccaactaaaattctgaatgctttttgttggatttcgtagggtattttttttaaaataggggcttgccaatgttgcccaggctggtcttaactgactgctttttattattaccatgcactggcaattccaaacaatgtcagtgttaaaatgcttctccctgaaaaagagaaaaaaaaaaggaaaaaaagaaaagaaaagtgaaaagaaaaactcttattggcctaagttctaaataatagctaggttaccactgagttttaactatatgtatatgagcttcaaataagcacctttttattatgtaaataaataaaagttatctgtatccccactgcattgtaaaatttttntngttttgtttcatgtcttattcacctttgtatggaaattaattcagaaaccccaagcatanagtctacctntttaattccagcaggcagatgtagttctgcctgcttccttccaagggtaaagttcntaacag

SEQ ID NO: 54866 - DNA, 348 bp, Homo sapiens
  misc_feature (1)...(348): n = a,t,c or g
ggggccgcagctcctccggctctgcagggtcacggaggaagccagctcccctagtccaggccgagcttgcacttgcgtcttgtctgctgctgctgaaccaagatttagctgtgcgccctccttgcagtctcctggaaccagcaggaggaaacatgggggatactggcctgagaaagcggagagaggatgagaagtcgatccagagccaagagcctaagaccaccagtctccaaaaggagctgggcctcatcagtggcatctccatcatcgtgggcaccatcattggctctgggatcttcgtttcccccaagtctgtgctcagcancacaggaacctgtggggccctgc

SEQ ID NO: 54867 - DNA, 633 bp, Homo sapiens
cccacgcgtccgaaaaaaacaaattcactgtcaataaaagataaataccatttccataatttagaatacaaccaaagtacacagaccctaagaaatcatatccaaaattttgatagcagctgcccactgaaatatttaatagaaactttcagttataatgatcagtaaaacgaaaaggtttggcttctgacatatataggtggtgctgtaactgtttagaacgcttagcttctagtcggagctgtctagttctctctctgacagcttgttgctctgccattttttccatccgtttccttcttaaccattgtttaaaggccctttcccggccttctgttcctttaaggaagaataaacattcctcttgctttcttagttcttctgtctgtctttctttcatctgctcttcggtgcttttttttaagccataatcgaaaagcttgttgtggatctctgttttcctgtctactgttcatgtcttcaatttcctttgctcgctgaattctcctcatttctaagacctgctctcttttcttttgcaaccacgctttaaatactatgtcattctctctcttgttttctttctcttcttctatttgtcgtcgctcttcctctcttttcagttgttctctc

SEQ ID NO: 54868 - DNA, 385 bp, Homo sapiens
agaggtctgaagaaacctgggagccagcagcccggggctccactctgggttctgaaagcccattccctgctctgcggctcctcccaccccacctcttctcagccttgcagctcaagggttgatctcaggagtccaggacccaggagagggaagaatctgaggaacacagaacagtgagcgttgcccacaccccatctcccgtcaccacatctcccctcaccctcaccctccctgcctggccctggaccccatcccaggacctccctatcagctgacttcttccagtgtcttgcaggcccctctgggctcctccctcccctggcttttcctaccactccccttctatcggggctatctgtaggtgccctgggatttataaactggg

SEQ ID NO: 54869 - DNA, 13051 bp, Homo sapiens
  misc_feature (1)...(13051): n = a,t,c or g
aggcctcttgtggctttccacaacttattgtcccatatttttatggccagtttatacaggcaccccacaagtccttttcccaacacagacaggaatacggcagcctgtgccctgggagctcactgtcttgtgggagggaaccactcaagccactccccacttgtcctcctgtccctctcttcttgggctctgtcccccacctctctctgtcctttgtcttgcaggtggggagatggaggaggcagagctcacatcctggtattttgtgtcatctcccttctccttggatcttagcaagaccaagcgacaccttgtgcctggggcccccttcctgctgcaggtttcttccagaggggaaggatgagtagggaggatgtggtagttaggagggctcagggtctgaccactctcttttgcctgccctcctttacctgcctaggccttggtccgtgagatgtcaggctccccagcttctggcattcctgtcaaagtttctgccacggtgtcttctcctgggtctgttcctgaagtccaggacattcagcaaaacacagacgggagcggccaagtcagcattccaataattatccctcagaccatctcagagctgcagctctcagtaggactcctcggacccctgggagatggtgggggaaggggaggagggtgagctggggtcccaaggatccatggcctgacttggggggaaggtggggtacttggctctgagctactaccctattcgcacctgaccccctctccaggtatctgcaggctccccacatccagcgatagccaggctcactgtggcagccccaccttcaggaggccccgggtttctgtctattgagcggccggattctcgacctcctcgtgttggggacactctgaacctgaacttgcgagccgtgggcagtggggccaccttttctcattactactacatggtgtgcatgagctggggagtcacggagggctggggtgcagggaagagccctctgggtggggctgggggggttcaaggctgaggctgtcccatgaagaggcaaccactcttgtccctcccattcttggcccagatcctatcccgagggcagatcgtgttcatgaatcgagagcccaagaggaccctgacctcggtctcggtgtttgtggaccatcacctggcaccctccttctactttgtggccttctactaccatggagaccacccagtggccaactccctgcgagtggatgtccaggctggggcctgcgagggcaaggtgaccggggtcaggagagatggcacttgtgccgaagggggttgaggacagggtgattgccaacagggcatggatttagcttgggggcagtgaggataccgggactgaaggaagctctcccactctgaccgcccccacctgccgcccctgccagctggagctcagcgtggacggtgccaagcagtaccggaacggggagtccgtgaagctccacttagaaaccgactccctagccctggtggcgctgggagccttggacacagctctgtatgctgcaggcagcaagtcccacaagcccctcaacatgggcaaggtttgtccagaccctctccacagctctctcacccctccatggctcatccccctgcttccctgagccttgggcgcagcccctggatcccactgaggctccccacagtctcttccccacttggccctgtggtctccatctcctggctctgtatcctttcctatccccccatgtgctgccctctcacctgtgccgagtgctcagtcctgcccctcagccacacttggctcctagcatttcctgcctttcttgcaggtctttgaagctatgaacagctatgacctcggctgtggtcctgggggtggggacagtgcccttcaggtgttccaggcagcgggcctggccttttctgatggagaccagtggaccttatccagaaagagtgagaacagagaaggaaggggagtgggtggcgggaagataagggaaggaggaaggggcctgaggggaccagctggaagagtccgggcaggaagggctgggcaggggaaggggaggaggggaggaggccgagtgctgacggctggactgcagcctttctctctaccaggactaagctgtcccaaggagaagacaacccggaaaaagagaaacgtgaacttccaaaaggcgattaatgagaaatgtgagttgcgggtgcctaggcagtagcttgggctctccacctgggatccgggttgggggtctgcctctctgcccctcggctccttgctgaacccacgtgtggtatttggggccagagatccgaattccgggattacgagtggaaggtgggcagctctctccagcagcctctcttatgttgctggtctcaaggggtcggggcgggggctgaggtgtatgtcctttttgtcctctcatgctcacccccacctggccctgcagtgggtcagtatgcttccccgacagccaagcgctgctgccaggatggggtgacacgtctgcccatgatgcgttcctgcgagcagcgggcagcccgcgtgcagcagctggactgccgggagcccttcctgtcctgctgccaatttgctgagagtctgcgcaagaagagcagggacaagggccaggcgggcctccaacgaggtaggggctgggtggggctagggcacaggtggcggcgcttggaaaggcagaacggtcccctcctcactcccgtccaccgtggtcccccagccctggagatcctgcaggaggaggacctgattgatgaggatgacattcccgtgcgcagcttcttcccagagaactggctctggagagtggaaacagtggaccgctttcaaatgtgagagtgtgtgccggcccggccttttctctgtgctgtgtctcggggccagccggggtagacgggccttctctgcctttccctacacagattgacactgtggctccccgactctctgaccacgtgggagatccatggcctgagcctgtccaaaaccaaaggtgatgtcaccctgtctgggcctcaggtgaccctgcttccatttccctgtaccccagctccctgttccctttgctcttagtgtaggaagagggtccagtgatctggggaggtctgtgccagcgtgcagctggcgtgggccagagggcagaggcggactgagacagagctgggtcacccccacccctccctcctgtggccctgaagctttgatggcccctctgatctctgcccctgtgcccacgcttcctttccctcaggcctatgtgtggccaccccagtccagctccgggtgttccgcgagttccacctgcacctccgcctgcccatgtctgtccgccgctttgagcagctggagctgcggcctgtcctctataactacctggataaaaacctgactgtgaggccccataggagcctgagcatacaggagttgggggagccagggcccagtgaggggtggggaggctaaccgggccaggactctggccatcctcgttttcctgccctcaggtgagcgtccacgtgtccccagtggaggggctgtgcctggctgggggcggagggctggcccagcaggtgctggtgcctgcgggctctgcccggcctgttgccttctctgtggtgcccacggcagccgccgctgtgtctctgaaggtggtggctcgagggtccttcgaattccctgtgggagatgcggtgtccaaggttctgcagattgaggtgaatggagcacccctgaatataagtccccgggcccccagctttgtcctccaccctcagcactctctctgctggccaggccaggggcccaacacccaaaccaatgccttggtctgttccccatcttctacaattctgatccaactctgtccctggagttgaaactcaaagttctgggggagtctgtgctagcagggcaggctgtagtcctgtgtgacctcacaaccatgttttccctgagacagaaggaaggggccatccatagagaggagctggtctatgaactcaaccccttgggtgagtgaccctctacctccagccattggtttcctaagtgggtacaggtggtgggggatgtggacagcaggacaggctgccaacttcccccatttccccagaccaccgaggccggaccttggaaatacctggcaactctgatcccaatatgatccctgatggggactttaacagctacgtcagggttacaggtgggagtgccctttagtcccttcccagtggccaccttcggattcatgtgggacctgtggatccctgcttggtcccactccccgtgagcctctgacacagagtcctcagacctccaccctctccctcccatgtagcctcagatccattggacactttaggctctgagggggccttgtcaccaggaggcgtggcctccctcttgaggcttcctcgaggctgtggggagcaaaccatgatctacttggctccgacactggctgcttcccgctacctggacaagacagagcagtggagcacactgcctcccgagaccaaggaccacgccgtggatctgatccagaaaggttctgggtgcaagggcaagcaggaggggggccaggaaaggacagttctggaagatggacagcccaggaggcttacagagggaaagaaagggggcccctgatgaggatggggagcatggccttgggctcaaacagcagaagggtgagtgtcacctgagcggccacctctcctctccaaggctacatgcggatccagcagtttcggaaggcggatggttcctatgcggcttggttgtcacgggacagcagcacctggtgagcttgggagagtggttccagggttctgagggggtcagggctggggcaggggtgggacagagctggtatgatgggagggtggataaccaggcacctgggggcgtgggcataatgagaagcaagtccttatccccaaccctcctttcctgccctccaggctcacagcctttgtgttgaaggtcctgagtttggcccaggagcaggtaggaggctcgcctgagaaactgcaggagacatctaactggcttctgtcccagcagcaggctgacggctcgttccaggacccctgtccagtgttagacaggagcatgcaggtgcgggcatgctggggctggcccgagaagcgcctgtcggaggactctctttgccccttccccctcctgtttgacatcttttctccccttactaggggggtttggtgggcaatgatgagactgtggcactcacagcctttgtgaccatcgcccttcatcatgggctggccgtcttccaggatgagggtgcagagccattgaagcagagagtggtaagttcagtggcgtttctgccctctgctggcccccagctctctccctttttcctcaggaacccaggggtccaggcccaagaccctcctcccgttttcttccaggaagcctccatctcaaaggcaaactcatttttgggggagaaagcaagtgctgggctcctgggtgcccacgcagctgccatcacggcctatgccctgacactgaccaaggcgcctgtggacctgctcggtgttgcccacaacaacctcatggcaatggcccaggagactggaggtgaggggtgaggcgctctggcagtgagcctgaggcccaggggacttaggatcctgagtgtgcccagagggagaggctggatgaagactcagaggaggaatgaagttataagcaggggtgggttgggggagactcaggagagcccagcagggggtggctaagggccaggggaccaggctcttctccctgccttcctgtttacttgtggtctcccttcactttcagataacctgtactggggctcagtcactggttctcagagcaatgccgtgtcgcccaccccggctcctcgcaacccatccgaccccatgccccaggccccagccctgtggattgaaaccacagcctacgccctgctgcacctcctgcttcacgagggcaaagcagagatggcagaccaggctgcggcctggctcacccgtcagggcagcttccaagggggattccgcagtacccaagtaggggccgtccccgggctctggggggggtgggtagtcctcagaccaagggcttgcttgagtcctggctcaacctccctaggacacggtgattgccctggatgccctgtctgcctactggattgcctcccacaccactgaggagaggggtctcaatgtgactctcagctccacaggccggaatgggttcaagtcccacgcgctgcagctgaacaaccgccagattcgcggcctggaggaggagctgcaggtgaaccactccctggtgaaccactccctcgcctgggtagccaggacacctgggcctcgtggccaggccagaagccgtccccaccctcccacccgtggaatccccgcagcacttcttcctggggtcttcgggggaagactgacttcctggctgcgtgacctggagctctgagcttcagttttctcacttgtagagtaacatacacagagttcaccctacagggtcgttagaaggctgaagtgagataattcatgtgctggtataaactttgtggaaatgtgaggtggggagaggaggtggggcctgttttgaggaaggagataagttattggagccgcaaaaacaggtttgcttgtgcccttctaacatcgccttcccttttctcgttgctgaagttttccttgggcagcaagatcaatgtgaaggtgggaggaaacagcaaaggaaccctgaaggtgagggccagggaaggggtggggccaggcactggtggaggagagggtgtggagtgagaggcctgtgggcagaggcacatggtccggggaaggaggcagacacctcagggttggtgtcccgtgcttccgtcctgggtgtttttccccctgcttgctttcgcttgctctccccatctctgggtacctgttgtttcctttacccgcctcagtgctggtggctccgaatcccactcctcagcccaggcctcttccctgaaccatgggccccactcgtcccactcccacagcacctcagacgaggcatgtcccaaagcccttcttcattctgtgtctcttgtctggctggtgggagcccctcccagccaggagcccagccactactctagaggccgtgttagtggcccctctcccaagcctgtccttatgtccctagtgactcctcctctgctcccctgctgcctgtggcccttggtgctgcatcctagattctgtgctgagacggccttctccctacctggaacttctctctacctcctgtctcccctgtctgatccactgtccacacggcagtgacactgaccttccaaaagccccagccagatcagccttggggaaaagtcactccccgctgcccacggctcagatggctgggcctctgcccacccctccggccagacagctctccttgtctacacagatccccttgcctttcctgtccttccctgcttcttggcccacaggacaagctctttcttctccttcaagccttggccagaagcctttcctgagcttttcagtccagcctcttcccagcacagtctggagtgttggcctctgggggcaggcccctgcttctttacctctctgtctcgcctgacgcctgtggcgaatgtggtgccactcgtgtgtgtggactgtgcagtgacggggaggaaaaggggctgaaggcctcaaatcctgtagcccagggagatgcccttaggtatggcaccagagaggtctgtggcctcacatgtcccacgtcctctccctgccccttgctgagccaggtccttcgtacctacaatgtcctggacatgaagaacacgacctgccaggacctacagatagaagtgacagtcaaaggccacgtcgagtacacgagtgagtgtgggggttgggaggccttggggccaggcaggggctggcgcagggagccgggtggccatcccagccctcctcacaatgcttccctgtgcagtggaagcaaacgaggactatgaggactatgagtacgatgagcttccagccaaggatgacccagatgcccctctgcagcccgtgacacccctgcagctgtttgagggtcggaggaaccgccgcaggagggaggcgcccaaggtggtggaggagcaggagtccagggtgcactacaccgtgtgcatctggtgggcgccgggagctgccctgggccaggggagggagggcaggacccaggctggggctgggcttctggagcccgcgcaggcagaacctggacgacagctcacacgtctccacaggcggaacggcaaggtggggctgtctggcatggccatcgcggacgtcaccctcctgagtggattccacgccctgcgtgctgacctggagaaggtgtggtcagccacccagggcaaccccctctgtcccaggtactgagccctgtcatgtgcagggcctgtgaccaactccccttttccacagctgacctccctctctgaccgttacgtgagtcactttgagaccgaggggccccacgtcctgctgtattttgactcggtgagtggggagagatgaggcaggaagggactcgatggcaccgggtttactgagtatgcgttaggaggtttctcaggagacagctgtgtcagcggctggtgctcttgagaacttgtgatgtcatcagagagaaggacaagaatgtgagcccgtgagacacagcagagtaaggggcagacctgcaggcggcagggaccgatgccagtcagcagggaccctcagggtttgagagggagtctttcctaatgctggttttattcagcttgaggggctgcctttgtttttttgttgaacttcctatcttttttttaatattaaagcgtattttcctttacaaagtgatggtggccatagatgatagttgtatttgtcttttcacgaccttatttggctaaaatagttatcaaccctcttacggctctcaaaacatnnnnnnnnnnnnnnnnnnnnnnnnnnnnnnnnnnnnnnnnnnnnnnnnnnnnnnnnnnnnnnnnnnnnnnnnnnngatcctctggcctaggcctttcaaagtaccggatttacaggccagagccaccatgcccggccttcaaaaaaagttttggaacatttactgtaacctctgggagaaaatgtgagaaaggtgtggtggctgtcattagccagctgtttgtaggtcagggagacccctacccagtgtgtgcagaggggccagcccccatcagctggggaagcctggctgacacactctgggttgaacacaatagaaaacacagagccaacaagattcccggatagggagctgacggtgcagcagcctagctcaggagggacactggcacggcaccgtgtggactgggcccgcgtgggcacgaggaggggtcaggcctgggacctgagtcggggggtcaggcaggatgacagaacctgcagttaggttgtggcaaataaaggaggacccagttgtatccatgacaaagatgaggccgcgaggagggcgagtgggtttggtgggcaggcagagtgccttggagaacttacaggtcctgccacaatcctaatgcaacggatggagctgcaagttcagtttgggaatcatcagcctggattggtttggtggaagccagggagtggttgagaccccacaggggagctctgaggaaggaagttccgaaggagggaacgtaagaaatgaccaggtcagaaccaagggtggtccagaagctaacccttagcttagggacagtttcacagagaacacgtccatgatgcaagactctagctgagggcctggagcagtgaagactggggcaaggtcaccctctgggaagtgaagtcaccagagaccttgcggagcagctttgagagttctctgagtaggaaggtaacagaatgtgaaggacactggagagaaggccaataggaagcaaacaaaaacaggccaaggaaacccagtacagggggctgcagggcccagggagtgggtccctcatctctcctccccacgcttggccaggtccccacctcccgggagtgcgtgggctttgaggctgtgcaggaagtgccggtggggctggtgcagccggccagcgcaaccctgtacgactactacaaccccggtgagcactgcaggacaccctgaaattcaggagaactttggcataggtgccctcctatgggacaatggacaccggggtagtgagggggcagagagccctggggctccctgggactgaggaggcagaatggaggggcctgtgccctaactcctctctgttctccagagcgcagatgttctgtgttttacggggcaccaagtaagagcagactcttggccaccttgtgttctgctgaagtctgccagtgtgctgagggtgagactgagggcctggggcggggcagtggaggcgggatggccggggccccccccacactgtctgatgggttccccaacttcagggaagtgccctcgccagcgtcgcgccctggagcggggtctgcaggacgaggatggctacaggatgaagtttgcctgctactacccccgtgtggagtacggtcagtcttcccaccgaggccctggctgaccctccctcggggaccggccgttttggtctctctgggttgtagcctgctcctcttatcatggtcatgcacgcagcctgtttgctctgacaccaacttcctaccctctcagcctcaaagtaactcacctttcccccttctcctcaccccctcttaggcttccaggttaaggttctccgagaagacagcagagctgctttccgcctctttgagaccaagatcacccaagtcctgcacttcagtatgaagcaaaccggagaggcgggcagggctggggggagaccagggaggctgaggtgtggccgaggacctgaccatctggaagtgtgaaaatccccttggctcgtcagaagccttgggcttggccataaatagggaggcagtggcacctctccatgggggtggcgaaggtggaatgagaggatctacacagagtccccagcctgggctcaccctgcaccttctcttcccctctgaccacttttgcgcacgtcatccccgcagccaaggatgtcaaggccgctgctaatcagatgcgcaacttccctggttcgagcctcctgccgccttcgcttggaacctgggaaagaatatttgatcatgggtctggatggggccacctatgacctcgagggacagtgagtcatctggtcccctcagtctcttgtcctccccatgcctcgccacctaggccttgcccctcagaagccagatgcctgtgctctccgtttccacctgccatcctcccgagccctgctgacttgcccttttgccccctgcagcccccagtacctgctggactcgaatagctggatcgaggagatgccctctgaacgcctgtgccggagcacccgccagcgggcagcctgtgcccagctcaacgacttcctccaggagtatggcactcaggggtgccaggtgtgagggctgccctcccacctccgctgggaggaacctgaacctgggaaccatgaagctggaagcactgctgtgtccgctttcatgaacacagcctgggaccagggcatattaaaggcttttggcagcaaagtgtcagtgttggcagcgaagtgtcagtgtgtgttgctagggctgagagcagtgcccctgcccgatgcagttctgggcaggccaggttgacataaccttagactctctgagccctgatgacccttgggctgttcagctctgctagaacctcccagatgacccgctaggagtctagtgcttcacaggaccaccccgagcagaactgggacccaagagcctgcaccccaaggaccagagtccatgccaagaccacccttcagcttccaaggccctccactgcccggctgtcgccagtcaccacggcctcagacagggcttgtgctcagctgacacctgtgacacagctcttctgcctcatgagctgttgtccagctacacctccccgactctgtcctcgtgctgctggcggttctgaggtctgcagattttagctgagttccgggctgttgaaagcctgctgacgcttggttctgttatcagtggaatgaggtgactttcccggagcttgtgcaatcctcaggtccggcagtgtcttcttccagttactggtttcaaacaagccaaaagtctgactttggtgtgtttgtgaatcctctgaggaagccgctgttctcctggggtctccccttcccaccggacctgcctaactttcccccatttagtggcacacctggggtcttcagagatgactccgcgtctgtccaaagaagtttggtgagatcagtttccgtagaggtcagtgacagttcagcagcctgcatccagtcattcgacagaaattcgggaatctttcacttcatgccatgccctgtgccaggtgccagagatacagctgctcactccaggctcatcgctggggagacagataagaggacgggcagtccccaccctctgtgaaagatgtgatgtcagggagcagtgtggtcctgtggggcatctaaccaagtcaggggcattgccaggcagggaagggaaggcttcctggagcaggtggcctccaagtggggctctgaagactgagaaggagccaggcaaagagcaggggtagatgagggcatctggggcagaaggagaatatacaaaggcccagaggccgggggcaggacagggtacctttggggacattgcatgtaattgaccacattcggagtttggatttggaagtggtggaagagatggagatggtgagacaagtagtaagcacgtcagccttccaggtgcgctcctttccgatgagcactgtcttatcccacgtaactttgagaagtttgggcctttcccactgtggcagaggtttcctgaggctcttgcatacatggccctatggttgctcatcagatc

SEQ ID NO: 54870 - DNA, 362 bp, Homo sapiens
ggccggctaggatgggctgtctctggggtctggctctgccccttttcttcttctgctgggaggttggggtctctgggagctctgcaggccccagcacccgcagagcagacactgcgatgacaacggacgacacagaagtgcccgctatgactctagcaccgggccacgccgctctggaaactcaaacgctgagcgctgagacctcttctagggcctcaaccccagccggccccattccagaagcagagaccaggggagccaagagaatttcccctgcaagagagaccaggagtttcacaaaaacatctcccaacttcatggtgctgatcgccacctccgtggagacatcagccgccagtggc

SEQ ID NO: 54871 - DNA, 328 bp, Homo sapiens; identical to SEQ ID NO: 42826

SEQ ID NO: 54872 - DNA, 350 bp, Homo sapiens
cggacgcgtgggggctgagggtggagagaggaagggaaggaagaaaaggggagccttcctggccagggtaaccggcactaagaggcctcactccaagcccccgaggagcctgtggtggggctggagacccggttcaggcccctccaccacccttaaagtcctcagaaggtgggaactgaactggcacaggctgggaaccggctgtgcgctggccacttgattttgccagctgccctgtaattcagctggtgaggaaactgaggcacagactgaggtagaatgattcgccagtcactcagcaagtcagcagacggggaggactgaatcccagcctgagagcaccgaagctt

SEQ ID NO: 54873 - DNA, 524 bp, Homo sapiens
gacgacatcccacccccagttgaataatggcccattcatgccaaccttgccaacacggagagggcagagatgcactagaagaccttcatcctccccttcctctgccccaagtcactacagttggttctattgaagccagtctttaagaaacctgggttaaagacaccagcacttctgcttgctgggctggctggacctgtgaagccatgggcaggtagtgccctcttgagagtcattttatttggccaccttcaggtgagactatccatagacacatgctaggataggccccgctgggagggcagttacaggagagagtaggtggtggtgacgtgagggctgtgaaggatccagagacaagacttagatgtttcgttcattcactcactcattcagttactcctaagacttttcagtttcataaggaagagtgttgcctgaggccctagggaatattggggaatagaagggattgaggaaacattaataatagtttattcaaaaaggacccaaatgctttatta

SEQ ID NO: 54874 - DNA, 121 bp, Homo sapiens
acttcaattccttcaaccaggcttcctaatgccaagttttccaggccattcccactctggttgtcctctaccacaggtgcagggcacaaatggacccattcctgtctttataagaaatgtc

SEQ ID NO: 54875 - DNA, 398 bp, Homo sapiens
  misc_feature (1)...(398): n = a,t,c or g
ctgagcctcctgttccatggggatgggagcacacaactttacggagctgaagcccttggcttgccacaaatactccaatgccaattgcaggcacaagccttgacaagggtggctaaaaacagctcctggtgaaaggtgcttaggtctctctgttgcctggatgtgttggcaggctgcacctgctctccatcatagatatacaggaataggatatgtttctctgtcacaccccttttctgggggtcattaccactagttcagatgcatattgtagtccatttccagaccccaatgcaattgagaaccatgggaaaaatattttgaaaatgcttaaaattcaatgatgtaagaaattatcgggttttggcaaagacacagcaaaaaaaaaaaggngaaaa

SEQ ID NO: 54876 - DNA, 419 bp, Homo sapiens
  misc_feature (1)...(419): n = a,t,c or g
cgacagcattcttgatgaacttgagctcgctggtcagctganagacctggttgtccatctccccgatggccttgcgcagctggctgcactcacatggaggcctggttctccattaggaccagggggtcctatgtcaccggaatctcctttctcacctttagagccaatgggaccaatttttccatgacgacccacactgcctttctgtcctttgtcccccatgtctcctttttctcccgtggggccgactcttccaggccgtccgggggcgcctttgtctcccttctctcccgcatcccctttgaggccagggacgaggatctgcacagagcaggcgtcatcgccagccggctgaggatgtccagatggcagcagtgacaggaaggccaggctgattagaacgcccaccagggccagat

SEQ ID NO: 54877 - DNA, 476 bp, Homo sapiens
tttttttttgcaccccagcgtctccctcctgggaggctgtgtgatttattaacgttggaagacatcacatagattgcactctggaagctcgcatgtctgctgggccgtgggggcgtccctctgccaccccgaggtgctggggtccactgtgaagagccagtggccaggccccaggcactgggatggtggctgggctggttgtggctgtctggtagcctttggctgggccacagggtccagaccctcctgttccgtgcaggggctacggaggaggctgtcccaagggcggggacttcctgggcccttctgtgaggagccttggtctcagcttccggctgtcctgcccccagtctgcctggcacgctgaggggcaaacaaggcaggagaggcggggagagccccacagtgcccagactgctgttgagggtttctgccagccagggcatggagggcactgagtcccctgggctcaaggc

SEQ ID NO: 54878 - DNA, 225 bp, Homo sapiens
ggttttattcttattcagtttttctatttaaattaatacatataaatgaatttttgtaccactgttgatcagatcaataagcattaattggaaaacagtaagcattctataaatgattagttgaaatgatcttaattttattcttgttgctttggtggagacgtctatccttagtttatgttagtagtaaaataagtttgtattcctgaacctatatttaactgc

SEQ ID NO: 54879 - DNA, 14610 bp, Homo sapiens
gcagcttaaggttttttttttttctttaaaaaaaataggaatacaaggatttacaaaaaaacctcacacagtgcaataataaaggaaagcagacactagtggaacccctagggccactgcatcttgttcatgggcaaaaggaggaagggaggtgaggtctgggtagagtgcttttcccagtcccctgctggcacttctccatgatgacaaggaagtctctgccatcctggccacagtgctgggctccctgcatgacagtgaaaacagtgacaatgttccagcaaagccaccagacaaagttcttaaggtcacaggagagaagggagcccaggatggaaggcacagcagagccatgagtcctggggcagagagtgctgggctgagtcgtattgctttgctagacttccataggaatgggcttcttgcggcgagaaaagggtgccccaccctctacttggactacactactctgaaaccttgtggcagaggcagagaaaaatctgctttatcgtgagtggtcagactgtgcttcagtttcaacaggctgccccaaaagagggcacaaggtgatcaatgggttctctgcagatatgaggacttggtgggcagagggaaaggaaagagtggcctatgaggcagatggtgatgcaaaaatgtcaagttgccattcaacttgttgtttgctaactctgaagtaagaaagatgagggaaatgtaaagattgccgtctcccaccactctggaagttgcgccggaaaggagagaggcgggaaagaagagaatctgttgtatcaagatattactgtagccttttgaggagcttcaataggggaaggaggggagtggcccaatggagttgggtgaccttccttctccatttattgtcaaagagcaaacccaggaaacatttatgtcaacagggcacaaacaagctacacattaaacaacaaaaagtacaccttccagggggaagttgggcaggaaaaaccagactttgtgtgtacagctgaatattttctctaacttcatcctatgaaaataaaaaattattaaaaaccgatcttcttttaaattaggataataccgcggtttaaaaaatagccttgtcataagtgcttctccctatgaagtgcttctcatagaaaaatatacaaaatatatttacatttataaaaccttaaatagtaaactgtaaacagaacagagtaaaatccaatgacttaatttaacaggttcaggactctgtcttggggaaaggaagagaagaaacatttgatgctgttttgaccacatcctaaggagtaatcagggcagtagtgtcattgaatttactttagctgtgggttgcacgcaggtggcagagttccctcaacataaggtggtctagtccccaagttgtgggccttgaaatctgattagtgttctgccttcaactggacactgaccgtttaaaaattaagtcttcctatgtcttaacaaggggaaaataaagtaaccatgtcttaggaatgggacccaaggggtcatcctggctgtgatactctcgttgttgcatgatttaaatcctatttaaataatctttttcctctcctacaaaatcatgctacatatgtttctttaaaactctccatggagctttatgaaaatgtttccaaattctgtctggttatgaccaatggctcctgtccacttccccacctggagtgcttacaggctcagggaactttttgcaggcacatcctatgcccagcagggagtgtccttgagcaggcagtcagtctcccctacaaccgaaagaagcatgggaaagcagtggcatgaagacaggggaaaggaagaaaagggagtgaagagggaatgggagagggaagccgctcctactgtcaagaaaggtaattggctgagataaggctcctgggggcaacactcccactcaaagcctgcaggctcaatgtttggtaattaattggcacaaccccatgacagccttttgacaccggaggtgctaggaatcctgtctcccaaccagaagtgaactctcgagtgggaggacagtagggaaaaccaccagacctctgtttgttcgacagacgctgtaggtggcggctggctggcaaactgtcaggaatctaaccaaccctccatttggggctttgccctgacccactcacttacagtgcttgggaaagggccaacctgaggatggcaacttatttctgtggagaaattcaggcccaatctcccaacataaccaaccctctataataggctccttccaggcaagtctgctagggaccccattcccactttctaacagtaaacaattggaggggccccaggagaaagccgatcatggatcttttcttcgagacctcaactctgtctctgggactatgatcacatgtctgatgtgagtataggacataagagagctcagccatcacagaggcccctcagctgtgccacgcaatccgggagctcccagctgctggaaaaggccttcagcgttgctttggatggccccgcctccttgcactccaacactgggggagaagagcagctttagtttaggaacttccggcatttcttggcgccacagttgcagggcagcttgttgctggcatcctcaatggggaacttatagtcgtaagtgagttcctctcctcggtagatcttacgcatggcaaagatgacaatgtgcttctgcccatcaatattgatgacccgagaatagcagttaggctcacacgagtgattgatgaagcgtgcagcatttccatgcatggtggcatccactacctctgagtcatcaattcggaacatatagcaaccaatgcccttgctgtcgtaatacttttcccgcttgtcagtctggatggagcggatgacgttgccggcatactcaatcaccatctcacctgcatcaatgtttctcttacagaaaagaccccggccatggatgggagacctgtagacaccaactgcctccttagaagtcttttttaagtgccggaagcgcatgggcattggcagatccatgctagttgccctccgagctgacttcagctgtacctcctcctcttcttcatcattggggttgtattcaggaggctgacgatgtttagaagccaggaagttaaacatgtcaaatgctgacttcctgaggtggacttcagccctggctgagccgtgaggggttcaaggggggttcattggcctcctctggcttgtggaaacggaatttgtaatttcgacagtgcttggcaccagacagctgctcaatgaggaacacaactgcatcatggagaatccccagcatcctcaaaccgttaacacctgcaaatgagagctgctttaggcgggcatttgatcgagcttcctggactttatctgtcaatgacttccaggcatcttcaatactttctgcacagatctgaaagccatcatcactggaaatttcaaaaacaagtcctttcttgggttttttctcagtaatgctttccttccgcttttgttcttgctgaagccaaagcatcagtggggagctgaaattactttcctcttcttccactgttttaggttctgcactttcttgttcatttgctggattttgggtcacctgaacttccggaagaacagcgacttgccctgcaggttgcccacactccttctgggaggactgctccacgctagctgtatcctgctgctcagcctctgctcctggagtccctgtgcctgaggtcagggatgtcgtttcttggtctggaatgtgtgcttcagaagaactggtccgcaaatgggaaactttgtgcttcttgccattccctttgtctagaggcagctgaaaccgtttggtttttggtttgggtttagtgggacccggcactgaagggcttgctgaccgctgtccagaagatggagaggatggagaacccccaggagaggtggggctggcttgcacagctgaggataaagccttgttctgctccagtcccatgctattaggagcgtctaccgtctgggtaaagttggatacctggggccctgaagcagaatcaagatcacgctgggaagaatgaatcccagttttgctggcaaggagctggttcacatgctgaagctgatagtgttcgtctgcttccccagaaggtgaagcggctgttatgcccgtagtctgagtggaggggagcacacagatgctagatgccgctgttattgcagcagtagagggggtctgtgatgtccccagttgtggaaacattcctgaacttggcggtaaagccacaggctggtcctgaatccccaggctctgctggctagctttgattaaaagattgcttattgagccaatatctggggtaccaagcaaccttgggttggttaaggtgacgtgtcctggaactgacgcactacttgtaggggttgtggtagtttgcatggatacaacattcaagacagaggaactggatgccaagccagacacagaccctgatgtgaggtggctagtatcctggcttattgttgatgtgcctgccgctgtggcagcagttcctcccacactctgtggtaacaggggtgccggttcaaaatacatgatgctagatttagatctttttatgatgttggggacagttcggtgagatgaagtattaagtgaccccaaatctaacagacttggatgattaggaagctgggagggtgtgaagttaatcaatgtcatattagaaaccacatcagaaggggcaatgtttgaaggggtactagagggagcaagttttttattctttcgggtctgtagacgagatatgggtcttttcttgagtccagaggatggagtggctactgtggtactgaggtctgtcctctggctggattctgaaaccaaaagttggggatccggaggaggctgaaccccaataagcaggcctgaaggaggattgctgatgtttggtgggaaactactttgagtagctgcagggaaggaatgtaagtgctggtgatgagacatgggtagcaatcctttgctagcagaagggaacaaagattgagaagttggcaagcttggatttagtcctgtggtaagggtgagaccacctcccatgggtcccaatactgaagtatttgtctccatcacactgggtgtagaactaacagaagaggtcaattggattttttgggtcactccatttggaagagtttggagaacataaagtggctgcatgttctggttaacaactatgagtttctcagtggctggcttcaggtggggtggagtggtctggacagctgcattggaaatctgagacgggccaggactatcagtagaattgggcacatacttctggttctggatgggaacagttggggaaacaggtacctgaaggccaggggtgctactgttcctagttaaatcctgattgttgccatgaccttgctctactgaaccacaaggagggctagagatgtggtctgcatccatgtgtccttggataaaatgatcaggagtcatgtggccttcaggagttggatctactcctgggctcagcagtgctgggtcactttcagaggaggctacagatttttctgtgatggttactctcttctcccctgagtctgagataacagctagtctactgggattctggctggggacagtgggactccgggtggtcaagacagacagatcagatggtagctctagaggcaactcaaactgttcctctgctgagatagaggaagagacactactatccacaggttctgttgtaggcagctgctgagaaaatacttcaaaaagacccatgtctttttcacgattactgtcaagacccaatccttcaccaagattcaggagttctgatgaagatgactctgggctctcacccaaagcctgcatggatggagtattctttagtacaaagtccataatgtctgaaggcaggatattcccacagtcatcactgttgttattgtctgaatctgatttcaggagctcagtattataggtgtccagtaaatttttgtcggagggggtacttgtgtggactctgcggcttgactccaatgagctgagctgagcttccaaggaatcttgtccctgtgttttaactctgcttacagaatggcagttatccatctttggctcatttttgtggccaacagaactcttagtgacatgttctttctccccagcatcttcaggtctatcaatctttaagttctctgttccattttctttaccatttctttttggaatctggctgcttttccttgttgtggctgtgacactagtatcactctctgtcccatcatcaacaccatccaactgtgagatttttggaagatcacactgttcctcctcccgaaataaattatgggatgccagtcgttcctctccacctgaagaaatcactgttctagtgaagttgtaatagtataagtcgtcttcatctgaagtgcttaagtcatcggccccatccacctgtccttcagctgatctcttgcctcgcttcttcccagttgagctgctgtagaatggaatgtcttcttcaccataggatcttactccatagagtggggtaagcccaaaaaacatgttagaacgtgcacgggcactgcgacggggatacctccttttaaaagagccatcctcctgaggtttggggccatctggaagcattaggtttctgtcctgtactggaagattctgatagttgttactttgagaatcctggcatgaggtattattggggcttggttgggccactggaccatctcctggattttcagaggctgaaattggttctgtgggagatgttgactctatttgcaaaggggaagcaggactactttctttcagggcatttttggattgactctcattttccatttttagaggtgtcagtgtcactttgactgtgcgtttccgtggtgcctgtaattccttggcagatccttctacttgcatgggtggagctttggggactcctggcatagaaaggcctttatcaccaatcttatcagaagaaacattgttacatggtcgttggcccatatactcaggagtcaaaacctcatccataaactctggcttcaagtttccttcctcaccagttgtcacctgaccaggttccaaaaaagatttactggaatgcttttctttgaaagtttctttacaggattttttccctttctgtctcctatctctggaactagatcccatatgttcgttgataatggatgatctgttgctcattccagatagcttcaaggttttgacttcagtatcttcatctggagaggagtttgctgattgggtagaatctgtgtgttggtctcgatcattcctttgccctctcaaatggaggtgtgggaaggagagggcctctttagaagaaaacgacactgaagagggttcagcaaaggagccgattttactaacattcagttctctagatgttgtgttatgaacctgtggggccagtttaggaattccagggtaagccacattatgtgcagatccctctgagctcttggaactcagcactttggtcttctctccctttaaagaggagctcttggacaccaagtctgaagcactggactgcttcatttctgaagatgaagatccatccaagtgactgtttttattgcctacagtaaccactgtcctttgcaaatttgaagaggtggaagtgttttgccctaaactagtacttgaattcagtggccctaagacatgatcaactactttggcacttgattcaagatcagtagcggtcccggtggtggagactgaggaaacattattcctagagtaagtattcccagttctcattggagacattatccggagtttggaccgctggggtgataaggaagaggtactgtgacgcctggagccaatgcttcgaagtccagaggagagtaaaggatcacctactgtgactatttcatgagtggttggggtaggacttcctgcagaaggcaacggtcgacagccaggggatctctgtgttggagaataactgggtgttcgaatcctggggacctttgagatgacatgataataacaggagccagaggtttgtgaatgaggaggtcggtctggtgatggaggacttataatttcagctgtgttttgactctcttttgatgaactttctgtaaaagatgttggactatgggcaatggtcctgttttcatcatgttcaacagtgctgttgatatccggctctacgactggaggacggcactccactatcttgcatgtatatacacagcgcttgcgagcatctgtggtgctccagtataccctggaacactgatatccaataggaaagagcttatcttcacagtcggagagatcatttagaattcctaagcagtcgattgtcatagacccaatcatcatgtggatattttctggttccaagccattgagaaacttccttctcaagctgattccttcaaagtccacaaacactcttctgaaaacttcaaatccattctcaggaaccacttcgcctttgatcaaatcccgatgtcgttggcaatatacttttttatcatccagaaagacacagttcttggctcgggaacacatgaagtgatagttgctggtgcaggatgtgagacagcaacccacggtggctcctggcttttggcagaattcacatctcagctgcttgcccctgatcacagccatatgcacattctttagtgatccgtcatcatcttcaaacacttccgctgaccacaaagcacaatttacatgtgtccactcattttggccaatatatagtaaacgaccagcatcattagcactgtcatcaccataagtcaaacataacgcacactgtctattgtcttctatgcctgggggtgggttcagctctggactgtcttctcgactcctatcagtactcaaaattggtggtgtaggaggatgcagaggagttggtgagtctggttctccaggacctttgggtttgggagctggaatgattttcttcattaaaggaggctgctcagtgtggctgttttcctctcgctcctgccactgagcataattatggtcaagtgaaggtggaagcactgcgtttggtaacatcccactgttgcttgatactttatttggctcccaaaacctggactttttgacactgaaccatggaaaaacacgttccatttgccgaatgaagaaggacttgaccatgctgttggcttttttaatttctggctgtcctccatctgaattaatggctgcttgaatgatcttcacaatatcatcactgaactccaacacagatgtgtaattcccttggtccatcttcctcttgactccttctagatctaaaggctgctgatcatcctgtttgctgacctcagtaagaactggtggatcaggtccttcgggggagctgcgggaaggtatactctcctctgtctcgggatttaagtctggaggcttggcagcctgccggtagcgtagcaaatggctggtagtccgagaattcaacaaagctgtcagaacttgcttcagagaaatctgcagctctttttcaagggccagtcgccactctgcagggtgccgctcagtacagttcacacaagtgtaggccacactttctggcagattagatagaatctcatacatctcatcttctgtacctgaaagattctcacatttggaatggacccagcgatcacactttccacattgcatcatcttactctcatagtcatcatcatcataacatttgtcacagagagggcagaagtttcctttagcaaagagcttggcgcaatcatgacacagtgagaaatcatgagaccactgtgcatcccaccctttgcctggagttgtggatccacagctcttacagcgaacacacttggtacagatccagactttcttcttctttgtgggtttggtggggtagtttggtcccaggcactcagggtgatagctgtttcggcacttattacactccagcagctgctttgtagcctgatgttgccttccacaaacgtgacagaatttgcaacgacgacaacaccaattttccagctggtcctccagagggcgctcgttctcctctaaacaaaacttgtggaagggctcacaacagacttggcaatacacaaactctacatgcccactactggcacagagaaagcaaaccaccctgggtgttataggaacagaagtcaagattcctaagcctcccatctcccacacattttctgcttcacaatcctccttaaagtccactctgatcctgtggactccatctgctggaattttttgcttagaactattgccattggagagagtgctgaggatgttcaaagtgcctgcattctcctgcttattgaccggaggtggtttttccttttcttttggtttttgttttacagggatacttgggcggggagccacttttttctgtttgctctgctctggacctgattctggtggtggaggctgctttttcttgggctcactaggagtggttttgggaacttcttttcttggcggtcctgtagtaggtggctgaggcgggatgaccagtgctggctgggagacctgcttgcttgacttcctggaagctggagtggtggcctgtttggattcaggcccaggggccgagacattcccttcttcactcttttcctcgacgggctttcgtggaggaggctcactactgcttttctttggggcaggatcctctcttgctgatggggtaggtttctgactagagtccaccacgttcttcacaacactgctctctttgctgtctttcttttcactggtcttagactttttctctttctttttcacagctttagcttgcttctgcaggtaggctttggaaggcatccattgtagattctgacattttctcatcttgcagcactgcttctttatattgcgaccaccaaacttgggcttatctaagcaattagtacaaacaccacagtcctcaggcacctggcagccgggacactgcccacaccgcctcgatcgacgtcctttctttactggaggttcctggggtgccttgtttctagtgacaggtttaattggtttgatgggtggagcaagaggttcagcatcttctgagccagcaattgatgacttgtcatcattccccatggaagacaaaatcttttctcgttcttcccatggtaaggcactcagggtgggcatgtcatcaggaaacacagctcgttttcggccaagggcaacagctgctcttctgcagacatgtttaatccggggtcctcgcacagaggtctctgatgagtcactttcttgaccctgtgctttgggctggtcggtttgtttaagactcttactcttctcaatcttgcagagctgagctttggccttttttaggaggctggcaaccctcttgtcagtcattggaagcttgtctgcctgagccaacatggagcctatggaggaagtggaatgtttaacagtgctagatgaaggagtggaaaggcagagggttttctccttctccagggatggggcagttgggccgaggtccaagttggttttttccagatttcctctccctttctttataagtattttggttttgacagctgttgtatccccaagagtcacagaagtaatatcagtcccagaatcatgtgatgaagacttcttccgccctgttgcttttttggcagaagatgaagtggcaacatcttcaccaacaaccttctctttggaaaccctacccacaggatacaaagcagaactactctgaatttctgatccctttttccttttctctttccttgactcccgcttattctccttttctctctcccggtctctctctctactcttgtccttctccacgctcttgtcagcatctcgatctttggacagctcctcgggggccttgtctttatttctccctctttcagtctgagagcctggggtaaaccaagggaagagaggagtaggactacttgatgaaaatggctctgccggagcactagtctgcttccttggtctctgatttttctctgcagattccccagactgagtcagggaatgagaaggaaaagtaaaagttgggtttaaggcactagtggcaagaggactaacagaaatgcttaacgaggaagagacagaagacgggggggtgagaggtgagagctcagaactactaagccttccacttcttgtcctcatggagtgagaaggagatcttggttcagatcgaataggactaaacacttttcttttcctttttctattggatactcctgaagaagatgttccagcagaagttcgattactaggcaaggttacagactcaaatattctagagtgagcctcacttggagtaaatcttggagctctcagaagagggctccttttgtgcatatcaaaccttgttccagaatggagtggcgaaaacaatcgggctgaagcagcggtaccagatgcagaaaaaccagatgcaaagccaacgtcctcgggagttagtggagggggtcggaaattatcaaatattggtttgcgaataagaccttctttggcatactttgctgaggaaaagtattgtggctctgacctagaatgctttaaagaagtccacctaaatgtcggttctcgcaaaatagattttcgcttcccttgcataggagcagtggaagcaggcaaaaatggtgatgctaaggggattgttggagcataagccaaaggggattgttggaggcataagccaaggtgtgtggtcagagatactggaggctggctgcagtggtggcggtggagtcagcagaggtggaggtggagacgaggaggtctgctgctggggggcactttgtagagttgataattttttcgtcgttctagatccaaaacttctctccgacactgaataccttctgcttctcctatcattactctcattttctggggactgggaaatgggcagtggaggatgaacttcaggggtatcgctccgctcctcaggaagtacctgaatctcctcagaagcctgagagtctgtggaggtatcaacactggggctactagatcgagaggagtctgaagacatttgagaggagtgctgagaagctgcacttgatttttcagaagatccacaggacggggcactgaatctactattcggtgtagactctaatcgggcaattttaattggagggtcataatcctcatcctctataaaccgccgaggggtcttaatgatccgcgaggagatagcactgacaacaggcatgatgaactgtcgaatatttttgacctgtgtcttcacctttcttccctgcagctgagctgcttctttttcaattttcttttgagcccccttttttgccctctgtaagagttgcttagcaatggttgcatctgtcctttttgaagaaggaataatcctaactggcttaatccttcgagggctttgtctgacaactgtcttatcttcttttgtaagtggaggtgttccttccttgtctttccggactttctggggcttttccagttcagaattaatgaggagacccgaaggggtctttatcctttctgttgatggaggccttcctctccgtcgtacaatttgtacccccttccttcctatttgaagcttccctgtcttaaacttagacttgagaggagagagtttacctgctcttaattttttaatctttgtggcttgctgaaacgtagcagaaggtgtccttttaatttttttcaggctatcttctttgtttccctttggtaactctgaaatgtcctttccatgtgttattttgatttttactccagggaaggtgggaggtcttcctctcttcttttctatacttttagaatctttcttcttgatcttatctccagatttggtctctgatttatttagaggggaaaacacagatggatctgagaggatagctgaatttcggtcagagccacttctaggtctcccacgaggttttcgaggactagttttaactgaaggagaccttgtgggacttcgcactctgacttcttcatctgagccaaaacctaagaattgctcatcatttaagcaccaactccatgcaagtaacctgaacggttcagtctttttgtcatgtatgtggcctttggttctccaactacatgggatctgtgttgttagctctccgctgccgcctcccccgccgctctccccaaacacggcccggaaccggcgcaggttggtgccgatggcggccgagacctgcagcgccgcgtcgaagcccgggcccacccggagcagggccggccctgaagaggctgaggacgatgacgaagacgaagacgaggcggacgacgaggaggctgctgaggcggcggccgctccccctggaaccccagccccgctgcttcccgccgccgccgccgcggccgccacagccgggggggaggggggcgccccggggccgccaccgccgaccgggggcccggggggaagcagcagggccgggacgcgttgccgcgggccgccccctaggccccggcgccccccgccgccgccgcccccggtggtcccgggtcgggcggggaagcgccaccgacagctgtgcgccatgtta

SEQ ID NO: 54880 - DNA, 1416 bp, Homo sapiens
  misc_feature (1)...(1416): n = a,t,c or g
ttttttttctaactgtgtggaattacagaaacatcgtgtgaatatttttatatttggatggattcataagaatttgttaccctttcaggatggttcttgcctagttatgtagatacaaaatatgatctgtgcttatttgtaagtgaagtaaggtacatcccagatagagtactaggaactgaaactgcctttgcaaaaattataacagtgagaaaataatggcagtgaaagaaagctgatctagccaacctccctcttgcctttagctttcaagctgcttttacttattcctgggtttaagccaagctacatgtgggagtcatttagttgatagtttaaattataataacccttccccgaaactcaaccacccttgtaatactgagagaccaccaggctaggaggaggagaggagcctaaattctgctaaggtgtagacaaaaacaattgtgaggcgttattccagaagccacngagatatgcaacttcctcagttacccctgcagataatgttacttttgtagaacctaggattggccttctgagatatcttctcaggattttgcatgtctgatgaccgatggctccaccgggacccagcaacggcttctgtgtccccacccagaagcgactcagagaaagaggacagcttcgacaccctatgatttcatctctgacccaaccaatcagcactccccataccctagcctgctacctaccaaattacctttgaaaaatccctaacctccaagccttagatgagtttgatttgagtaataactctgcctcccacatggtgtgggctgggcatcatgtcaattaacctctttctttactgcagtgccatggtctccatgaactgatttttttgtgcagtgggcaggaagaacccatcgggcagctactcaggaggatggggccagaggatcgnttgagcctaggtgtttgacannnnnnnnnnnnnnnnnnnnnnnnnnnnnnnnnnnnnnnnnnnnnnnnnnnacaaaataaaatatacaatgcattattatttaatacagtcattattctatgcaataaatcactaaagcttatttttcctgtctaactgaaactttgtactctttgatgaacttctccgctttccccatccaccccacttccctggattttattaaattaaattgtattatattgaatttaccagaattaatcactacattagaagaaactccagtgggtattcctaaaatcatggagaagtagatagatttaaaagcaaaagaaatgctgcaatttcttcagagttcataagagaacttctattggagaaatggaaaatttgagctggctaagccttgagacctcccaagactaagttataggagtttagccttctaaactacctcgggtacagcctggcttaatttttaattt

SEQ ID NO: 54881 - DNA, 415 bp, Homo sapiens
cggccaagtagagctccgtcctgacgcgccgcctcccgtgggctccggccggctaagccgcggcggacaactatgctgaaagccaagatcctcttcgtggggccttgcgagagtggaaaaactgttttggccaactttctgacagaatcttctgacatcactgaatacagcccaacccaaggagtgaggatcctagaatttgagaacccgcatgttaccagcaacaacaaaggcacgggctgtgaattcgagctatgggactgtggtggcgatgctaagtttgagtcctgctggccggccctgatgaaggatgctcatggagtggtgatcgtcttcaatgctgacatcccaagccaccggaaggaaatggagatgtggtattcctgcttttgtccaacagccgtccttacaggca

SEQ ID NO: 54882 - DNA, 377 bp, Homo sapiens
gttgggtttctgctgggcagctgtggagtcttcttggccctgaccacagacgcttgtcagaaaggcctccccaaggcacagacaggagaggtggcagctttcaaaggttggcccccgctctcctggctagtgattgatgggaagcatctagccaagcccccaaaggactggcaccctctggcccaggacacagggactgggactgcctacattgagtataaaaccagcaaagaaggcagtacggtgggggtcacagtgtcccacgcatccctgctggcacagtgccgggctctgacccaggcgtgcgggtactcagaagctgaaacattaacaaacgtgctggatttcaaaagggatgctggtctgtggcatggcgt

SEQ ID NO: 54883 - DNA, 364 bp, Homo sapiens
gtttttgggaacacagaccaagtctagattattatttatgtgtagtccagaggctggcacttagtaagtgttaaatatttgttgaatggctgaatgcaaatgccagctcacatgcattctaaattattctgcaaatggaacaagaccattcccctgtttaaaatttttacctgaatatgaatgtagagaaactttccagagttgtttgtctttccatttggtcagatcttattttatgacttttggcaagattcgatagattatttataaaagtcctaagcctgccttgttaaatttctcctgaaatattttactcagtttgtcttgtaaatgaaacatctcccatttccatttcttttctttt

SEQ ID NO: 54884 - DNA, 149 bp, Homo sapiens
aataccaatccgcagctttttgaaagcacgtatcttgtaatttggtaccttggtaccttactctaatttagttcagctctcagtgagacatccccctttaaaaacacatcgcctgaccatgttttatattccaaatataattgtattgg

SEQ ID NO: 54885 - DNA, 68 bp, Homo sapiens
gggaggaatatgataatctgaagatgtatcgactataaatcctaaagctgtgcaaagactagggggcc

SEQ ID NO: 54886 - DNA, 342 bp, Homo sapiens; identical to SEQ ID NO: 42368

SEQ ID NO: 54887 - DNA, 162 bp, Homo sapiens
agcacatccaataatccttaaagtttcgttggcagatagggatgccatttgaaatctttggcagatacctatagttgcctcatagtacatacccttaggattttcagcaaagccatgccatgctctgtggatatctactcctcttttgaaaaaaaaaaaaaa

SEQ ID NO: 54888 - DNA, 1916 bp, Homo sapiens
  misc_feature (1)...(1916): n = a,t,c or g
cgaccattgctggtgtaaattccctctgcacccttctccgggcagtgctctttgcagcaggcacccttcaagcagctgccactctgcatcgccgcctgctgcatcgagtccttatggcaccagtgactttcttcaatgccacacccacgggccggatcctaaaccgcttctcctctgatgtggcctgtgcggatgacagcctgcccttcatcctcaacatcctnctgggtcaacgcggcaggcctgctggggctcctggccgtgctggggctctggcctgccctgggctgctgctcctgctgccgcctttgagcatcatgtactatcacgtggcaggggcaattacagggccttccttcaaggggagcttgcgggcgcctgggcagcctcaccctgtctccactgtatagccatctggccgataccttggctggcctctctgtgctccgggccacaggggccacctacaggtttgaggaggagaacctgcgactccttgagctaaaccagaggtgccagtttgccaccagtgccacaatgcagtggctggacattcggctacagctcatgggggcggcagtggtcaacgctatcgcaggcatcgctctggtgcagcaccagcagggcctcgctaacccagggctggtgggcttgtcgctgtcttatgccctgtccctgacgggcctgctctcgggcctggtgagcagcttcacacagacagaggccatgctggtgagcgtcgagcggctggaagagtacacctgtgacctgccccaggaaccccagggccagccactgcagctgggcaccggctggctgacccaggggggcagtggagttccaggacgtggtgttggcgtaccggccagggctgccgaatgccctggatggagtgaccttctgcgtgcagcctggagagaatttgggcatcgtgggccgcacaggctccggcaagtcttccctgttgttggtgctcttccggctgctagagcccagttcaggtcgacgtgctgctggacggcgtggacaccagccagctggagctggcccagctcagatcccaagttggctatcatcccccaggaagccctttttgttcagtgggactgttcgggaaaacctggacccccagggcctacataaggacagggccttgtggcaggccctgaaagcagtgccacctgagtgaggtgattacatccatgggttggtctggatggtgaactgggtgaagggggccggagcttatctcttgggcagtaggcagctgttgtgtttggccagggctctcctcacagatgccaagatcctgtgtatcgatgaggccacagcaagtgtggaccagaagacagaccagctgctccagcagaccatctgcaaacgctttgccaacaagacagtgctgaccattgcccataggctcaacacgatcctgaactcagaccgggtgctggtgctacaagcggggagagtggtagagctggactcccccggccaccctgcgcaaccagccccactccctgttccagcagctgctgcagagcagccagcagggagtccctgcctcactcggaggtccctgagcccaatcccacaccctgcagagttctcccctctctctgatccaggccgggcctatacagaggtgctggctgcttgtttacattctcctctggggctctacctctccacacttccccagaagggaaaagggcaccctggattactctttggaaatcactccttggtgggcagcatcctgaggcttccccagaaccaggcctctgctctggccctcttgcatctggaacgccaggtgggtttttctggcataggagcccacttgcattttcatagttttatttgataaaattccatcttacattctgtgtattaaaaaaataatatttctggtg

SEQ ID NO: 54889 - DNA, 468 bp, Homo sapiens
aacaaacccaaaccaaaacagaccccggtgactactgagtgatgactacaaggttcatttttgagcccttaaggaagaatcacaggctaaaggttaagaacctcagactagtattctttagcagggacagtgtcagagcaaaaggtctttggtttatcctttgatagtaggcctgtacggtgttattactttacacattcaggtgatgatagccgatcttctctacagggaaagaggttgggcttattctcaccatagtctatagtagcaggcacagcccttgaaaataactgccacccaaaagtgctttgattttatggaacattattatggtggaataactctggtaatatgctctaggaccattacactgccctaggtggagaagatcttgttaccatgcccaaaaggttttgtgtggtcatacggcttgtttagaggaagtcggacccgatagtgtgtaaggtt

SEQ ID NO: 54890 - DNA, 1703 bp, Homo sapiens
tctcccggctctcggtccgggacgtgcgcttccccacgtcgcttgggggccacggcgcggacgccatgcacacggaccctgactactcggctgcctatgtcgtcatagaaactgatgcagaagatggaatcaaggggtgtggaattaccttcactctgggaaaaggcactgaagttgttgtctgtgctgtgaatgccctcgcccaccatgtgctcaacaaggacctcaaggacattgttggtgacttcagaggcttctataggcagctcacaagtgatgggcagctcagatggattggtccagaaaagggcgtggtgcacctggcgacagcggccgtcctaaacgcggtgtgggacttgtgggccaagcaggagggaaagcctgtctggaagttacttgtggacatggatcccaggatgctggtatcctgcatagatttcaggtacatcactgatgtcctgactgaggaggatgccctagaaatactgcagaaaggtcaaattggtaaaaaagaaagagagaagcaaatgctggcacaaggataccctgcttacacgacatcgtgcgcctggctggggtactcagatgacacgttgaagcagctctgtgcccaggcgctgaaggatggctggaccaggtttaaagtaaaggtgggtgctgatctccaggatgacatgcgaagatgccaaatcatccgagacatgattggaccggaaaagactttgatgatggatgccaaccagcgctgggatgtgcctgaggcggtggagtggatgtccaagctggccaagttcaagccattgtggattgaggagccaacctcccctgatgacattctggggcacgccaccatttccaaggcactggtcccattaggaattggcattgccacaggagaacagtgccacaatagagtgatatttaagcaactcctacaggcgaaggccctgcagttcctccagattgacagttgcagactgggcagtgtcaatgagaacctctcagtattgctgatggccaaaaagtttgaaattcctgtttgcccccatgctggtggagttggcctctgtgaactggtgcagcacctgattatatttgactacatatcagtttctgcaagccttgaaaatagggtgtgtgagtatgttgaccacctgcatgagcatttcaagtatcccgtgatgatccagcgggcttcctacatgcctcccaaggatcccggctactcaacagaaatgaaggaggaatctgtaaagaaacaccagtatccagatggtgaagtttggaagaaactccttcctgctcaagaaaattaagtgctcagccccaacaacttttttctttctgaagtgaaagggcttaaaatttcttggaaatagttttacaaaaatggatttaaaaaatcctaccgatcaagatgagttcagctagaagtcataccaccctcaggaatcagctaagtaattattacttgattcttttagcaaatcaatgcacgttatcctacttaatccttaaataagtttagatttaactaacccaaagtccaggaggatgttcttacaaaaatagctatatcaagggctggcacctagacattaaactgtaatttgaaaataagcaacgtgttgcataacttgttggaataattccttgttctgtttaacacttgtcataaattagcagaataaaaatagtcgtgc

SEQ ID NO: 54891 - DNA, 1512 bp, Homo sapiens
tgacgcgggaggctggtcctacggccctggattcgggagctgattctggggtcagagacaccctccagtccacgagccgggcagctgcttgagggactacaggacgccgaggccgcggtcgggcccaatcccacgcccctgatacgtccgacgtcggggccacgctgcttgtgtctgacgggacccacagtgtccgatgcctggtgacgcgggaggccctggacacctcggactgggaggagaaggagttcggcttccgcgggacagagggccggctgctgctgctgcagggactgcggggttcatgtccaggtcgctgagggcggcgcgcccgcagaagttctatctccaggtggaccgcttcagcctgctgcccacggagcagccccggctacgggtgcctggttgcaaccaagacttagatgttcagaaaaagctctatgactgccttgaggagcacctttcagagtccacctcgtccaatgcaggcctatcactgtcccagcttctggatgaaatgcgggaggaccaggagcatcagggggcactcgtgtgcctggctgaaagctgcctgacactggagggcccttgcacagcaccccctgtcacccactgggctgcctcacgatgcaaggccacgagttcatgtcccacagggagaagctgtgtacactgtccccagctcaatgctgtgcatctctgagaatgaccagctaattctgagctctctaggcccctgtcagaggacacagggccctgagctgccccaccagacccggctctgcaggacctatctctgaccctcatagcctctcctccttcctcacccagttcctcaggaaccccggccttacccggccacatgtcatccgaggaaagtggtaccagcatcagccttctgcctgccctgtccttgggctgctccagacccaggggcagagaaggcaggctcccagccctcaccagccatctgctcaggcccctgccaccctggacccccaggtccccacacgccagccgtacccccagctccccactccagagctgcactcccagtctctcaccccggtagccatgtccccagtccacaaccaggctcttgtgaccaggccccagaaacctagcctggagttcaaggagtttgtagggttgccctgcaagaatcggccgccttttcccaggaccggagctaccaggggagcccccaggagccctgctctgtctgggaaccccccaaagaggcatcgtgatggttctgccttccagtatgagtatgagccaccctgcacgtccctctgtgctcgggtccaagctgtcaggcttcctccccagctcatggcctgggccttgcactttctgatggatgcacagccagggtctgagccaactccgatgtgagacgtcacgcaggacagataccgctccacactctgcttcctttgagttttttaataaaataatctcatgcggcaggagaggagaggataagggaaaaaaaaaaaaaaaaaaaaa

SEQ ID NO: 54892 - DNA, 335 bp, Homo sapiens; identical to SEQ ID NO: 43969

SEQ ID NO: 54893 - DNA, 5158 bp, Homo sapiens
  misc_feature (1)...(5158): n = a,t,c or g
gtctgctgttgcttcagctcagaaagtcctggcagaactggtccacagggagacacaagggccacccagaccaggggtggaggcttgaactttggcaagccacagtcctggctccagactatgctgtcttgctccttggagcactcatgtgctcgaacttggcccaaggagtactaaagcctccctgcgccttgcaggcagttcagtcaccatggagaccctgtgtattctcaacccaatatgcctgattctgattgccaccagagctgagcccatctaggctcaggagcttcaaatgatggccttggcccagaccatcagtgtctcgcttatatcaacttttgggttctcaactggaaataagcaaagcctgcagatgactccagcagtaactcaccggaagcctcctttcagccgaggttgacatccactgttggctttataaccttcctactgatcataaaccaaatgtgatggggagctaggactccttcacctctcttccctttagtagtagagatgagccttggtggaagccatttgagggtttatttagtcatttcctccatcgctgtggggaccagagtcctggcgggaagaggagggccagctctgggaatctgttgagaggcagcttttccattgttgagttgcttaagatcactggggccaaaacatagaccagcactttgctaccatagagtagaagaaacccgaggtgacatgacagcaggaaccgtacttaccaagcatacagacacgcactgaagcaactcacatgggccatctcatgtaattcgcatgcagccccgtcagggtaggtacctttatgatcaccacttttacccacgataaaacaaatcctttggaaagttttgttacttttgaggcgaaacccatttcactgtgctttagactcttgagttctagtttgtccatgaagtcacacagaagtcaccctttccttgcggtggcaacaggagcactggctctggaccaggcactgctctgaggactttacatgtctcggcctcctttgccccccagctgctggcctgtttctccccaggcatggtcttcagacccttcaccttctctgaccctcttctgggcccacttgggtttctcagagccctcccctcggaggtgatactcagaattgcctggaacagacccggcctggtggaaacgtgggcggcacatgcagttcaagtcactggaggctcacggctaacttgtttgccagaacctttggacgttttccacaaactgctgccgaggcatgtcttctggcagtgttggtggattttagcctttgaacgcaaaccagggccttctgatttgatcttaccagtttttgcccagctgtctgtcctgcattttcagattttggtgtgagggtgggtggggtagagaggtagcccagaattataccagccactgatgtaggttgtcagctcaaggcagaccactgctcagtggccacatgccagcagagtgtgtcatctgtctgtcccccacgagtggtgcttctcacccagcgaggcactctcttggcttgggcctaggaatttgcaatggacgtgccccttctcccactctcctccaggcagttctgggcgccaacgatcctgagaagaatttcttaaccacagccatccgccctcatggcattttcggcccaagggacccgcagttggtacccatcctcatcgaggcagccaggaacggcaagatgaagttcgtgattgggtgagtcagcccacagcggctcttccctagtccttcctggtccatgctcgcattcagagagcacttggcaggagccacatggcattgtagctcttttcttatgtgactgtcttggtccatgcaggctgctgtaacaaaatacctaagactgggtaacaaacaacagagagcttggaggctgggaagtccagatcaaggcgttcccagactgggtgtccattgaggccctgttcctcatgagtnnnnnnnnnnnnnnnnnnnnnnnnnnnnnnnnnnnnnnnnnnnnnnnnnnnnnnnnnnnnnnnnnnnnnnnnnnnnnnnnnnncccgagggcagagcccccatgacctaatcaccccctaaaggtccctcttcacagtaccattgcactggaggttaagtttcaacatatgaatgttgcggggatgcaaagattcaggcgatagcagtgaccttgtccgctgtcctctgtattcatttcttgtagttgccataacaacctgccacaaagtaagtgcttaaaacaacaaatggattctgtcacattttgggaggccagaagtcctcagttaagatgttggcagggctagtgtcttctggaggttcgcagggagcgtctgttccaggcctctgccctagcttctgctggcttccagccatccttagcattctgtgcttggagaggcatcactcctgcctctgcgtccctttcacatggctgtgttccttgctttctgtgtccaaatttccctcttataaggacatcattcccnnnnnnnnnnnnnnnnnnnnnnnnnnnnnnnnnnnnnnnnnnnnnnnnnnnnnnnnnnnnnnnnnnnnnnnnnnnnnnnnnnnnnnnacaaggcccaagtggacagaagctttgggaggatactgttcaatccagtgtaccctctcaggtaggctgggaaggtatttgtgaccctgtttggaaattgaagaaaccgtgactcagagggaaagcaatgggccccgggtcaaaggccagggcttgactgtccttgcatctgggaaggcaggcgggggcattacttttctcctcgggttaagtgcaggtggaggggcctccacaggggacaacagtgtgcctctctcccaaataggctttctcttccttcatttcctccttttctcctctctctcttccttcctttttccctctgccttgccttcctgtttctcactcagcctcactgctaccctgacttgtcaccttgaaggattacagggagactggtcaataaacggaggaccagagcaaggcgttggccccgtgtctcctgggaaggggctgaaaagctgctacccaaatcgggacaggagagacagcaccagtgttggccatgctggaatgggtgggcaggtcccccagctttcagattccactaaccctgaagacccaggagtcccggcccagtgtacatctttaaccagtacaggcatccatgagtgcctgggccggccttgccaagtgaggtggcagccattctgtaggtcacagtctctcaaatgccaagacttgggagtggccctggccttcgtgcaggggctcccagcacgtattccatcatcccttgtgcacctgcagaaatgggaagaacttggtggacttcacctttgtggagaacgtggtccatggacacatcctggcggcagagcagctctcccgagactcgacactgggtgggaaggtaaggcctgctgcaccggtccctgcacaggtgcctttctgcgggtttcttctccttgccattggatttgctggcaagttgctcctgtgatcctgtatcatggaggatctgccttaggaccccctgtgccaagatcaagcccctctgatagagcatgtggtgtcactgcagcgtcacatcacttgggcagccaaatttggagagctgatgagctgggattgaacagacattcaggtcacggtcatctatggtcccctgacctggctgcccacctgttggcatggctccttgtggcaggagcccacgtagattgggcagggtgcttgctcctcaccctttctcccactcattcctcaggtctctccctcccttgctgtttggtcctcttttattctcctgaacctctgccgttttcccactgataaccttcaaataagttgggaatagggtgggtgtggcannnnnnnnnnnnnnnnnnnnnnnnnnnnnnnnnnnnnnnnnnnnnnnnnnnnnnnnnnnnnnnnnnnnnnnnnnnnnnnnnnnnnnnnnnnnnnnnnnnnnnnnnnnnnnnnnnnnnnnnnnnnnnnnnnnnnnnnnnnnnnnnnnnnnnnnnnnnnnnnnnnnnnnnnnnnnnnnnnnnnnnnnnnnnnnnnnnnnnnnnnnnnnnnnnnnnnnnnnnnnnnnnnnnnnnnnnnnnnnnnnnnnnnnnnnnnnnnnnnnnnnnnnnnnnnnnnnnnnnnnnnnnnnnnnnnnnnnnnnnnggtgtggcttttgatttaaaacaagcagaacaccgtcaagaaatgtaatatgaggaattcattgcatccaaagatatgtagatgagttttatgatgattaacaattatcaaattaacaaatgtgcctttccaagtgcaatctatgcttcatttaaaatcctggcccatagatgaaactttcattgtctgccctttctatgccttagcagttgtgcaattgagggcaggccacgtggaaagctgcagcaattaggcagtgagaatgcgatctgcacgggcttaatagatgcttcaactttgggcaggtgggggtggtgtttctaacttcttgttcttgttctcccgccaggcatttcacatcaccaatgatgagcccatccctttctggacattcctgtctcgcatcctgacaggcctcaattatgaggcccccaagtaccacatcccctactgggtggcctactacctggccctcctgctatccctgctggtgatggtgatcagtcctgtcatccagctgcagcccaccttcacacccatgcgggtcgcactggctggcacattccactactacagctgcgagagagccaaaaaggccatggggctaccagccactagtgaccatggatgatgctatggagaggaccgtggcagagctttcgccacctgcggagggtcaagtgagggacactggaggctgggctctctcgacacgttgctcagccagtcactccttcccctgtggattgatgaaataacatcctttgaatgagtttgctctgagcctgtgactccttctgctaggcagagagcgcaccctactctttccgtgacgatgagggcggcaaaaacagacatttcttccttcatggaactggatttggatttcttgaagcaggcagcttcatattataccgatttgttctctgtcaa

SEQ ID NO: 54894 - DNA, 1500 bp, Homo sapiens
agggaatgaagagcaagcgccatgttgaagccatcattaccattcacatccctcttattcctgcagctgcccctgctgggagtggggctgaacacgacaattctgacgcccaatgggaatgaagacaccacagctggtgggaaatctgggactggagggggctgatttcttcctgaccactatgcccactgactccctcagtgtttccactctgcccctcccagaggttcagtgttttgtgttcaatgtcgagtacatgaattgcacttggaacagcagctctgagccccagcctaccaacctcactctgcattattggtacaagaactcggataatgataaagtccagaagtgcagccactatctattctctgaagaaatcacttctggctgtcagttgcaaaaaaaggagatccacctctaccaaacatttgttgttcagctccaggacccacgggaacccaggagacaggccacacagatgctaaaactgcagaatctggtgatcccctgggctccagagaacctaacacttcacaaactgagtgaatcccagctagaactgaactggaacaacagattcttgaaccactgtttggagcacttggtgcagtaccggactgactgggaccacagctggactgaacaatcagtggattatagacataagttctccttgcctagtgtggatgggcagaaacgctacacgtttcgtgttcggagccgctttaacccactctgtggaagtgctcagcattggagtgaatggagccacccaatccactgggggagcaatacttcaaaagagaatcctttcctgtttgcattggaagccgtggttatctctgttggctccatgggattgattatcagccttctctgtgtgtatttctggctggaacggacgatgccccgaattcccaccctgaagaacctagaggatcttgttactgaataccacgggaacttttcggcctggagtggtgtgtctaagggactggctgagagtctgcagccagactacagtgaacgactctgcctcgtcagtgagattcccccaaaaggaggggcccttggggaggggcctggggcctccccatgcaaccagcatagcccctactgggcccccccatgttacaccctaaagcctgaaacctgaaccccaatcctctgacagaagaaccccagggtcctgtagccctaagtggtactaactttccttcattcaacccacctgcgtctcatactcacctcaccccactgtggctgatttggaattttgtgcccccatgtaagcaccccttcatttggcattccccacttgagaattacccttttgccccgaacatgtttttcttctccctcagtctggcccttccttttcgcaggattcttcctccctccctctttccctcccttcctctttccatctaccctccgattgttcctgaaccgatgagaaataaagtttctgttgataatcatcaaaaaaaaaaaaaa

SEQ ID NO: 54895 - DNA, 1476 bp, Homo sapiens
atcccggacttcccagagcctgcctggagcgcgtactcagcggctctcgggtcccagcgtcccagccgcggcccgcgctcctccgccccgctcctcctcctcctcttcctcctcctcctcctctctaggcacccccgtcccctccttccagcggctgcagcccccagccccaactctccgcgcttactcctgggacgcgcgtcctcgccccatcctttgcttccttccttccttccttcttccttcctcccctggctcccgccctccctctccaggtcgccctcccggggcccgattgtctcggttccccgctgccggcccgcgccctgccccgtctctcccttgcacttcctgagtcgcccgccgccgccgtcgcagactcgccgcgggagccccagcccaacccgagcccgacagccactgccccggctccagctccagccccacagcccgcggcgcccgcccgagggagccccggcgcccggggaaggctccagtgggctagcgcgccctcgcccagccccgcgccccagccctgcccggcccggcgaggaaggaccgggaagatgaacaacggcggcaaagccgagaaggagaacaccccgagcgaggccaaccttcaggaggaggaggtccggaccctatttgtcagtggccttcctctggatatcaaacctcgggagctctatctgcttttcagaccatttaagggctatgagggttctcttataaagctcacatctaaacagcctgtaggttttgtcagttttgacagtcgctcagaagcagaggctgcaaagaatgctttgaatggcatccgcttcgatcctgaaattccgcaaacactacgactagagtttgctaaggcaaacacgaagatggccaagaacaaactcgtagggactccaaaccccagtactcctctgcccaacactgtacctcagttcattgccagagagccatatgagctcacagtgcctgcactttaccccagtagccctgaagtgtgggccccgtaccctctgtacccagcggagttagcgcctgctctacctcctcctgctttcacctatcccgcttcactgcatgcccagctctgtgaaggtcagactgtgaggagaagccaccccttgagcgctccgtctcctgataagtgccagcctggcctggtttcctgtttgatgcgctggctccctccctccgaggctacttctcagggctggaagtcccgtcagttctgctgaatactatgtcccaggtgtgtgatggcggctgcaatctgtcttgtgggtattaatgcaatcttcagtggtggctactgttctctagctgttctacaaaactggagcatgctggcttgaaaaacccttgcccagttttgatcccttcaagactttgtcacagcctctatcacacatctgtttttctcgaagaaaaaaatataattaataaaaatgttttactcttttacactgt

SEQ ID NO: 54896 - DNA, 360 bp, Homo sapiens
ggacatcagagtgttggggcgcaaggagctcaggtcgctactaaactggagaacaaaacttcggcgatatgtggccaagaagctgaaagaacaagcaaaggcactggacatcagcctcagctctggagaggaagatgaaggtgatgaggaggactcaacagctggaaccacaaagcagccctctaaggaggaggaggaagaggaggaggaggaacaactgaaccagaccttggcagaaatgaaggcccaggaggtggcggaattgaagaggaagaaaaagaagctgttgcgtgagcagagaaagcagcgggagcgtgtggagctgaagatggatctgcctggggtttccattgcagacga

SEQ ID NO: 54897 - DNA, 422 bp, Homo sapiens
  misc_feature (1)...(422): n = a,t,c or g
catgaacccagccttcccacactgctgcgttatgttattccatttcagatctcccccttttgggttggatagcactctcgtagttcactaaagccgagacgaagctgggattaaggtgccacctagagccaaaagacgccagtgacctagtggtaaagaatctctaagaaaatatatctaataaaaaccgaaacaagccatagagagaagcctggaataaataaataatccttcaatgcaaagacaaagacatacaaagaagcaacagcaaacagggacctatgacctccccaaatgaacaaagcaaggaaccagngactgaccctaatgagagagtgataaccgagagctctttgacanagaaatcnangtagcagttntaaggaaacagtgatctccnngatgacacagaanagccattc

SEQ ID NO: 54898 - DNA, 671 bp, Homo sapiens
gcgaccatcgagaaggtccggagatgggagaagcgatgggtgactgtgggcgacacttcccttcgtatcttcaagtgggtgccagtggtggatccccaggaggaggagcgaagcgcgggcaggtggcggggcagagagatcccgtggccgggaacgtcggggcaggggcgccagtcccgatgggggtggccctctcatcctgctggatcttaatgatgagaacagcaaccagagtttccattcggaaggttccctgcaaaagggcacagagcccagtcctgggggcaccccccagcccagccgccctgtgtcacctgccggacccccagaaggggtccctgaggaggctcagcccccacggctgggccaagagagagatcccgggggcataactgctggcagcaccgacgaacccccaatgctgaccaaggaggagcctgttccagaactgctggaagctgaggcccccgaagcttaccctgtctttgagccagtgccacctgtccctgaggcagcccagggtgacacagaggactcggagggtgcccccccactcaagcgcatctgcccaaatgcccctgacccctgagaagccggcctgcctgtcctgttcgcccaggggcccctttggctttttacaaataaagacccttttgtaaaaaaaaaaaaaa

SEQ ID NO: 54899 - DNA, 613 bp, Homo sapiens
gatacaagagatgtccttcatctaggagatggctgctgaagtattgaagggtaaagtgtcctgtgcttataactggctttcaaacagacaaacaaaaaaagctggtccaaaatggcagtggcaatggatgcggataccccaagaagtaccaacagcagtgctttgaagtaaaaaagtgaaatgcagtagctagccctctgggcttgggatgttgtggttaataactgtgccatctgcaggaatcacagcatggatctgcattgaatgtcaagctaaccaagagtctgccacttcagaagtgtgtaccgttgcacggggagcctgtaaccgtgcttttcacttcactgtctctctcactggctcaaaacacaacagctgtgcctgttggacaacagacaataggaattcccaaagtatggacaccagaaaaagaattcttccatcaagcttaactgttttgtgattcatttaatgacttgcccttctgtcacttaattataaattagatagaactgtgtcttttctgctttgtctttgccatttgctgttctcgcagccacattgtattctgtgtcaaataaagtccagttggattctaaaaaaaaaaaaaaaa

SEQ ID NO: 54900 - DNA, 2491 bp, Homo sapiens
  misc_feature (1)...(2491): n = a,t,c or g
gaagaaaggcgatgctaagaaacgtgctgcaggggaggctggcacattctgctccttagctaaccgcacaggcccatgggtccacacacatcagaccatggctctctgtggtctatctttgccattactttaaccaggctgtttctcatgcgctcatggagggtgactgaagatgccaccccgaggtgcaccctcagcctcgctggacacttacggctcgcattctccagccggaccaggcagttgaggaagtcatcgaagtccagctggagctcctcatccgcatacctgagcacaatcagctgcaggaggtggctgctcagctgaaaancctgtggggacaaaggaggagacccaggactcgctgtatccgagccccgagggtatgcggaagcgaggcaccccagtctgagatggctcctgccggtgtgagcctgagggccaccatcctctgcctcctggcctgggctggcctggctgcaggtgaccgggtgtacatacaccccttccacctcgtcatccacaatgagagtacctgtgagcagctggcaaaggccaatgccggcgaagcccaaagaccccaccttcatacctgctccaattcaggccaagacatcccctgtgggatgaaaaggcccttacaggaccagctggtgctagtcgcttgcaaaacttgacaccgaaggacaagtttgaggggccgcaatggttcgggatgctgggccaacttcttggggctttccgtatatatggggcattgcacagtgagctatggggcgtggtccatggggccaccgtcctctccccaacggctgtctttgggcaccctggcctctctctatctgggagccttggaccacacagctgacaggctacaggcaatcctgggggtgttccttggaaggacaagaacttgcacctcccggctggatgcgcacaaggtcctgtctgccctgcagggctgtacagggcctgcttagtggcccaggggcagggcttgatagccagggcccagctgctgctgttccacggtggtgggcgtgtttcacagccccaggcctgcacctgaagcagccgtttgtgcagggcctggctctctatacccctgtggtcctcccacgctctctggacttcacagaactggatgttgctgctgagaagattgacaggttcatgcaggctgtgacaggatggaagactggctgctccctgacgggagccagtgtggacagcaccctggctttcaacacctacgtccacttccaagggaagatgaagggcttctccctgctggccgagccccagggagttctgggtggacaacagcacctcagtgtctgttcccatgctctctgggcatgggccaccttccagcactggagtgacatccaggacaacttctcggtgactcaagtgcccttcactgagagcgcctgcctggctgctgatccagcctcactatgcctctgacctgggacaaggtggagggtctcactttccagcaaaactccctcaactggatgaagaaactgtctccccggaccatccacctgaccatgccccaactggtgctgcaaggatcttatgacctggcaggacctgctcgcccaggctgagctgccccgccattctgcacaccgagctgaacctgcaaaaattgaggcaatgaccgcatcagggtgggggaggtgctgaacagcatttttttttgagcttgaagcggatgagagagagcccacagagtctacccaacagcttaacaagcctgaggtcttggaggtgaccctgaaccgcccattcctgtttgctgtgtatgatcaaagcgccactgccctgcacttcctgggccgcgtggccaacccgctgagcacagcatgaggccagggccccagaacacagtgcctggcaaggcctctgcccctggcctttgaggcaaaggccagcagcagataacaaccccggacaaatcagcgatgtgtcacccccagtctcccaccttttcttctaatgagtcgactttgagctggaaagcagccgtttctccttggtctaagtgtgctgcatggagtgagcagtagaagcctgcagcggcacaaatgcacctcccagtttgctgggtttattttagagaatgggggtggggaggcaagaaccagtgtttagcgcgggactactgttccaaaaagaattccaaccgaccagcttgtttgtgaaacaaaaaagtgttcccttttcaagttgagaacaaaaattgggttttaaaattaaagtatacatttttgcattgccttcggtttgtatttagtgtcttgaatgtaagaacatgacctccgtgtagtgtctgtaataccttagttttttccacagatgcttgtgatttttgaacaatacgtgaaagatgcaagcacctgaatttctgtttgaatgcggaacaatagctggttatttctcccttgtgttagtaataaacgtcttgccacaataagcctcc

SEQ ID NO: 54901 - DNA, 485 bp, Homo sapiens
ctttctcttctgcatccttttatcctcaaacttagcatggattcacatgctgagtaaatgtttggttaactagtgaacattttagatagttgtgtcaaaaataagggttagggataggtaaaaccagtaatttactgttttttacagaagacatctcagcatttctttggcatttttgcacaaataaatgactatatattcaccttggccatttttttttttaagtagccctatgagctgctcattctttttcatatacaggggaagtatacagatgttatccattttacaaattgttggatcggaatttgacagaattgggactgtggaacctgggtcacttgaattttctatattttgtatggccaaatcaggaaccagacagtctccatagtctcctttgtttttatggaaaattgccatattcacatatttcatttatcctaatgtattgtcatccaaaatgaaagaggctttcttgaagg

SEQ ID NO: 54902 - DNA, 856 bp, Homo sapiens
tttttttttttttctaggcatatcaagtgttttatttagaccatttctgaggattttgctttaaaggctttacatgcagcattcaagtatctcataatataagacagtctagtctttcagagatcatgtatcatcaaggtctgcagagttttcactgtcatttgcaacaagagcctctctgttctcgtaagtccagaagccattcaaatcgattagaatggtggttactgtgtctccttgattactgttgattaaatcctgaagagagattttcaaaggatcctttggttttaccatgtcaaagatttcatccttgacatcttgaaatgaaacaggatcttgtccatggattttcattagttcctgtatggccctaaagaaataattaagtgaaaagacattcaggtatcctttgttctcaatatcaagcagtttgaaaatatattgtagagctgcaggttcctttctgttttctaatgcaaggacaaagtccaagtaggtcttatagtccatttctccatcataagtgagacactcctggaaaacacggtctaagaagacattggtcatggtagctgttccatagcgtgagagttcttctttactgagcatgccattgtgatctttatcaagattcaagtactggccataaactcttagggcagaaggagcagaaaaccaatttgtttcttgactctccttggacagttcctcatcccttagctccaataaatcatctaggaagctgcatgctaaaatatcttgaatttttatctttcctgttcttaaaggatctaaaaagaagaagaacttcctaactgctgtacaaacataaaaggagtagaaagatttttcc

SEQ ID NO: 54903 - DNA, 990 bp, Homo sapiens
tttttttttttttaaaataagattttcctctttactctcgtccttacatgtccacagacttcatgtagagaggctgagcctttcgaccacaaagtgtgttctgtgttgaagatgttataatgatgggagagggcagttgcagcagcttctaaccaagtgtctacaacacatgtactactgtttcctacctgtgtcacctctgcaaaaaatggagctctgagcccagttctgtgagcatggtgtcagagccctccaaagtcctgagaaatcaataccagggatccaaatctcagacaccagtttgaagcaatacctggataccaagactcagagtgaggatatggattttgggagctgacagttttgctgatcctgccacactggcaggggctgaagtccagaaatggtgtgtagctctagtcattcttattcaccacagctcttatttcacagttttttcccttggtttcttctgtttcttctgttcctcatattcaagtattttctgttggaaatagcctgcaggaggattcttgctcttctcggcttcctggatgaaaagtgagaagagctgtgtcttcacaaacttcttcacaaatcggcggttggtcttggaggtcagagccttacagaaggatctttcttggaagtggccttgcccatttgcctcccgcttgatataggaagcataatggcccacaatcttgacaaagaactgcacaaaggggcctgaaacatgctcgttgatttgttctgcagtctttaactcattgatcccctgaccaagagagtctaagatgtcatcctgaagcttcggtggcaggatgtctttttcatcaccaaccgacattaagaaggttccttcacaaagattgaccagcaggacctgaaataaacatagactggctttctctggtcctctttcttcatagacccccagaggatttaccgtcttgatttcgtcctgtggctgtatctttcagcggggcc

SEQ ID NO: 54904 - DNA, 661 bp, Homo sapiens
gactggaagaaaaatgtttcccaagcaaccagctttattctagctgactcactttgtactccctccttccatgtcattgctcctttttacctctttaggagtctgttaggaattttgcaacctgacaaaaggcttctgcagagccaaccaccttttttttcctcagggcctgaaaaaaaagtgagtcttcctactgacaggaaaataaaaagagaccttgttagtcaatttttttctgtatgttcaattgttctggtatattcttttccttgagtataaaggaaaagtctgaaaataatggtaaaacgtgtgagattgctctgatatttcctttttgtactttaggaggtggttctttgagttcctaagttgtttagttgaacatgaaagcaggtggcaaatgtaagtttagtctacacactgattccttcctgttcgcagaagggttcatgtgttcgtttttaaataatcttcgggtaaggaatagagaaacaccaagcccaagaggcagaaggatctgtctatagctaatgagtgagaaactaactgtgggatggtttatggtctctggctctttgaaaccacagaaatttaaagttatttttaaaaagccaacttgactgggcacagtgctcatgcctgtaatcccgaggcaggcggg

SEQ ID NO: 54905 - DNA, 1054 bp, Homo sapiens
  misc_feature (1)...(1054): n = a,t,c or g
cttaaataccatgtttgaagaacaattatttattggatccttgaatctgtaagatcaaataacaagtctctatccatgttaccaaatttaaacttttgaaaataataaactttaaaatatcagatgtgttattacaggatgatacttggaatcaagtgaaatgagttatatggtcatcactaaatttagaaatctattgtgaaacaaagacaaacaggaaagtacagaatagagacttttagtaaataaatggaatttaaaagaaagtgtttatttacagtgtcacgacagaaaaggatgtctttgttgtcatagtctttgagggatctccgtaaaatctggggcacaggtacaagaaatagccaatatttagttcccagaccatgtttagtagtgtccagtttcagatcatgctgccaagaggtatctccccctcaggtgggtcatcactgagccctggaaattggagactcatacttgccccagcacaatgttacgggcagacaggccgacatctttggttaggctggaagccataaagaaaagctgctaagtggccactaggtgccacttttctggttttggtaatgcctttcattagccagatcttttttttccaagctccatggggcctatgagaggcatttatgatttttgtgcctacaataagtcagccctgnctggtgtgagttgttttatgagaaatgccttcccaagggaggtctaggaagatcctgacacataagaactttggcttagagagctttccaggtgtagtgccaataaaaactgacctggaaagaaaacctgcccagcacggaacatgctttctgaactcacttgagagtgtatggtgtatgtcacttctcatatattcttgagtttagatttgtcttttatacaatttttagctcttttccagttcacttgtgctcgtctgtatattggtatttttaaatttttgtggtaaataatgaaaagagtgaaattatattttataattactcatttgtagtttttttttttaatttaataaacttcctccaaaaagtgc

SEQ ID NO: 54906 - DNA, 213 bp, Homo sapiens
catcgactagagcagtggctgtggttttggacccagtgtgtcttcagaagcacccagggtatcattataggctgccactatttcctggtaccacaggatatttccatatcactaccatctgggtgacagggaataataaaatttagaaactgtaactgggccggacagctattgacttggtgagttgaaactagaactatcttatgttcagta

SEQ ID NO: 54907 - DNA, 977 bp, Homo sapiens
atggtctcagctccttcttgatcctctccattttccacccaatctcctctatccctctccctttactgcctgaaatcggctgtagatgtagcagtttctggaggaaatgaagatttgtggtggttctttccagtcaccaggttgtgaaagtcttaggggtgaggggaaggaaatcccctcaaggacaagatactactaccacattaaggtcaggagttcttaaagggcgaagatttcattttattccactgccttcaggggcctgctagaggaggcccagttggtacagtaatacttattcaccaagctggtcatcgacgaaattgaggatgtcctagacggagcaagaataggcagaggctgaaggtagaggttttctttttatatatacaagacacattaatccattaaatttgaggacacagtacaaaaaaaaaaaaaaaacaaaaaaaaaaccacttcaactaattcatctgacaatgctgttcatattcatgacgccatttttttgtttgttgttgttgttgttttcctaataataaagaaggagacttagggctgttgggctgatatatgtttgggggtcccacctccccgcctcatccgtacaccaccagggtgaacaggaggaagcaaaggaagtgcagggcccatagcaaagtttcataatcttgaatgcaagaggggagaaggaatggaagggggaaaaaaaaggagaaaatacaaatcctataatacatacaacagggtggggatggtataggaatgggacagacatgaagctgaggcatggggtgggccgctgggggtggggggcagcggaaaccccccacattcctttctctttgatgctgtttccatagtttccaggctgagaagccctcttcagaagatgggaccgggagaagagggtcagggcctcagttgggcccccaagctgtagctgttgtaggcagacttgtttgggtctgggggct

SEQ ID NO: 54908 - DNA, 625 bp, Homo sapiens
gggggaagtcacccagctagcgtgggacagggtcggcacccccagcaggaaacagcagcgacgagccagagcggagtcgcctgcagctgcgcgcaggacgtgcacaggtgcgcggtacgcacaggccctagggacccggtggggatcttaagcaccaacgaacagtcagacctaactcataaacaaacatcatcacggcctgccctgtcagaagcgcagccaagcaacaacaacaacaaaaaaaggcgaggaggtagacccacttgagatggttctgttgcggagagtctctgaaatcagaaagcgccagtccgcaaaaacgaggaaacccgacgtgtccggcggaaggaaccgccagtacaaaggccctgaggcgagaaagagattggtcactgaaagaactcaaagaagtcctgtgtggctggagtatagctgcgggttagtgctggcaggtgaagacagagaagcaaacccaggtcaggtccggttgggcctcgggagggcctccgtgtggagtctgcacttcattctaagtgtatacctaacccatcgccacgatttcccctccttcacactaccctgctacgtctccttattagtcgtaataaaattatgtggctttgta

SEQ ID NO: 54909 - DNA, 74 bp, Homo sapiens
caggattacaagtgtaataagccactgtgcctagccgcaaaattatcttttaattaaaaaaataggccaggcac

SEQ ID NO: 54910 - DNA, 321 bp, Homo sapiens; identical to SEQ ID NO: 43058

SEQ ID NO: 54911 - DNA, 399 bp, Homo sapiens
  misc_feature (1)...(399): n = a,t,c or g
cggacgcgtgggtttgcaggctactaaagctgcttttactttgtaactttctttaaaataactggttttattataaagtaattgctcaggcttaaaacaatgtattgctgctttgttacaaaatgttctaaagtggaaacactgtatannnnnnnnnnnnnnnnnnnnnnnnnnnnnnnnnnnnnnnnnnnnnnnnnnnnnnnnnnnnnnnnnnnnnnnnnnnnnnnnnnnnnnnnnnnnnnnnnnnnnnnnnnnnnnnnnnnnnnnnnnnnnnnnnnnnnnnnnnnntggccgatatcttgatatcttgatatgttgctctggccccaagcgattctccaccttggcctccaaagctctgggattataggctcagccttgggctttctttaatggatt

SEQ ID NO: 54912 - DNA, 377 bp, Homo sapiens
ccgccgtcttcgagaggcgccatgtgatcgggggtgcagctgtcactgaggagatcatcccagggtttaagttctcccgtgcgtcctacctgctcagcctgctgaggccgcagatttacactgatctggagctgaagaaacatgggctgaggcttcatcttcgaaacccctactccttcacccccatgctggaagagggtgcaggcagcaaggtgcccaggtgccttctgctgggcacagacatggcagaaaaccagaagcagatcgcccagttctcccagaaggatgcccaggtctttcccaaatatgaggagttcatgcatcgcttggcattaaccattgaccctctgctggatgcggccccgtggacatggcgg

SEQ ID NO: 54913 - DNA, 441 bp, Homo sapiens
  misc_feature (1)...(441): n = a,t,c or g
tgcttttatacgacaaaatgggcgcaaggaaagagttttctttagagaaggcagaaatagaaaagagcaagttagcatttgctaaggagaaaaagctagactggataagaaaatcaagtgtagttatattaaagagattgccatacggtggaagtagatgttgttaggcctaactaagctatttggttgcagtttttttagattttagtgagtaatgttttatgagaggatctagacatttctagaattcattactcagagcaaccacatcaaataaagcaagaaaatccacagagctttacttactggctaaggaattttaattctctggtggagctggaaacagctataagatgtgaaagcnnnnnnnnnnnnnnnnnnnnnnnnnnnnnnnnncacttcngaaggctgaggtgggcatgataacaaggtcaggagttc

SEQ ID NO: 54914 - DNA, 204 bp, Homo sapiens
tataaataagctattaattgagtttttacaactggctaatgagctttagtatttagaatcaccgaactctatagagatgaactgctcttttaaaaagatcatgtgtttttaaactcaagttcaatgagcccgattatttcactagggtgccaggtgacatagtgaagaccacatattgcacagagtgatagaacgctggcaggg

SEQ ID NO: 54915 - DNA, 462 bp, Homo sapiens
ttcacatctgttcaacaacccctgagctgaaaagttgcagtgggaggcctccagctcagcaggtggactccaaaatacccctcttgtcttatccactccaggtcgggggcagggaagcacatggggctgcttctgccacgttccctccacagccatccccaaggccaggcacacaggcaccatccaagggcctgccccctagcagtgagactctagctctgtgagtctgagcagtgaggtcctgggggtggcgggagccgagggtcctgctgggttccgctggggcaggtcctcggctgggcacatgagctgacggattctctctctgaaggggcccttgagggttccgagtctgtagaggctccaggcaggaatgcagaccatggaggacagagccaggagccagcccagggcatcagccccaccacgggtacgtgtacttcttgttgtaggtcagcggag

SEQ ID NO: 54916 - DNA, 610 bp, Homo sapiens
aagtaacaaaatttcatcccaactatggtatgctcattgctaggagataagttatctttttcataagctatacaaagtacattgtaataagtgcatttaactcctgtctaggacttggataggtggaagatgtaccaggctgctaactgtcttcactgatgcatctcactgcacaccaaacactctgcatggccaacacagtgatttcatgttttaaatttgaaaacaaggttgatctcatggacctgaaagaaaagtatatgtcaaaataatctgaaagaaaaacatctattgaatgagttaaagaaaaagaacaaagttttaccatgagggggtatttaaagtagtcactgtcgagggagcactctttggcagcaagagccaggccttgtaaaatggggataaatatctgcttgaacacttcttcatcctggtgagtggttctcaccagttcctgaatgaagccatatgggagattcctacacagcatatacggcactaggaaggacggctgctgcaaggacctgggctgtgttagggagccttgtagtactaaagcagtatgggatatgcactgtgagcggatgttgctcagaagctggctgactgc

SEQ ID NO: 54917 - DNA, 94 bp, Homo sapiens
gaacagaatatattttgttccccacattgagaaattatgaatatataatttgaagaaacaagcctagggttggcacactatttttttttttttt

SEQ ID NO: 54918 - DNA, 440 bp, Homo sapiens
ggcaatccaaagactgtggggttcttcctgggaacttggagagatgggaacgttgtctgtgtgcagtctaatcatctgtatttcatgaaggtggatactggcgtgagctcacagtccgcaccaatagccaagggcacacaatggctatcatcactttccatccccagaaattaagtcaggaggagctccatgttcagaaggagattgtaaaggaatttttcatcagaggtcctggagcagcctgtggcttgacctcactttacttccaggaaagtaccatgacccgttgcagccatcagcagtctccctatcagcttctgtttggggaaccctacatctttgaagaacttctgagcttgaagatccgcatctctccagatgcctttttccagattaacacagctggtgcagagatgctgtatcggactgtgggggagctg

SEQ ID NO: 54919 - DNA, 264 bp, Homo sapiens
gcttagattgttaacattgtttggttagagtttgtgtcaagatacccttatattaatatcagagtctttacatgtatgtggcaatagttggttagaattgttttctggaaccagaatttttggttcagagagtatgcctatgtaaagttttgcattcccaaattgacctccaaaagtgcagtgataaacattctacaacacttgtttttgaagctttataatttataattacaatcatgtctccttgttgcttttattttattt

SEQ ID NO: 54920 - DNA, 740 bp, Homo sapiens
ttttttttttttgatgtgaaaaacatttataatttcttgtagttacagtgtgtatcttcattataatcattcttacaataaatacagaagtgctaaacagaccattatcacagtggcctgtgggctgaggcacaggaactgaggggtgctgcagacaccagtgcttctccagggctggccaggacaccttcagagaggctagtgaagaggagaggaatgtagggtgaatttgaaatgtgattaatagagtcaatgcagcacatgctagaaacagatacagagttttttgttgttttttaactattttaccagatgatactaactaaacaaacagaacaaagaaagagattcaagatctcacatgagtgagaatccagggccttcccctctggccctgggcccagcctgggccttgtttttgctatttccacctaggcatctgccatgcagcagagttaggagcgtgtgggcggctgctgagactcacacaccacagtactggcatccttcaggggcagctggcatcagtggaatgagtgcggatccgaagaaaggtttcccagttccaaagctggacccacaggaatcctgtgaggatttgcaaagacattgatagtgtttggttcttggagcatctttctgcctcccgggctttgtctggtctcagcctcggggctgcaatccagggctgtgctgagcagcaagaggagaggagaaatggccactgtctttgcacctcc

SEQ ID NO: 54921 - DNA, 1156 bp, Homo sapiens
  misc_feature (1)...(1156): n = a,t,c or g
ttttgaaaaaccaaatgctttaatgaggctatcaagaacaagtcgattatttcattggatacattaatatcgatccataatatacagtgctatggaccatacagaaattattgctgcatccaacagcaggtgactattattaacattacagtaccaagcatccgcaagagacagtcatttgtcattttttatcaagaaatagggctgttttatactgttattgacatcaactttttcccagtgcatttttcaaaaatattaataagttcattcctttgtgcttttaacttcctatgtattgtatttgttcttattgctttattgtttaaaaacaaccagaaagaattttgtcatcctatgtatgaccaggttgcttgtatgctttttggcaaagtcagaaggtttggtatttccattgccctactcagaggcagatggacaattttggcattttggtcactccatatagaggcccaaccccgagttacaattctgcacccgggaatcgggggagtggtgtggatcattttcttgttacaaacaacaagcccaaaccactgcctcttggcttagctagcccctaaaatgaatccacactctatttggcaaaaaagaaataaataaaaccacccccaagattgcagcattctcctgggcttgctcacctgccacctgcagaaattgtctcttaaggagaaggggagggggaggcaggcaatggcaaggttaggagttgtgacagtcagggcagtggtacaagatgccatactttctttcaacaaagctttctatatggttgcttaaccatggtcctgttcccgtggccgtaggttagtcaaccttgctttatttttaaaaaccctcaaaatcagctaaggaaaactaacatcatagcatcacgatcttcaacttttgcatccagcgccctcccccccatataaatatgaagagaaaaatagacaatgctatgattgtatcaatgaacactatggtacaattagctgttcatgcagatttgcgtcactattctaggaaaagagctatacagttaagggggttgaaagaatgggaactaattttccctacccccttaagaaataaagctataaaactgatagcatcaccaatgtntccaaggattctcattgcccagcgt

SEQ ID NO: 54922 - DNA, 389 bp, Homo sapiens
  misc_feature (1)...(389): n = a,t,c or g
ctggttttacagatgagctgaggccactcagctgaagccggacaactgtggagcggctgggccagtgtgcaataccaggtctgagagctgagcccgaggacctgagccctgcacccctgggctggagagagcccacaagcatcaccccttccaggcatcactacttcatctggggacgggaagactcagaggactgggccagggcctcgggctgtcagctgggatgcagccctggggttctagctgccagctccagggatcagggccctatgctaatgctctgctgttgccaactttaaattcttagggttttttgattgtttgntttgnnttttgnnttttttttgannaggattngntntttnattttgccctggatccataaattt

SEQ ID NO: 54923 - DNA, 682 bp, Homo sapiens
aaagcgggcagttataaagaagacaaagatggcaagagcagaggaatgggcactgtcacttttgagcaagcaattgaagcagttcaagcaatttctatgttcaatgggcagtttttatttgatagacctatgcatgtgaaaatggatgacaagtctgttcctcatgaagagtaccgttcacctgatggtaaaacaccacaattaccacgtggtcttggaggcattgggatgggacttggtccgggtggacagcctattagtgccagccagttgaacataggtggagtaatgggaaatttaggtccaggtggtatgggaatggatggtccaggttttggaggaatgaatagaattggaggaggtatgtataaagatttgtttttttgtatgtacccatcaccatttttaataaactagaaactgtgttgagaattccatgaaaaaaaagtcatggtttattgttggctcatgttctaaaggctgctagcagaaattgagcctggtacatacttaaaggaaggtgatgtgttaagaagtagctgcacaaggtagggtggatgaagagcttactggtgagatttaacatttacaaaacgtacctttcagctacatgactgacagttggatctcaaaattaatctttattccataggaatagggtttggtggtctggaagcaatga

SEQ ID NO: 54924 - DNA, 401 bp, Homo sapiens
caggcatctcccatcctaaaaagcctgggtgtccttgtgtcccctctcaactgccctctcctttggttgacattcattttgctctgtgttgactctctgtggttcttagtctagcttctgccatcatcacttctcagtgacctaattcccactcttgccaccgacttcttcccaggatttgacactgttgacctccgcaccctggagagctcctctaagatgtgagcctgttgcatttgctgcatactctagatcaagcccagaatcaactgatccagtcaatacatcccactgaacagccgaccgatccaccctctgtcaggatctctactgtagacactgaaagaggtgccccctcagtataggatcctggcctcaaataatcttctcgccttggcctc

SEQ ID NO: 54925 - DNA, 383 bp, Homo sapiens
ggactctggagcaaccatcagaataggcatctacatcggagcagggatctgtgctgggctggctctggctcttatcttcggcgctttaattttcaaatggtattctcatagcaaagagaagatacagaatttaagcctcatctctttggccaacctccctccctcaggattggcaaatgcagtagcagagggaattcgctcagaagaaaacatctataccattgaagagaacgtatatgaagtggaggagcccaatgagtattattgctatgtcagcagcaggcagcaaccctcacaacctttgggttgtcgctttgcaatgccatagatccaaccaccttatttttgagcttggggtttgctttttcagaaactatgagctg

SEQ ID NO: 54926 - DNA, 349 bp, Homo sapiens
ctttttagaataattaggaaattcttctttcccagaccttcaatacttttataaaaccactacttagcagctaacaatgaaatgttcatttcaaaatgtttagtctttaaagcggttacctaagaatatctgccagtgaacactagctttatttcatcacatcatacacctgaatgtaatcaacattgctttattaaagatgtttatataatttttatataatacacacttccaataattgataatagtctaatgattgatattttaaattaatggcttgtaattgtgtaattggaaagtggtccttgggactcagattaaggtatcattacctgtctttcataagctg

SEQ ID NO: 54927 - DNA, 427 bp, Homo sapiens
aagcttcttagcttttcctattacaaatgacagggataccatgtcctaaaactctcatatcatttatcatttcaaatagtaaaaaaataaatattaacacctgactttacttgtataatttggcaacattatactgcatctaagaatttcatattcttcatggtatggctataaatttcagtttaaaacttacagaaataaccagacagttttatagtatcagactcttcacatcataatttttatcagctgcaacaaaaagtaaaacaaaactgttttactgttactgttatccttgccaaatataacctctgtaaaaagtatggtgaaatatgttcatacatataaacatgactgcaggcgacaagagcagtctttaacttataagcaacctaaaggcatcttgtattaacgactcttctaaaga

SEQ ID NO: 54928 - DNA, 283 bp, Homo sapiens
aacaaaacccttgaaaatattttgcatatggatgtctgtttcacgtttcaactgaagatgtatagagcacctctgatgatgaggaagataccatgctaggcagtactttcaagaacgtgagttcttatttctgcaggccttttgtgcccccttttaaatgttagcatttattaggtacaaactagtggggaaggtttttttaaaaagttttgcagtcttgtaatttacctttttaaaaaatttattttatttttctgagatggagtcttgctctgttgccagc

SEQ ID NO: 54929 - DNA, 280 bp, Homo sapiens
cccacgcgttccgcaaatccaaaatgcatacatgctcatttaaataatttgtccactggtaacctcagctgagcgctgcccttggcagaatatgttttacaggatattaaatgtgtttaaaatattctttcatattacttggttggcatttagatgtcttaagttgttttaataaattagggaaagctagaatataaaaggtagaaaatatatacattttcagtgttccaagacactttggtggactatagaatgctttaaatgcaagttaagatgaata

SEQ ID NO: 54930 - DNA, 422 bp, Homo sapiens
cggacgcgtgggtggagcccaactcactccagtgggtcggctcaccgtgtggcttgcacggaccttacattttctacaaggcttttcaattccaccttgaaggcaaaccaagaattttgtcccttggcgactttttctttgtaagatgtacgccaaaggatccgatttgcatagcggagctccagctgttgtgggaagagaggaccagccggcaacttttatccagctctaaactttatttcctcccagaagacactccccagggcagaaatagcgaccatggcgaggatgaagtcattgctgtttccgaaaaggtgattgtgaagcttgaagacctggtcaagtgggtacattctgatttctccaagtggagatgtggcttccacgctggaccagtgaaaactgaggccttgggaaggaat

SEQ ID NO: 54931 - DNA, 123 bp, Homo sapiens
ggggtcttcgggagctggggcagactcttgaggggcaaaggggggaggtgtgagatgggaaagtcctgactcatccacgcttgactcagctcgccctgcggcggggtgggagagagggggtgg

SEQ ID NO: 54932 - DNA, 649 bp, Homo sapiens
gttcttgcccgtgttgtgtgtgtgtgtgagtgagagagcgagtgagtgagtgagtgagtgtgtgtgtgggggggactcggcttgttgttgtcggtgacttccccctccccttcaccccttcccctccccgccgccgctgcagtggccgctccctgggccgtaggaaatgagcgataacgatgacatcgaggtggagagcgacgctgacaaacgggctcatcataatgcactggaacgaaaacgtagggaccacatcaaagacagctttcacagtttgcgggactcagtcccatcactccaaggagagaaggcatcccgggcccaaatcctagacaaagccacagaatatatccagtatatgcgaaggaaaaaccacacacaccagcaagatattgacgacctcaagcggcagaatgctcttctggagcagcaagtccgtgcactggagaaggcgaggtcaagtgcccaactgcagaccaactacccctcctcagacaacagcctctacaccaacgccaagggcagcaccatctctgccttcgatgggggctcggactccagctcggagtctgagcctgaagagccccaaagcaggaagaagctccggatggaggccagctaagccactcggggcaggccagcaataaaa

SEQ ID NO: 54933 - DNA, 712 bp, Homo sapiens
  misc_feature (1)...(712): n = a,t,c or g
agaaaagataaagggaccgagctgctgtcagcctggcttactgatctgcgtccgtttcaccacggattcagttactaagcatttttttctttttttggttctttgcaacgtgagtggcattggctcagtgatttccatgagcatctctaccagaaaacattgcctcgatgaggtgtggtggaagcccggcagccccttctaatcggctaggcttgagaaagcgtgtacctctgcatttccgaaattaactcagcgtgatcggcaagattttcctcagcatctggtgtcaagacactcgtcactattaattcggaaagaaaaaaaaaaaacaaaacaccgttttccagcatttctcttggtggagaactaaacaacaggaaaaatgtctattttccctaagatatctttgagacctgaggttgaaaactatcttaaggaaggctttatgaataaggagattgtgactgctttaggtaaacaagaagcagaaaggaagtttgaaactttgttaaagcacctgtcacatcctccatcatttacaactgtcagagtgaatacacatttagcctcagtacaacatgtgnaaaatctgtttacttgatggaactttcagaagtttaatgggttaagggttcccattttttcaacatccagacntcaagatgggttacctattncccgttatttgggccccgaagggtttttaaaacca

SEQ ID NO: 54934 - DNA, 458 bp, Homo sapiens
cctaatcatactgaaatattggtgcacacctctctgcattagatttcacttttttaaaaaacccagtggacattgctataaataagatttatttggctacaaataacctgggatgttgcttattatgattgatgcctgctggtttgttcccaagctgagtgaaattgaacctcgtcctccctactcattttgatgactgaggctggtttataagaaaaggaagtttggagaagaaaaccgagattagaaaatatcatgttttggttggagataagaaccagggatggcaagtaccagtgtgtacaaatgtatttcacggagtttgaaggaacgcataatcaagagggaaaacaatttggtccttcattgggacgtatttatttggatttggggtgaggcaacaaaatgggaatgtgggtctgttaaggaggcattctgtttgttcttttgccctgatg

SEQ ID NO: 54935 - DNA, 381 bp, Homo sapiens
tgaaggcttacttgatcccagcgatgtgactgctcaatggagagaaggaaagtcaatcgtaggaagaacacagtacagcttcatcactggtccagctgtaataccagggtacttctccgttgatgtgaataatgtggtactcattttaaatggaagagaaaaagcaaagatcttttatgccacccagtggttactttatgcacaaaatttagtgcaaattcaaaaactccagcatcttgctgttgttttgctcggaaatgaacattgtgataatgagtggataaacccattcctcaaaagaaatggaggcttcgtggagctgcttttcataatatatgacagcccctggattaatgacgtggatgtttttcagtggccttt

SEQ ID NO: 54936 - DNA, 378 bp, Homo sapiens
tcagatgatgaatttaactgttcaactgctgaatgataacgggcatgaactaaaacttaattctgacagagctggatatggctgtataataaactggatcttaaatttatacttgggttttagttttaataactggaaatgtatcctttctaaatctttaattggtactttctataggaatgaatgtgatttgaactcattcatgttgagaggtaagtaaaatatttaacttataataatcaaggactcaaaagatgaaaaatagaaattacaccatcccagtatttcaggtataacacagaattagtaagatactggcaaaaatattacaatgtatatatttgtatagagaaggaaaatgaagagactgcatgtcta

SEQ ID NO: 54937 - DNA, 697 bp, Homo sapiens
gacttttgaggaggttgttcatcatgatcacaacaaggaacggggctcgtttatcaccagtgaggagcaggacgtgagcccccgccctgcacctctgctgttaaacaccccagccatcccttctttcaaaagggatcctttcataggagaacacactgaggagatacttgaagaatttggattcagccgcgaagagatttatcagcttaactcagataaaatcattgaaagtaataaggtaaaagctagtctctaacttccaggcccacggctcaagtgaatttgaatactgcatttacagtgtagagtaacacataacattgtatgcatggaaacatggaggaacagtattacagtgtcctaccactctaatcaagaaaagaattacagactctgattctacagtgatgattgaattctaaaaatggttatcattagggcttttgatttataaaactttgggtacttatactaaattatggtagttattctgccttccagtttgcttgatatatttgttgatattaagattcttgacttatattttgaatgggttctagtgaaaaaggaatgatatattcttgaagacatcgatatacatttatttacactcttgattctacaatgtagaaaatgaggaaatgccacaaattgtatggtgataaaagtcacgtgaaacagagtgattggttgcaaa

SEQ ID NO: 54938 - DNA, 397 bp, Homo sapiens
gtcagtaatggccattattgttccattgtggaaattaaattatgtaagcttcctaatatcataaacatattaaaattcttctaaaatattgcttttcttttaagtgacaatttgactattcttatgataagcacatgagagtgtcttacattttccaaaagcaggctttaattgcatagttgagtctaggaaaaaataatgttaaaagtgaatatgccaccataattaattatgttagtatagaaactacagaatatttaccctggaaagaaaatattggaatgttattataaactcttagatatttatataattcaaaagaatgcatgtttcacattgtgacagataaagatgtatgatttctaaggctttaaaaattattcatgaaacagtgggc

SEQ ID NO: 54939 - DNA, 610 bp, Homo sapiens
ttttttttttttcgtttgtccaaacatttattgaaatgccaggcattgtgctaagcactagagatataacagtgaacaaggcttatatggtccctgcccttacaaagcttacagtctagcagtgatcaataagcagtaacaataaagtgtgccaagtgtatgtctgggaaagaacagggtgtatagggaatggatagtaagggcacctaatctagagggcatcaatgaaggtttcctagatgaagtggcatactgagaccttaaagatgaagataaatttgtattgtaccctaagagcaatggtgaaagcaatgcagtgacatgatcagtaagtcttttggagcaatttggttgtagtgtagaaaggaataaaaataaaaaacagggagactaataaggaggctgttgctataatttaggtaggttgatggcctgaattaaaatggcagcattggagaattggtaaaaaggacaaatgaatggttggtagtggtaatgccatttagtcaaagaggaaacatgagaggaggagcaggattgggggcaagatcaatgacatgtagtgcctgagacagcaaagagcatttgttagcaattagatacatcaatt

SEQ ID NO: 54940 - DNA, 409 bp, Homo sapiens
gatcaatggacttctgctcagtggaatccttagtttgcctaactaagccaattacaaagtaatgatataatttatctccccagctgtcattttatagcatcatgctatttttctgattggtttcaaaagaaggtcttctcagtctgcatgctaagacaggaataatcagaatccctttttccctgtctggcacaaatcactgcatgacaaagtagagacaggtgaatggctcaggcctggggtacatgtgtgcctatcaactaaatctaattattactggggaaaagagaacagcctagtcctgtggcctccaaatatttctgcttcacctagtagaaaaaaactgaacatactcctatattggatatctggttatcaattatatggcttttatcaatagctaatattt

SEQ ID NO: 54941 - DNA, 445 bp, Homo sapiens
cggacgcgtgggtgcccacaagcaaacacaccacacatgttcggcatgttgccgtttgaacacccatgaggacgcctccaacctgctcttggttctaatagggagtactgactgtcagcagtggataaaggagaggggaccctctggtccctagcatggcacccagagcctcccctcttcttgtccttcaaccaaaaaaaaacttttcttcttgaacttttgactgaattaaggtctcttggccaatgatgggcctgaaaattccataatggccagagaggagagttcgagcccggctaagatcccctgagtcattctgtgagggaccaagacccacagtccaccagccccagggccctacctcctggaatgctttcctggatccagcttccgaagatccgaccagacccagggaggacggcacccgctccgcgggagggaaagc

SEQ ID NO: 54942 - DNA, 2073 bp, Homo sapiens
tttttttcgagttttaaaattctttatttaaaaatctctaactgtaatgtttcataaaaaatatacacgtttctatttacatattccattaattctattagtttgaattagattttaagtccaattttgaaaagcttgcagaatttcttctgaaattacttaaaattactgtatgcataaacttacaaaaacatatgctataccaaggcagagaaaagaaaaaaagtgaagtggctacaaaggtccctggggcatcacctgctcacctaggaaccaggagtactggatactgttccgttactggtaacctatctggatgtaaaggttcataagttacaatgctttttttgtttaaaaaaaaaaaaaagtctgtactttacaagccaaaagtgaaaatgccacacatcctctttacgctttcatgtacactaagtcactccatttggttgataccaactaagatacaatttctgagatcataatcttttcatgaaattaaagcagaaaactgtccaggaaaatcagacttcaaagttggtgcaacttagctgatctcatgaaaattctttggaatcttctgttggtctataaccaatcaaggactctttaccgctatcatccacaagtagatccactagcacatgtggtttatcataaccaaaggaggtgggggcttttattacggttatgagctcttgtccttctgtttttatttcacctttattatttgggggaaattctgagtcagataaggagctatgtgattccagacagctggaatcagtatcaaaaccatttctggagtgatcactctcagaacaatttctggagtgatacgagtttaaagcgatgctgccaggttcagactggttactacttaaaggtgaagaactctctctctctattggagtcagatggctgcccgggaccacgtcaggaatattttcttcagtagtcaccacttctgttatactcgaaagttcttctgtatgttccacttttcctggattgtcttcgggtatgcatgcctggaactgttgctggagacaacggctcttcacagaccacctccttttctaaggaaaatggctggtatgacgtgatgagtgatacatattttgattcaggttttgtctctaaagtagcacttcttaccacagagatcaaggacttgggtaatattatgcttttttccttcaatggattaattttcttaatataaaaacagatgaataccaggctaagcactagaaagagtagtaaagcagcaacaactggaatccaaagagaaccttttatactgctattgaaaatggtaatacaaacttcttttgacttttcagttgtaacaccccacacatgtaagactccttctgctgaaacacagtactgagaattcagtgaggatactggaatcgctaactggcactgaatctcgtcacaatcatcttccttctgcgtgagtattttatactggatctcacttccgttcattctcacatacacattgtacaccctaatgtaacaggtagtttcgggatcataatcgacttcctgctcgtctccatttacaaaaactgaagggtgaaatatgtcaatcatgatttgcttctcctcctttctgatatccagtttaggtggtccaatttttccatctcggcatacagcaaattcttctgactttgcataggcagattctttttgtccaaccctggctttaactctgacccaaagagaatttgatggatcaccaacatgatcagaaatattacaataatgatgagaaatattgatgcaggcatcaatccattctgaattcttaacaccatagttctttacctctacggtaaaaacagggacctgtggcatgatctggtactcccaatatacgatagggttcatgttataggattcaattgtaacattagttggtgtaggcactgaggacggccccagatccgcggtgcccatctcagccctgctcacaccctgcatgacaaggggtaggagaaagaggagagccatgctgctaccgacggtcgctggctccaaccccgagcgcctgcggaattc

SEQ ID NO: 54943 - DNA, 766 bp, Homo sapiens
  misc_feature (1)...(766): n = a,t,c or g
gtttgagctcactcaggaattggggagagagatggaccaccactgtggtgcatttcttaagtgttctgggagaatgtcatacttttccttcccagagtaaaagaaacctntgggagatcctgagggagactgtttctccccaagtatgatgatgtctagtcaagtctaagaataccactggacatgttctatggacatntgggattgcagntgctattctgatntgattggncctcagtcaaatggatcactntgaaggaaagctttggttgtcaccgttatataccactgagataaagtgttagcaaagtatggttcaaattaacttatgacatgaccaagagcttttctcttccaaaagatgaattgtattgtaaatagtttctcaaaatatttttaactggatcatgagcatggggagagaaagtttctcagctgctaagaatttccccactgtttacttctttcacttatggtggtattgcatttaagattacaaaatttaaggttttatttgtatctattacccaaaccattaaattgtctttaatttcattgttgtcttggaggtccagtgcatacagggctgatgggggaaaactccctctagccagtcaggcactctaacccagggattaaaccatcccatcaagtagtatgtggaagtcaagtcttcgtactcttggcagacccagacatggaaattgggattcattcatatagggatttccataaatccccattaggtggaaaagggtagggcaac

SEQ ID NO: 54944 - DNA, 626 bp, Homo sapiens
ttttttttttttttttttgttactaacgttttctatttattcattaataaaaagtgcatagtacaagccctttatcccaatccaagtactcagaaaaagattaacaacagaccctggatggcacagacataatttgtttggcgtgatttaaacatataaaatcagtaattaacatttagcatatcacacgaccacttttgcttttaacaaactaatcttcacacatggtaacaaatacctatgatttttcatttagaaatattataagaagactaaacttactattgcaacaacaaaaatttaacccattaaactagaaactctcttcatttttccttcttcaaattactgttttgtgtcttaaactgagttggtcaaatttgagcacataattcatgtagagtgacagactttcatttagagtgatagacttccaaggttcctttgaaaatttaagatactggtaattccataaacactcccacaccacataccacaaaaacactaaaagtagccatagaatagctgtattcaataattattttggaaaatccacattatgaaatatgacttgctgaccatggaacagtgcttggatagataacatgaaaaaaatgaaaaacatc

SEQ ID NO: 54945 - DNA, 420 bp, Homo sapiens
cctgcccatgctccagactctgcgtctgcagatgaacttcatcaaccaggcccagctcggcattttcagggccttccctggcctgcgctacgtggacctgtcggacaaccgcatcagcggagcttcggagctgacagccaccatgggggaggcagatggaggggagaaggtctggctgcagcctggggaccttgctccggccccaggggacactcccagctctgaagacttcaggcccaactgcagcaccctcaacttcaccttggatctgtcacggaacaacctggtgaccgtgcagccggagatgtttgcccagctctcgcacctgcagtgcctgcgcctgagccacaactgcatctcgcaggcagtcaatggctcccagttcctgccgctgaccggtctgcaggtgctagacctgtc

SEQ ID NO: 54946 - DNA, 413 bp, Homo sapiens
cactctcagggcaggaattttaaacggagatgcttaagttggaaatgatttaaatattaaggttggtggcattaaaaaggacatgaaatgatcatattaggattcaaggaaaagagattctccagtcatttttgtcgtcagagtcagatgcatttcccctcaatcctagttccacgggctttatcttgttcacccaaatgagctgtcaagaaatgatgggtgtcatcataatcaaagaaaacaagtttgccctttaaagcaaaagaggtaatttggctgaaagcaaattggaaacatttcatgtaacgttgcgtttccagccgcactctctgaagaattcaggcattttgatttatgcctgagagctttggggtacaatggagaggactgcattcattaactaccttgttcac

SEQ ID NO: 54947 - DNA, 64 bp, Homo sapiens
ctatttgtaataggagatagggtcagataagggaataaaagcaggcttccccagccagggggag

SEQ ID NO: 54948 - DNA, 1657 bp, Homo sapiens
ttttttttttttttagtgttcggtttttcttttaattatttaccagataaaaaagaaaaaaaatagtgattgtttctcttcacccccaacatttccgtttaccaaggtcgagttggagagaaattcattgaacaacgatttgtgctcctggcctggagcaaattcttctcctctgctctacgccacctcaggcagcagggacagggcaaagggctccaggcagaaatcctggtggctgggcagcagagtggcagtgtggcgatcgcttcttctcgccattgccagagcattcagaccctttcccgtctgtccccctaccccaagtcccccagtccctcaaaggaggcagggagtggggactgcaggaagcaggacaggtgcacgggtggcctgggcagctccccacagatctggcagaggggacaacccctgcttctattgcacatcctggctcagcccccctgccccgagcagtaggccacaaaatgaaacactttccaaattcagagagcccggtgctgtgtgccaggctcaaggaggggaggtgtgttgttgtgtggcttgttctggaagatagatatgtatttttaagttactccatgatggggccaaggcaacaattttgcctctttgcataaggggtctggacatctcagggtcctgtagtgactgggcctcttcccaggcgagtgcagaagcctcggaagaagcctttcccccaccggcggacctcctggctccatcagatgaagaggcagcgcccaccggccacaccagcccctccggactgtcacgaactctgggcccacttggggcgacctctttctctgaacacctggagaattctgtcaaatgaccctggagaaaaaccttttatactacatgtttttccataaaatggcagctaagtcccctcaaataaaacctttaagtatttcattctcattcttaccagtgaaatcaagtgggacaggaataagctatttaactgaacattagcgacaggataaacccctctaaaaaaccgccaggggggagtgggaactgattcagatttggcaaagctgcaaatctttccccttcatgggctggaacgaagctggtgggtgaagacaaatctaagtgtgccaatggcaagaactgcaggctatgaaatgacaggtcagacacaggactgtataaatcgtggcactataaagatgagaaggcaggtccatgatacagctgggagcaagcctttggagcatcgcttccagaaattctatctgtcctgtagtaagtagtagcatccagataaaatcagtggttctcctttctcctcttccaaacacattctgagagtttcttgtttaaataactatgtacacacccagcaggcctggtctctcttttacatgagggtccttcacttgagggtcctacaatggctttagagtcggttccaattgcctttttggagatttactgcttgggaccaaacctccctctgataaggacagtttctcaagttcagcttcaagttcagcatctgagatcctagggttaggcacgctgttggtaaaatgcctattgcgggggttgtcaggcagatccaaaggttctttggtggtatcctgaaggaggatgtccaattccttctccagttcttcactgtcaa

SEQ ID NO: 54949 - DNA, 353 bp, Homo sapiens
gcgttctctctgctcccttcactctggttttcaaaggtgcttggttcttttactttctatgattttcagatttctgccaggtaaatcagattggttcttaacttgtcaccactgcagcttggaatattgtatgttagggattgctacattagttacaactggtcgtgcttatttattttttttgagacagagtctcactcggtcgcctaggctggagtgtagtagctcgatctaggatcactgcagcctccacctcccaggttcaagtgattcttgtgcctgagcctccctgagtagctgggactacaggtgcgccaccatgcctggctgatttatgtatttttaagtagaga

SEQ ID NO: 54950 - DNA, 334 bp, Homo sapiens
ggaaccaaacacccccacattccttcagacctctctgttcttccccattgttctcttccggaagcgagaccctgtctctacaaaaaaataaaaacttagctaggtgtggtggcatgcacctgtagcctcagctactcaggaggctgaggtgggaggatcgcttgaggctgcagtgagccatgattgtgccactgcacgccagcctgggcaacagagtgagcccctgtttcaggaaaagaaactgagagggtaggagtaaaggaatttcctaagctactgccatgtgtcaggcccactgctaggcaatttatatcatttagctcttgaatgatcc

SEQ ID NO: 54951 - DNA, 418 bp, Homo sapiens; identical to SEQ ID NO: 41239

SEQ ID NO: 54952 - DNA, 316 bp, Homo sapiens
atttgtagcaggggaaatgcatgacaagcattgatctgaatgtatcaatattagtaaacagtgatttaaaaacacattgaattcaggcaaaatgtcttaaatcatggaaaagtcctttcccaacactgattataaaacattattgacaagtgtcagagttcccatcaagaatggtccttgagcaaatttgggttttagcaaaatcatatccagattttcaagggtcactggaaattgaccccacagcacttgtcttttagtgggtgtatagaaactggagtaaaactggagaagtgcaagaactcatggacagcat

SEQ ID NO: 54953 - DNA, 133 bp, Homo sapiens
caaggagtataattaaaatgtatccagccttatgctgatgagagctataacttaatgtttgaagtacccttggacatatcattatgcaactcaggatttaaacttgtcaactttggatgtgattatcatcaat

SEQ ID NO: 54954 - DNA, 601 bp, Homo sapiens
  misc_feature (1)...(601): n = a,t,c or g
tttcccgttcctcacaggttgtggtcctcacatttggctcaaaatattcaaaattttttccagagtttggccttttcttcagcactgggaattgtgatccaaagcttttcctgagcagacctgcatgtctgcggtcagctgggttggcagagacagagtgactgtcttcctccaggaagcagcaggttaactggttggcagagacagagggacagagggactgtcttcctccaggaagcagcaggttaactggttggcagagacagagggacagagggactgtcttcctccaggaagcagcaggttaactggttggcagagacagagggactgagggactgtcttcctccaggaagcagcaggttaactggttggcagagacagagggacagagggactgtcttcctccaggaagcagcaggttaactggttggcagagacagagggactgagggactgtcttcctccaggaagcagcaggttaactggttgcagagacagagggacagagggactgtcttctccangaacagcaggttaactggttggcaaaaacatagggactgagggactgtcttacttcangaacagcatgttttct

SEQ ID NO: 54955 - DNA, 3013 bp, Homo sapiens
tacgattcatagatctggaattccggcgccgggcggctgcagcctccgctccagcgcccgcgccgtgccctgcatcccgggagcccggctggacccgcggcggctcggccggtgttccccctcccctccctggggcagcagccaccatgttctcgtgtgtgaagccctatgaggaccagaactactcagccctgaggcaggactgccggcgcaggaaggtgctcttcgaggaccccctcttccccgccactgacgactcactctactataagggcacgccggggcccgccgtcaggtggaagcgacccaagggcatctgcgaggacccccgcctctttgtggatggcatcagctcccacgacctgcaccagggccaggtgggcaactgctggtttgtggcagcctgctcgtcacttgcctcccgggagtcgctgtggcaaaaggtcatcccagactggaaggagcaggaatgggacccccgaaaagcccaagcctacgcgggcatcttccacttccacttctggcgcttgggaatggtggacgtggtcatcgatgaacggctgcccacagtcaacaaccagctcatctactgccactccaactcccgcaatgagttttggtgcgccctagtggagaaggcctatgccaaactggcaggctgttaccaggccctggatggaggcaacacagcagacgcactggtggacttcacgggtggtgtttctgagcccatcgacctgaccgagggtgactttgccaacgatgagactaagaggaaccagctctttgagcgcatgttaaaggtgcacagccggggcggcctcatcagtgcctccatcaaggcagtgacagcagctgacatggaggcccgcctggcgtgcggcctggtaaagggccacgcatacgccgtcactgatgtgcgcaaggtgcgcctgggccacggcctactggccttcttcaagtcagagaagttggacatgatccgcctgcgcaacccctggggcgagcgggagtggaacgggccctggagtgacacctcggaggagtggcagaaagtgagcaagagtgagcgggagaagatgggtgtgaccgtgcaggacgacggtgagttctggatgaccttcgaggacgtgtgccggtacttcacggacatcatcaagtgccgcgtgatcaacacatcccacctgagcatccacaagacgtgggaggaggcccggctgcatggcgcctggacgctgcatgaggacccgcgacagaacccgcggtggcggctgcatcaaccacaaggacaccttcttccagaacccacagtacatcttcgaagtcaagaagccagaagatgaagtcctgatctgcatccagcagcggccaaagcggtctacgcgccgggagggcaagggtgagaacctggccattggctttgacatctacaaggtggaggagaaccgccagtaccgcatgcacagcctgcagcacaaggccgccagctccatctacatcaactcacgcagcgtcttcctgcgcaccgaccagcccgagggccgctatgtcatcatccccacaaccttcgagccaggccacactggcgagttcctgctccgagtcttcactgatgtgccctccaactgccgggagctgcgcctggataagcccccacacacctgctggagctccctctgtggctacccccagctggtgacccaggtacatgtcctgggagctgctggcctcaaggactccccaacaggggctaactcttatgtgatcatcaagtgtgagggagacaaagtccgctcggctgtgcagaagggcacctccacaccagagtacaatgtgaaaggcatcttctaccgcaagaagctgagccagcccatcactgtacaggtctggaaccaccgagtgctgaaggatgaatttctgggccaggtgcacctaaaggctgacccggacaacctccaggccctgcataccctccacctccgggaccgaaatagccggcagcccagcaacctgccaggcactgtggcccgtgcacattctcagcagcacctccctcatggctgtctgacacctgcccacctacctggctctgaccgttcccaccaccatctgcatgtccccactgggcctgagtctagcctgggagccaggatactggggtccttttcccactcttccactgacttgctgtgtgaccttaggaagtctctgcccctctctcagcctcagtgtcccgagggccccgaagcattccattctcgtggaggagtttccttgctgagatttcaaatagtcctccccacctcaactgtcaccactgctaagggactctatccattgagcacattttcctaaggccctgctgtctgccgaggagcgccaagaagatgtcacttgtttacacacgaactgccacatccccaagctccgttcttgcccctcgtgtcctaggcccaacccagcctcccagacctcactttccccatcagcaatacctggtgttctcccaccttgaaaggactcttggctctgccgggttcctgctcaggctggaattgggaaaatatgcaggtgacatttgttcattctctaatcccatcctctcacccatccatttcctcactcagtggagatttgccaaatgaataaacgacacctttgaggccccaggtgaagcggggccctactccggcctctgccttgggcctcgcctctgtcctcaggtcctctcagaggcagatacctaggggagctgctgctgcctgctcattctagcttccgattccattcccagcccctgcgttaaggtccctggagaggtggcgtcagtgggggtgaggaagggcatcttcctgactcctctgcccagtgctggaaggagcatgcctgggttagtggggccaggggccaggcagctggggggcctttggggaccagaaggggagatgtgctcccagagcctctctgctgtaagaccccagcttttcctgggaagatgggactctggggtgtg

SEQ ID NO: 54956 - DNA, 419 bp, Homo sapiens
cccacgcgtccggttcttgacttaataaagaaagaaaaaaaattatactgaggctgctaagatctatgctaagaatgaaatcttctatcaatgcaattgtgaagaagaaaaaagaaatgtgtgtgtaatacatataggtttcagcactatctgaggttttagacatcccctgggagtcttagaaaatatcctctgtgtgtaaagggaaactactacactgagcaacccatgcaatgaggaaactacctgaggccagaacagaaccatccaagaggattagagggaacagtcctgatgctcacacaagtcagggaaaagtgcctattcccactagccagatttatatatctcattatttaaagaaaattaggtaaaagactcatatttgcttgctttagtcatggggaataataagctgg

SEQ ID NO: 54957 - DNA, 338 bp, Homo sapiens
gaaaaaggtaccctttttggcattctttgctgtaatcctgtgtgggtgtttcaaagagggccgtctgccttttggagggaggggggtcccagccatgtgggatgcttctttggctattttgcctctgggagttggagcccagagaggagagcttgaggggaccaaagcctcccgcgctgcgtccgctctgccaaactcctgccaaattccaagatctgaggaaagtttattcatcttgctttctcaggggagccctgatttctcttatcccaggtctagcatcctcatctgggggccgggtgggtgatacatgtgtgcaggacacgaaggaggggctg

SEQ ID NO: 54958 - DNA, 1863 bp, Homo sapiens
cctgtgggatgcaagtgggagaatccacctcattgcctggagatcacgccaccatcttcagaaaagctggtctcagtgatgcggttaagtgacctctctacagaagatgatgactcaggtcactgtaaaatgaaccgttatgataagaagattgatagtctaatgaatgcggttggttgtctgaagtctgaggtcaagatccaaaaaggtgagcgccagatgcccaaaaggttcctggaggaacggaaggaagagctggaggaggtggcccacgaactggctgagactgagcacgagaacacggtgttgaggcacaacatcgagcgcatgaaggaggagaaggacttcaccatacttcagaagaaacacctacaacaggagaaggagtgcctcatgtccaagctggtggaggcggaaatggatggggctgcggctgccaagcaggtcatggccttgaaggataccatcgggaagctgaaaacggagaaacaaatgacctgcacggacatcaacaccctgacaaggcagaaggaacttctcctgcagaagctgagcacatttgaggagaccaaccgcaccctccgagacctcctgagggaacagcactgcaaagaggattctgaaagactaatggagcaacaaggagcactgctgaaacggctggcggaggccgactcagagaaagcgcgcctgctgttactgctgcaagacaaggacaaggaggtggaagagctccttcaggaaatacaatgtgagaaggctcaagcaaagacagcgtctgagctttctaaatccatggagtccatgcgtgggcatttgcaggcacagcttcggtccaaagaggctgagaacagtcgcctgtgcatgcagattaagaatctggagcgcagcgggaatcagcataaggcagaagtggaggccatcatggagcagctgaaggagttgaagcagaagggagaccgagacaaagagagcttgaagaaggccatccgagcccagaaggagcgagccgagaagagcgaggagtatgctgagcagctacacgtgcaactcgctgacaaggatctttatgttgctgaagctttatccactctggaatcctggaggagccgctacaaccaagttgtaaaagaaaagggagaccttgagctggaaattattgtcctgaatgaccgggtaacagatcttgtaaaccaacaacaaaccctggaggagaagatgcgggaagaccgggatagcctggtggagagactacaccgtcagactgctgagtattccgcattcaagctggagaatgagaggctgaaggccagctttgctccaatggaggacaaactcaaccaggcacacctcgaggtccagcagctgaaggcctcagtgaagaactatgaggggatgattgacaactataagagtcaggtgatgaagaccagattggaggctgatgaagtagctgcccagctagaacgctgtgacaaagagaacaagatccttaaagatgagatgaacaaagagattgaggcggcacgaaggcagttccagtctcagctggctgacctgcagcagctccctgacatcctgaagatcacggaggcgaagctggctgagtgccaagaccaactgcagggctatgagcggaagaacatcgacctcacagccatcatatcagacctgcgcagccgggtaagggactggcagaaagggtcccacgaactgacccgagcaggggcccgcataccaagatgagctgcacgccccccaagggaggactacttcctttttcttggctgctgctttttaaaaggagtgagctatcatcagtgctgtgaaataaaagtctggtgtgccaaaaaaaaaaaaaaa

SEQ ID NO: 54959 - DNA, 3428 bp, Homo sapiens
tttttttttttctgaatgaaagctaattccattcttttatttcctcataccacaaacatttcaatttatctgcctttttacaacctgatttacacaagcaaattgcaaacgaaaaccaggcattctttaatcatccaaaatgcatgtataaaatatagaacaaaccctagtatttaaacataaacagggttagctgaagcagctttattgcaatctcttcaagttagcatattacagtttaaatatttatgcctgtaaagatctgcataatctacaatacagagttatttcagaagcagttgacttaactagttgagaaaaaaaaacaacaaacttcaacgcaaagctataataattatctgaaacttatttacaattaaacatttagggtcctgatttacaaaactcagtgcctttcatgatttattgatgagttttatagagaaagtaagcagtatgtagaatattccccaggtaaaatctggagtgaatggcttttagaggaaagtctatcagtatgcttaactaaaaactaaagagtgacaaaactgtatacagcagcaatcagaataacaggccacaagagaagaacgccatttttgacaatatcctttgtatgtataggaagaaaaatgattgccaccccccacccctgccgccaacttttttagttaaaaaaaaaaaaattgtccttaataatcactacatgtgaattctgggtaataatctcctttctttctatagagttgtgtttaaacttaattcctgcatcagcaaatttaaacaaagaaaagttcctttgataacagccatcagagttcaatgggtatttattcagaggggaaagcttggggcaaggtgaccaagtgattattccaattgcaaaagaaacatcatagataaggtgctagaaacccaagattacccttgaagcactttcaatggattcaagtgatttaatgtagacaacaaaggaaatgacaaaggaaaattaacgagagaaaatgtttttaaagagaaaaatttcaataaatcaggtcccaggtagtctttaaaagaacaaaaatttacagtaaacattttaactctggaatgcaagtattgtacaattaccagtacatttacaaaactgcttagacagtaggttgctccagagtaagaatttaaaaatgtacaagccagttcatgatgactttagatatgttattaaaatacattgttaatcaaaaatactttactatgtacatgtacactgtataaactctagatttacctaccaaagaaagccttaatcaatttctggctcactggcccagaaaacagtacagttctatcatttggtcttcatattatacacacgggctgagaggcatggtactgtagccagttcgtcaataatgcatttttctttctgtagaatgtctagttggatgagtcagttttacttccactatattttactttcctaaatgctgatccaagtaactctgggcattcacataattcatttgcaatttggttacacttcaaaataaggctataattcatttcatcagttatgacactgtcttgcttgtagtcaggatggtttgcgataaactccctcatccatctggcaactgtcattagttctccagatgctctcttcttaattagctttaggtagttcagaatactacatctggtgtccacatccacttccatgttttcaaggtaagagttcagaattgggatcagtccaggaaacacaccttccttcccattgatgatggtgtctatgctcatgagggtgtactcctctgcagcgagctccgtgctgttctgggccttgccacaaccatccaccactgcattgccacctttgcaaatatctttcctgaaataaaacattccctgcaagacagcatctcttttctgtgctaccttcatgttctcatcaacctttgacagtggaatgagaaaatccaatttgtaggaaaggatcactctggtgagcagtaccacaaacaccacataggcagagttctcaaagtctgttaattgcacctccatgggtcgaaattctactctccatccaatgtctgagtttggaggagggggcttaaatctcattgtctgccaatttgtggactgaatattctcaaaatggtcagactcattagcatcatccaggtgtattttctcttcaaacagtgtcagtgggtctctaataaagagatgagcaacatgctgggccaggagatgatcaatgccttcctgcaacagctgttcgtagatctctttatctatcgtcaagtcgatgtcattatatttctcaccacacttagataaatagctgtctattgagtcatatcgggatttactgatcctatagttattgttcttcaatggctccagtcctcgctcctcccgagttctatcatctacagatgcagaaatcactccccagcgacaatcaatgtctgacacatagcctcggtaaaagggagatgcagcactcaaagccataacaattggacagatagtagccaactgatcataaaggtatctggcctcagatatactgcaggcttggaatgtcacctggagacagcaattgcccattccaaatcccatggcatccatgtaaatatgatccggcttagaagcccttgaagcttcatcatcctcagtaaatgtttctataaatggagatggtgtattcttgtccttaaatattggtacattgatgacaaccttttctcctctcctatgtcggatatttcttgttaaggtactgaagcgagggtgcttgtttattgcttcatctggaaagaagagggacttggaagctcctccttccactgggttgggtttgacctcgggcagtgtgaacccaggacagcctaatctgggaaatgaagttattgtgcaaagagcctgattttcttctaatatagaagtagcctccttccggcgttttcgcatgttggcctcaactgtattgaactcggacattgttcctccgtagggctgtcctggtgtcccttcaatcatgtaactcccatactctggtctccaaagggtaggatggtttgggtttgtcctttcccccttctcttgcagagtttcaagaactttctccccagacaggaccaaccggacttttttattttcatgatcaaaagataccaacatgtattccacctcatcgccccacttgagaacgtccttgtgccggtccttgacggcgtggtagatgtgcaggaactggaggatcccgtgccgccgcacgtggtcggcatggcgcttggtttcctcccagctcagcggcgagccctgggacagcagccccatggccgccccctcctcctcctcctcctcctcctcctccgggctgacggcggtcgcccgcttccgggcgcgagacggacactcagcctcgtgcc

SEQ ID NO: 54960 - DNA, 313 bp, Homo sapiens
ggtagaattctccagtttaagtgtagacaactcctattttacaaatttgtagaaattatttactagaagcttcctggcaaatagtccctttagctacttctccagtgcagtataaattgtaacataaaactttatgtgatataggaatagtgtcaatgacacagtttaaagacctctatattcacaattatatccagagcataattttccatggccatagtttgagccacagagaaagccaatgaaatagattcctacttttatttaatgccaagagttttcactagccccaaactttttattggcagcagat

SEQ ID NO: 54961 - DNA, 227 bp, Homo sapiens
ggggacccgggaatgagtggctctgcttcaggaagcatgttttaatgtgtgttcctaaaaaagcctctggaaaagtggtttaggaagcttctgggctaggagagacaccatgaaaaacaaaacacaaagtatgtgagtcagttatgatcaattgtgccataatcgacatttcagttgtatagtagttacactatgaaaagcacagacatatttaaaaagacaatttt

SEQ ID NO: 54962 - DNA, 561 bp, Homo sapiens
gaagaaatcataattgcatttcagttgacattaaaagaaaatctggtagtttttggtgtccttcaaaagaggattgttagacattgatgttaaagcatcttaattcatttgagttttcttacctgtttacacccattatttattagagatatttcttgtgtttaaccacaaaaaaaagcactctgttaaaatgttttaatatgtattgaatttctttcataaacttttcatttctgttgataaatgggaatcccttaccaaccttttgttttttaaaagtctcatagaccaaaaaaaatctgttgcagcatttaattagccacagatacattttggctgcatttaccagttacatttttccattggttttggcttctaataaataacatatctgccattctttaaaaatgattttaaagaagataaatatattgtaatttcacatgctatagctttattctgtaagattaaaaattgtgactagtataattgtagctataatgtgagtggcatgttacaatgtaactctttatgagaaataaaatgtatctctgcttaaaa

SEQ ID NO: 54963 - DNA, 322 bp, Homo sapiens
ttttttttttttttaaagttacagatagtatttaattggttactgtgatatcatagaaataccaataatcataaaagtaaaaaaagctgctaagttgtacataatgtttccggaatactaagaagttgctgctggtctacagagccctgggaggtgacggtgaggatggtcccaagaggcgcagctagggtcactggccccggtcctggtgcctcttgcctttgcctttcttcttcttgtcctctggccgtggctccagggcgcagacacaggcggacccgccagcgatggccttgggcaggtcgacgcccctgctccactt

SEQ ID NO: 54964 - DNA, 337 bp, Homo sapiens; identical to SEQ ID NO: 42157

SEQ ID NO: 54965 - DNA, 505 bp, Homo sapiens
tttttttttttttagagaagaaaacaccatctttaatcaacccgcctgcacagaaaccaggagagcactcccctccttgcaaggtcccagtgaaaagagaacctggtccccttgcaaaaaccatcttataaaaacaaaaggcttcaaagcaccagtggctacacccgttgagtagaaaggggcttgggggagagttggggtgagagaggtgagggctggaggcagggctggcccagtgaagggcagtagcttagcctgagggagctgcccccctctcaagctgtacccaccagctgggagctccatgcctgtgggggccagaggaactcctgggcctggctgcttgcatttgggatggtggggtggggttgccagccttgctcaggatattttggccttagagagtagggaatgatagattggagggtagtgggagaggagcggaatggtcaccacagacaggctcaggtgtgcaaaccatctgcaccatctggtgccccccagt

SEQ ID NO: 54966 - DNA, 377 bp, Homo sapiens
  misc_feature (1)...(377): n = a,t,c or g
gctggatctaggcttgataggcaagggagttgctagggatcaaggctcatgcctttttttcactgggtgcctagagctctgcctcatcctaataaatctctaaggagagatctttgggtgtgtagttcacttgattttgcaacattgttcaaggaattttctatcaggtagacttatagagccctctagattaagtgcaaactgaagtaggtacctgagaagcccaatnnnnnnnnnnnnnnnnnnnnnnnnnnnnnnnnnnnnnnnnnnnnnnnnnnnnnnnnnnnnnnnnnnnnnnnnnnnnnnnnnnnnnnnnnnnnnnnnnnnnnnnnnnnnnnnnnnnnnnnnnnnnnnnnnnnnnnnaattagccggcttg

SEQ ID NO: 54967 - DNA, 62 bp, Homo sapiens
ggagcaagagaggagttgaggaatcaacaatattgtgcagtccatagacatttattatttat

SEQ ID NO: 54968 - DNA, 597 bp, Homo sapiens
  misc_feature (1)...(597): n = a,t,c or g
tatttgtgttgaaaattgagtagatacataagaggaagcacatccagagaagcttaacataaagcattgtattagtctgttttcacattgctgataaagacatacctgaagactgggcaatttacaaaagttccacgtggctggggagttccttaaaatcatggcagaaggcaaaaggcacatctcacctggtggcagacaagagaagagagcttatgcagggaaactccccttttttaaagccatcagatcttgtgaggcccattcactatcatgagaacagggcaggaaagacctgccccccataattcagtcacctgccactggttcttcccaggacacgtgggaattgtgggagttataattcaagatgagatttgggtgggaaaacagtgaaaccattatcagtagttgcactttgctggaatccataataattatggaagcaaaaaccctagtcctttcttgtatgtcacccaaaccattcatctatctctagcctcgtgccgaattcttggcctcgagggccaaattccctatagtgagtcgtattaaattcgtaatcatgtcatagcggtntccaaanagggnancaaa

SEQ ID NO: 54969 - DNA, 1048 bp, Homo sapiens
  misc_feature (1)...(1048): n = a,t,c or g
tctcatgtaagtcaacaacatcctgggattgggacacactttctgggcactgctggccagtcccaaaatggaacataaggaagtggttcttctacttcttttatttctgaaatcaggtcaaggagagcccctggatgactatgtgaatacccaggggccttcactgttcagtgtcactaagaagcagctgggggcaggaagcagagaagaatgtgcagcaaaatgtgaagaggacaaagaattcacctgcagggcattccaatatcacagtaaagagcaacaatgtgtgataatggctgaaaacaggaagtcctccataatcattaggatgagagatgcagttttatttgaaaagtaaatgtatctttcagagtgcaagactgggaatggaaagaactacagagggacgatgtccaaaacaaaaaatggcatcacctgtcaaaaatggagttccacttctccccgcagacctagattctcacctgctacacacccctcagagggactggaggagaactactgcaggaatccagacaacgatccgcaggggccctggtgctatactactgatccagaaaagagatatgactactgcgacattcttgagtgtgaagaggaatgtatgcattgcagtggagaaaactatgacggcaaaatttccaagaccatgtctggactggaatgccaggcctgggactctcagagcccacacgctcatggatacattccttccaaatttccaaacaagaacctgaagaagaattactgtcgtaaccccgatagggagctgcggccttggtgtttcaccaccgaccccaacaagcgctgggaactttgcgacatcccccgctgcacaacacctccaccatcttctggtcccacctacaattgtctgaagggaacaggtgaaaactatcgcggggaatgtggctgttaccgtgtccgggcacacctgtcancactggaattgcacagaccctcncaccncataacaggacaccagaaaaactcccctngccaaaaaatttggatgaaaaactacnggccg

SEQ ID NO: 54970 - DNA, 1429 bp, Homo sapiens
cagcgccactagcctcattgtgcccaggagttctccaaacccgcgctgcggagtgagtaaccaagttccggccagttcgacctcgaggatccagaggtggagacggtactacctcccagctctgttttccatccccttcaggtccttcctcgggaggcggcgaaggcggtccaccctgcgcgtgatcctttatgcccggcccctgcccctccctccgggtggaacttccccctcaccgccagacttaagctgaggatcgttggatctctggcggggtgcagaactgagcccaggccacagtaccctattcacgctctgtgcttgtgccaagggggcaatggcggcttcctgtgttctactgcacactgggcagaagatgcctctgattggtctgggtacctgggaagagtgagcctggtcaggtaaaagcagctgttaagtatgcccttagcgtaggctaccgccacattgattgtgctgctatctacggcaatgagcctgagattggggaggccctgaaggaggacgtgggaaccagggcaagggcggtgcgtcgggaggagctgtttgtgacatccaagctgtggaacaccaagcaccaccccgaggatgtggagcctgccctccggaagactctggctgacctccagctggagtatctgggacctgtacctgatgcactggccttatgcctttgagcggggagacaaccccttccccaagaatgctgatgggactatatgctacgactccacccactacaaggagacttggaaggctctggaggcactggtggctaaggggctggtgcaggcgctgggcctgtccaacttcaacagtcggcagattgatgacatactcagtgtggcctccgtgcgtccagctgtcttgcaggtggaatgccacccatacttggctcaaaatgagctaattgcccactgccaagcacgtggcctggaggtaactgcttatagccctttgggctcctctgatcgtgcatggcgtgatcctgatgagcctgtcctgctggaggaaccagtagtcctggcattggctgaaaagtatggccgatctccagctcagatcttgctcaggtggcaggtccagcggaaagtgatctgcatccccaaaagtatcactccttctcgaatccttcagaacatcaaggtgtttgacttcacctttagcccagaagagatgaagcagctaaatgccctgaacaaaaattggagatatattgtgcctatgcttacggtggatgggaagagagtcccaagggatgcagggcatcctctgtacccctttaatgacccgtactgagaccacagcttcttggcctcccttccagctctgcagctaatgaggtcctgccacaacggaaagagggagttaataaagccattggagcatccaaaaaaaaaaaaaaaaa

SEQ ID NO: 54971 - DNA, 175 bp, Homo sapiens
tttaaaaacaaacaaacaaaaccatggtttatattggagccatttataatgatataaagagaatgggactaagagtgaaacctggcttctactccttgctttttcctggctagtcatgtggtccttgataagttcttaaccactgagtccattttcttttctttttttttttttt

SEQ ID NO: 54972 - DNA, 401 bp, Homo sapiens
ctaaaggcatcataggtttaactgaaatacgtcatatgaagttttacaaaaaggtcaacagaaagctcatttgtgaaaacatactctcatgggagcttctttaacattagttcagaggttaatatatttcctggaggtgttttcctagaattgattgcactattgcatggcaataacatttaattgttaaggaaacattatatataggttcaaattatcccttaatgcttgatttctccccttttccatggattttgatactaagaaacaccaatgctttgagattttggtaactattttgattttgataaaacatgttaaaatagaaggtcatgatatttttctatagtttccatcaggaagagtacctcacgaaacttctccataaggaaagaaaactg

SEQ ID NO: 54973 - DNA, 531 bp, Homo sapiens
gatgcccgggagggcctctggtgccactgcatagtatatactaacatcattctgccaaggtaggaagcccctgacccccaagcagtggtgccactcttccaagcctcttggtgcacagtaaacctattgcttgaagctttgaacagctgagaagtggtctggagaggcagaagctgaaggttctatatccagtgtgttttatgtccagaatgtaagagagttgtctaagcagcagctgagagagagcggagcctatttctagccactcctgttgacagtgcacctgaagggctgggatgccgtttttcttggtgttgcatgctcacaactctgctgacattgggaacttatgagagaggaagactcgggaaagcacagatctggacagatggattctggtgtggggaagcacagatactggacagatggattctagtgtgacttgtgactgtgagggttcctataacatatttataaatgttactcaggttaaagtatttaggaatacagttaactattgtaaatatgctt

SEQ ID NO: 54974 - DNA, 435 bp, Homo sapiens
gatcttggagagtttctccttgtgattttagttcataagtatgtcacctttcattttatagtgttcatcattgagtaatggattaagtgaaaatccaggagtatccatctgcagttatgtgctgaggtgataattcatccaacatatttgttagcataaatattatgcttcagtttctgttgcaaattggtgattgtgaaattacagaaagtgattttctagtctgctttttttgtttaattcttgtaatgtaagcaataaatatggagtgtcagtagtctccttccaccccagaaatgtgttggtgtaacattctcgtttcttttaacaacctggaagtacctttcttgtgatcttcactgaggaattagaactatgatagaagttaggctgtggcaaatgggacattcgtagagtgggatagaggtggcagat

SEQ ID NO: 54975 - DNA, 204 bp, Homo sapiens
cctctatgctttttgtttctttgatatatctaaacttaaggtcagaacagaaattcatgtgctgaacagaatggattctttttgcagtaccaatccaattgaatcctctttttattttcctgcgtccttaccagtcactttgatagtgctaactaacctacactatgggggttattcatgaattaagtatgataaaaaaaaaaa

SEQ ID NO: 54976 - DNA, 831 bp, Homo sapiens
gaattcggcacgaggcccgcgcccctagaacgctttgcgtcccgacgcccgcaggtcctcgcggtgcgcaccgtttgcgacttggtacttggaaaaatggacaaggattgtgaaatgaaacgcaccacactggacagccctttggggaagctggagctgtctggttgtgagcagggtctgcacgaaataaagctcctgggcaaggggacgtctgcagctgatgccgtggaggtcccagcccccgctgcggttctcggaggtccggagcccctgatgcagtgcacagcctggctgaatgcctatttccaccagcccgaggctatcgaagagttcccccgtgccggcttttcaccatcccgttttccagcaagagtcgttcaccagacaggtgttatggaagctgctgaaggttgtgaaattcggagaagtgatttcttaccagcaattagcagccctggcaggcaaccccaaagccgcgcgagcagtgggaggagcaatgagaggcaatcctgtccccatcctcatcccgtgccacagagtggtctgcagcagcggagccgtgggcaactactccggaggactggccgtgaaggaatggcttctggcccatgaaggccaccggttggggaagccaggcttgggagggagctcaggtctggcaggggcctggctcaagggagcgggagctacctcgggctccccgcctgctggccgaaactgagtatgtgcagtaggatggatgtttgagcgacacacacgtgtaacactgcatcggatgcggggcgtggaggcaccgctgtattaaaggaagtggcagtgtcctgggaaaaa

SEQ ID NO: 54977 - DNA, 583 bp, Homo sapiens
cgttgtgttattagaaactgttcattaatgtgatgtccgttctgtttgtagagttcactcgtgtcaatatgggaaatcataaagcattgcagatactaaggaacagagtgtacttacagcatctctgtggatatgtcaccatgttgaatgcttccagccaacttgcagatagaaaactcagtgatgcttctgatgagagaggagaacctgatttggcttctggctcagatgtaaatgggagtacagagtcatttgaaatggtcattgaggaagcaactatagattcagcaacaaagcaaacctctggtgccacaacagaagcagattgggttcctctcgagctgtgctttggaattccactgttcagttccgaattaaaccggaaagtttgtaggaaaattgctgcacatggcctttgcagaaaagagagccttcaaaacctcttacattccagtagaaaactctctctgcaagtccttaactttgttcactcattccaggtaacaaaaaccaaaaagtccaaatggtacttgtactgagctttaagtatgcacaacacttctgtgtttgtttttgagtcacc

SEQ ID NO: 54978 - DNA, 412 bp, Homo sapiens
ctacattgtaaagagtcatagattttatgtatagtaagtggttttattaaaagcctaaatattaatagtaaatattttggttcaagggactgagcttagtgttttgttgcttcatatttccataactctctgaagctgatatagttcttccatttaacacatgagaaaactgaggtttcagacactcctcaaaaagcgcaaagctaattaatgtacaaattatggatttgaactcagatatgacttcaaaactctttctgctttaattttatactacctccctacagttccattttaataatggcccttttcagcactcatgttaatcatgactcactcatggattcagcaaacacttcttaattcttgccatgagccaggcactatgcaaaggctcaggttataccaacta

SEQ ID NO: 54979 - DNA, 431 bp, Homo sapiens
aataactgtttggcagtgtgtactttgtttttgtgagtcatgtctcatgaaatttattggaatgtttaatcatatttgctaagaaatgtttctgctgtagttggatttgcccatatttatgtaggtggttttaattttttaaatggtgattagtgttaaaaatcaatttaaatcatgactaatatggtaaaaagataaagcatcaaagcagtatttctcattcctgcctcctcaatatctaatactgggaagatacttcaaagaatattgagattgtctgaagttttagttaagattttcacacattaatatcaaaaaagtaagtttagtatttgtttctccatgggttatttgtaaagctgtaaactgagatatcggtgactccgtattatgactccattagtgagctgtggtatgggtaggattttcct

SEQ ID NO: 54980 - DNA, 225 bp, Homo sapiens
gcagaaaggaagtggtggttctcttttggctgctgtcctgggaagatgcccagtagtccttagcaagggtcgacgcggccgcgaattccagatctatgaatcgtagatactgaaaaaccccgcaagttcacttcaactgtgcatcgtgcaccatctcaatttctttcatttatacatcgttttgccttcttttatgtaactatactcctctaagtttcaatcttg

SEQ ID NO: 54981 - DNA, 62 bp, Homo sapiens
  misc_feature (1)...(62): n = a,t,c or g
gatatttgaagtaattttgttgnattcttatatcacagtttttcacttgtaattttcataaa

SEQ ID NO: 54982 - DNA, 319 bp, Homo sapiens
ctttggtcaatgggacatgagcaaatacagggccagcagaagcttggaaaatgcttgaggggatcgaataggtcatgggtgttcatgcttgccctctcttgcggctgggaaccctgagaactatcatgtaataagcctgggctagtctactggatgataagagaccacatgttgagagggcatggctatcccaggtgaggccccaaacacttgagtgaggccatccctagatcactcattcccagaggaaccactatctgaccacagagatcagccaagctggcacagaccagaacaactgctcagctaacccacagaa

SEQ ID NO: 54983 - DNA, 368 bp, Homo sapiens
cccacgcgtccgctacattattaataagtgacatatttattataatgaaacacctccacgaatttagtgaattgtaattcttatctcttcctctgaagtattatacttagaaatacgtatcttcagttactgatttgggtacgacagggaacctggctggatatcattattatttgatatatgccatataaccttctgtttggggaatataaaatccctcaaattggaaatgttcatgactacccatgggataaatccagctgtttttgtttggggtccagagcataaaaacagaaaaggaaaaatgcagcttcccaacagaccactaccaaaccaccataacagacagtctgctagaagagaactga

SEQ ID NO: 54984 - DNA, 1054 bp, Homo sapiens
gcggcacgaggtcactactgcctgcctgcctgcctgctacggctcagcagcaggtacgtacccaaccatgggctcgcaggccctgcccccggggcccatgcagaccctcatctttttcgacatggaggccactggcttgcccttctcccagcccaaggtcacggagctgtgcctgctggctgtccacagatgtgccctggagagcccccccacctctcaggggccacctcccacagttcctccaccaccgcgtgtggtagacaagctctccctgtgtgtggctccggggaaggcctgcagccctgcagccagcgagatcacaggtctgagcacagctgtgctggcagcgcatgggcgtcaatgttttgatgacaacctggccaacctgctcctagccttcctgcgggcgccagccacagccctggtgcctggtggcacagcaatggtgaccgctacgacttccccctgctccaagcagagctggctatgctgggcctcaccagtgctctggatggtgccttctgtgtggatagcatcactgcgctgaaggccctggagcgagcaagcagcccctcagaacacggcccaaggaagagctacagcctaggcagcatctacactcgcctgtatgggcagtcccctccagactcgcacacggctgagggtgatgtcctggccctgctcagcatctgtcagtggagaccacaggccctgctgcggtgggtggatgctcacgccaggcctttcggcaccatcaggcccatgtatggggtcacagcctctgctaggaccaagccaagaccatctgctgtcacaaccactgcacacctggccacaaccaggaacactagtcccagccttggagagagcaggggtaccaaggatcttcctccagtgaaggaccctggagccctatccaggggagggctgctggccccactgggtctgctggccatcctgaccttggcagtagccacactgtatggactatccctggccacacctggggagtaggccaagaaggaaaatctgacgaataaagacccccgctgcc

SEQ ID NO: 54985 - DNA, 195 bp, Homo sapiens
gagaatcttctgacttaaatacaactttcatggagttcttcaccacttatctgtctctgttaaaatctgaaaatctagcccatggctaaaatctattatatgtgttctccatatttcttgtataagccagtccccagcatctgatgttttgagaagtgcatggagtttcctaaactttgcacagaagaatatcct

SEQ ID NO: 54986 - DNA, 455 bp, Homo sapiens
aggccaccacacccagccagaaagtggttctcatgatgcttctcagaccggcaacatcagcatcactggaacttgttaaaaatggacactctcagaacccacaccagacccaccaaatcagtttgagaactgccattcagtagagaattatttgcctactgtaaattttctaaggatttatgatgggctatttttgacccataggctcagagaatcctgcaaaatccttttttattgtttattctgcagacaaaaatgtgacaatatgctttgaaaacatagatatacttgagtaacatttatttacataaatcccaaattctacctctgaaggtatatgaaatttaactatgtatgtattatgcattttgtctggctttctatcataattttaatttgtaaagaatgtgcttacttgggaaagcaaattaaagtgactactgtttgctatcgtt

SEQ ID NO: 54987 - DNA, 374 bp, Homo sapiens
  misc_feature (1)...(374): n = a,t,c or g
gatgagaggacgggcaaaatattactggcccttttggaaaaggaacacagtacagatcactttccatagatagccaaccgatgtgaactctgtaagccgtattccaggaactcttatgaacggctgcaattgcgagctgtcatctgtggccaaaagactgttgaaaacctgattctaaggatcctttggnggcagatatttctatgtcttgttaatggttttatttgtgtggtttgctaatgatcactgataaaatattatacattgtgaatgttaagtggtgtgtcctggtatgtgccataaatacacattttgtttgtacatttatatatattttaaaccaaattctgctgctttttttacttgaagtttaa

SEQ ID NO: 54988 - DNA, 365 bp, Homo sapiens
gagagtgtcttcccgaagaaaatgtaggaatgcattggcttctatcacaaaaatcctgggaatgttcctgagaagggattttggagatgctcggcctaggactggccctcgggaagatgacccgacctttgtcctgtgcagctgagtgctgaacactggtcagctctggataaagcctgatgtcaccgagctgatggcggggcgtctgcactgaacaccttccagcttggtgggggcacgggaaccagctgtcctcattaaaagtgacctggagtgagatggattcttctgcctatacctccacgtgtgggctccctgaacacccccatcgccatgggctcccaagaagtattgcttctggctgg

SEQ ID NO: 54989 - DNA, 370 bp, Homo sapiens; identical to SEQ ID NO: 34487

SEQ ID NO: 54990 - DNA, 440 bp, Homo sapiens
cggacgcgtggggcttggcccactctcactctgtggagtgtacatttgtttccataaatctgtgctttttttttcattgttttgttggtgcatttcatccaattgtttgttcaaaatgccaagaatctggacaccctccaccagtaacaggcattgggaaggggaaggcagaaaagcggagtgcaaaatgaagtggtagtgggtgctaactaacaagagaacctttgaacacgatgggacagaaataaggtcatgcattttctactatctgtcacctgtggacaacttgccacttcaacagttctggacacttttaagctcccccgaggagaagataggaaacttggacaccctgtgtgggattgagaatcacaaaggggcagtctcgcacctggtcaagataaagctgaactgaactcttcattcacaagtgggattct

SEQ ID NO: 54991 - DNA, 433 bp, Homo sapiens
  misc_feature (1)...(433): n = a,t,c or g
attagtctgtatttataaaggcacacagtcctattggagcttatctttcgttattttactgcagagcatctagacaacttagtccctccagcgggaaagtagcagcagcagcattagtcacagttcttacactacagatcttgtgaaagagaccagtttggtactaattatgagcattttattcaaacaaaagtttttgaaatattacaactggggatttaaaaaattgcagcttagaatctgatggntttttttttttntngaggtggttggttngttttngaaancnagttttgntnttgtngccaggcngnaangcaagggncaatntnggttnantgaaacctntgcntttngggttnangcnattntcctgccttaccctcccgagnagctgggatnacaggccntgccaccacgccgnctaattttt

SEQ ID NO: 54992 - DNA, 359 bp, Homo sapiens
cggacgcgtgggatttatgtatatatatgtatgtttctccaaaaagtgataaaaccaaaatatcactgactcatccctacccatattcttttcataaaacccactcaccaggtacaatagaaacttccctccttgtttgtcagcctcctgttcatgttccccacacacctgaaggtggtagaatcttttcagcctcttagccagtgagctaaatatggctaagcacaggtcataagagcacctaaggccagcatataagccaactacagttcacctttccaaatttggtcctatggatgttgagcatagggaagcaactctcagtattttggattattcaagtgtatgtggtaaaaatg

SEQ ID NO: 54993 - DNA, 6482 bp, Homo sapiens
ttttttttttttttcaagagacaaaatttaatatatgcacacagttttatatataatgcagcatcacaccatgtagggcatttactcttattttatacattcagatatgtttgaaacacttcttaaggctacaaaacagaacatagaaaaataaacaggaatatattcaacacttacaaaaagtgatatgataaagaatataaagtactagtttccttttaacacttcaaaagatatgtatatatacttttttttacaagtaacatcacaaatgatcacatcttcacatgctcttaaagtattatttgtactcagtgtaaggctattatcgtttttcatacataaaattttctagctctgtaacacaatgcaatttttaatccattcaagtaagttcaaccccaaagttgccgcttcccagcattaagacatgcacccacccctcttctaagattttctaaaacttgtatttcggggagaaagacctcttttaaaaaataatcccaattagtgggagagtaaatggctgacattagtagcaaaaccttagttatctgaaaataacatattggaaatgagacattattaggattttaaacaaacaatagcatttagacataaagtaggaagcaaaatacagtaaacagaaatagtgtagccaaatatgcattctcttcagctacactagagtggaccttgcttagtacccttaagtaaaagacaaaacatttacctcatctaaaaatgaaggtaaaacgaaagaggcaaaaataaatattgctagtttctaggatggctgaatgttttctaaaccagaaatggttagaaaggaactttattgcaccaagtcaatcataagcaagtttgcagttcacaggcattttaattcaaccttgagtcacaaaggaaacaacacgctgcaagaatacagtctacagtctgcattaaataagatatatcagcattgtggtctgggaaaacctatgcttgccaggacaaggcagggtgctgagcttaggtcatgccatgaaaatgaatttgtgggttatcagtaaacagtatgaggactacacagatgccagcatcctgctgccaaggagacatggggcaagagttgaagatttgagaggaaatgaagagacatacacaacaccaaagggaaaagggggctggaatcaagttcagccaaagcacctaacacaaaaaacaggtgagctttggtcagtctgttcttcaaaatatgtatgatcataatatggtgaagtttcataatttccaactcaaaaatacaaatgatcctcagttctatacttttgcctctattctcttataaagaaatatgtcaacataacagtatgacataacagttaaaatgaaggacaaaagcttgcttatccttagtttgacctcagcataaggcaaaatcccctggactaatacatttaaaaacaaacttaaaaggaaaaaaagcgaaaccaaccttcatgcaaagattaattttaaaactatcaaaagtcagttcttttattccagaggtcactgagaaaagtaccatctgctaaaattctctttcaagcacttcttccatcatatcctagaggtgagatatgggaaacagaaagcaaatcagtgtttccttcaggagctatattctgttactcaattgagggtaagacaaagtgacaatgaagatatgagtagtatttccttccaatttttaaagattttcagaagctgagatcaaaccccactcaataaaatgcaggagactagaagcaacaacttattttggactcctgagatcaaacacattgaactttcaaatctgggtgtttctatcaaaatgtgattttcattaaaatcagtaagctagtcctacataaaaaagcatgagctgaaagtggaggaccctctatcttctcattccttaactgagccaccgatgttaagaaaaaaatggcttaagcggtaccttcaacaactattctagttaagaaggtgacaacaaattgaggccgcgaattcggcgaaaactctttcctttggttgtgctaagaggtgatgcccaaggtgcaccacctttcaagaactggatcatgaacaactttatcctcctggaagaacagctcatcaagaaatcccaacaaaagagaagaacttctccctcgaactttaaagtccgcttctttgtgttaaccaaagccagcctggcatactttgaagatcgtcatgggaagaagcgcacgctgaaggggtccattgagctctcccgaatcaaatgtgttgagattgtgaaaagtgacatcagcatcccatgccactataaatacccgtttcaggtggtgcatgacaactacctcctatatgtgtttgctccagatcgtgagagccggcagcgctgggtgctggcccttaaagaagaaacgaggaataataacagtttggtgcctaaatatcatcctaatttctggatggatgggaagtggaggtgctgttctcagctggagaagcttgcaacaggctgtgcccaatatgatccaaccaagaatgcttcaaagaagcctcttcctcctactcctgaagacaacaggcgaccactttgggaacctgaagaaactgtggtcattgccttatatgactaccaaaccaatgatcctcaggaactcgcactgcggcgcaacgaagagtactgcctgctggacagttctgagattcactggtggagagtccaggacaggaatgggcatgaaggatatgtaccaagcagttatctggtggaaaaatctccaaataatctggaaacctatgagtggtacaataagagtatcagccgagacaaagctgaaaaacttcttttggacacaggcaaagaaggagccttcatggtaagggattccaggactgcaggaacatacaccgtgtctgttttcaccaaggctgttgtaagtgagaacaatccctgtataaagcattatcacatcaaggaaacaaatgacaatcctaagcgatactatgtggctgaaaagtatgtgttcgattccatccctcttctcatcaactatcaccaacataatggaggaggcctggtgactcgactccggtatccagtttgttttgggaggcagaaagccccagttacagcagggctgagatacgggaaatgggtgatcgacccctcagagctcacttttgtgcaagagattggcagtgggcaatttgggttggtgcatctgggctactggctcaacaaggacaaggtggctatcaaaaccattcgggaaggggctatgtcagaagaggacttcatagaggaggctgaagtaatgatgaaactctctcatcccaaactggtgcagctgtatggggtgtgcctggagcaggcccccatctgcctggtgtttgagttcatggagcacggctgcctgtcagattatctacgcacccagcggggactttttgctgcagagaccctgctgggcatgtgtctggatgtgtgtgagggcatggcctacctggaagaggcatgtgtcatccacagagacttggctgccagaaattgtttggtgggagaaaaccaagtcatcaaggtgtctgactttgggatgacaaggttcgttctggatgatcagtacaccagttccacaggcaccaaattcccggtgaagtgggcatccccagaggttttctctttcagtcgctatagcagcaagtccgatgtgtggtcatttggtgtgctgatgtgggaagttttcagtgaaggcaaaatcccgtatgaaaaccgaagcaactcagaggtggtggaagacatcagtaccggatttcggttgtacaagccccggctggcctccacacacgtctaccagattatgaatcactgctggaaagagagaccagaagatcggccagccttctccagactgctgcgtcaactggctgaaattgcagaatcaggactttagtagagactgagtaccaggccacgggctcagatcctgaatggaggaaggatatgtcctcattccatagagcattagaagctgccaccagcccaggaccctccagaggcagcctggcctgtactcagtccctgagtcaccatggaagcagcatcctgaccacagctggcagtcaagccacagctggagggtcagccaccaagctgggagctgagccagaacaggagtgatgtctctgcccttcctctagcctcttgtcacatgtggtgcacaaacctcaacctgacagctttcagacagcattcttgcacttcttagcaacagagagagacatgacgtaagacccagattgctatttttattgttatttttcaacagtgaatctaaagtttatggttccagggactttttatttgacccaacaacacagtatcccaggatatggaggcaaggggaacaagagcatgagtgtttttccaagaaactggtgagttaagtaagattagagtgagtgtgctctgttgctgtgatgctgtcagccacagcttcctgccgtagagaatgatagagcagctgctcacacaggaggccggatatctgataagcagctttatgaggttttacagagtatgctgctacctctctccttgaagggagcatggcagacccattggatggattggggtgaacagttcaggtcccatgcttggagcattgggtatctgatgtctgcaccagaacaagagaacctctgacggtggagaaccatgtggtgtaagaagagatcttaggtctcttctttataccaagctcatgttttataccaagctcatcttttataccaagctgtgcaggtgactatgcctcctcttctgcacagaatgcttccaccagcatcctgagaagaaatgattacttctgtaaaacatccttttttccagcctctgggaatcagcccccccctctctgcactatccgatcctcatcaacagagggcagcattgtgttggtcagtgttcccttggcgagcaattgaaacttgtttaggccctagggttgagcaattttaaggttgagactccaagtctcctaaaattctaggagagaaataaagagtctgtttttgctcaaaccatcaggatggaaacagtcaggcactgactggggtgcttccaagaggcatgagagtgcctactctggcttgagcacttctatatgcaaggtgaatatgtactgagctaggagacttccctgcaaaatctctgttcaccctgggttcacatccccatgaggtaatattattattcccattttacaaataatgtaactgaggctttaaaaagccaagacatctgcccaaagtgatggaactagaaagtctagagctggtattctagcccaaatctgtctgaccgcaatacacagattatttattcctattagacactggcttctactgaaaatgaaacttattgcagagggaataaatacaaagatggaaagccagtaaagaagtcagtatagaaccactagcgaatagtgttgctctggcacagaccactgtggttgatggcatggccctccaacttggaataggattttccttttcctattctgtatccttaccttggtcatgttaatgactttggagttattcagttaatgaccctttaattctcacaaccaaccagtcatgttgcttgaagccatttatagacgagcttcaaagcaactttaaaagattcttctgtagaagtatgagttcttcctttaattatcattccaactttcagctgtagtcttcttgaacacttcatgaggagggacattccctgatataagagaggatggtgttgcaattggctctttctaaatcatgtgacgttttgactggcttgagattcagatgcataatttttaattataattattgtgaagtggagagcctcaagataaaactctgtcattcagaagatgattttactcagcttatccaaaattatctctgtttactttttagaattttgtacattatcttttgggatccttaattagagatgatttctggaacattcagtctagaaagaaaacattggaattgactgatctctgtggtttggtttagaaaattcccctgtgcatggtattacctttttcaagctcagattcatctaatcctcaactgtacatgtgtacattcttcacctcctggtgccctatcccgcaaaatgggcttcctgcctggtttttctcttctcacattttttaaatggtcccctgtgtttgtagagaactcccttatacagagttttggttctagttttatttcgtagattttgcattttgtaccttttgagactatgtatttatatttggatcagatgcatatttattaatgtacagtcactgctagtgttcaaaataaaaatgttacaaatacctgttatcctttgtagagcacacagagttaaaagttgaatatagcaatattaaagctgcattttaataaatatggtgcatagggaa

SEQ ID NO: 54994 - DNA, 126 bp, Homo sapiens
  misc_feature (1)...(126): n = a,t,c or g
ttcccgccatctaggcatgaactgtctgctgaagcccctcaaatctcctgccttgccctggatggagacctgtttttattttgttatttctgtctagaaagntncaaagngnttcaanggggcgcc

SEQ ID NO: 54995 - DNA, 408 bp, Homo sapiens
ggagacttagccagaaactgctgagagaacagtgaccagaccttgcagcacaaaatggagaggatggccaggcctgcaggagactgaggaaggggattttcagagcctagtggttgacagaatggaggagggaggagggagagggaggagctgagtttggcacccagatttctgggtggatgactaagccaatggagcccacactaagtggtgaacccaggaccaggagcaggttgtggggcaggggatgagttcaatatgggcatggtaagcttgagggactgtgcagcaagctagtggagatatccacagggcagttggctgccgctgtggtctgaatgctgtgtccctgcaaattcatatgaaatccgaacccccaaggtcattatattaggaggtgggggcctt

SEQ ID NO: 54996 - DNA, 384 bp, Homo sapiens
cggacgcgtgggtgcttattttcataaaataaagcaatgacatctgtggcaggcagcttctgaaatggctcccaatgatccttaccttctgatagtcacccccttggagaatccctttcctttgtgtgtgggctggatctagtgacttgcttctcataaatagaatatggcaaaaaatgatgggttgttacttctgagattaggttataagaggcgaatttctgttttgctgtaattttgtctctctaaccctcttgctttcctgtgctcatgaaaccagctgctgtgttgggaagccaccttatggaaaacccatgtggcagagaaccgagggtggtggctggccaacagcaagccaggagctgaggcccacagtccaacaac

SEQ ID NO: 54997 - DNA, 551 bp, Homo sapiens
cgctccgctcacggaaggaaaacagaaataacttgctggcttgtctggagtcacatgtacttaggtgacaatttacagaaagtcatctctgcagcttgatgggcgacaacccttttcaaccaaaaagtaattcaaaaatggcagaactgtttatggaatgtgaagaagaggagctggaaccatggcagaagaaagtaaaagaagttgaggatgacgatgatgatgagccaatctttgttggcgagatatcaagttcaaaaccagcaatttcaaatattttgaacagagttaaccccagctcatattcaaggggactaaagaatggtgcactcagtcgaggtattactgctgcattcaagcctacaagtcaacactacacgaatccaacatcaaatcccagtgcctgcctcaccaataaattttcatcctgagtctagatcttcagatagttctgttattgttcagcctttttctaaacctgtaagtgtttctaaaactatacggccagctcagggatccattggatgttgtttatcaatatcaacagtacc

SEQ ID NO: 54998 - DNA, 431 bp, Homo sapiens
ggaaatgatttctcttctttctccccaaaagaagaaacctatagaaagagtagatgatagtacaggaactgttatttccgatgttgaagaagatgccggggaactaatcagagagagtatgtgggacctttcctgtgaaactgtgagagagcagcttacaaacagcatcagaaaacagtggagaattttgaaaagtcatgtagaaaagcttgataaccaagtttcaaaggtacacctggaaggttttaatgatgaagatgtaatctcacgacaagaccatgaacaagaaactgaaaaactcgagttagaaattcagcagtgtaaagaaatgattaaaactcagcaccagcttttacagcagcagctcgctactgcatatgatgatgataccacttcactattacgagactgttatttgttggaagaaaagg

SEQ ID NO: 54999 - DNA, 541 bp, Homo sapiens
  misc_feature (1)...(541): n = a,t,c or g
gataatcctaggcagtcattcactatgaaaacacttgggcttctctttttttctttgtatttggtcatttgaaaagcctttcaaaaaggagttgcagcctgcatgtgattatagctatcagtagcacttaacctaactgctgagatgaaacttttctttttggaacctgctaattttacatatcaatagaaaaaaaatttcttgtactgttaaaaggcccgactttactaattggtagctactctttggattgagctagaatccttagggacagaatttgatagaataatttttgacattttaatttgacaagaaacaattcagggaaacgattttagtcttgggcctgaagtggagtcttctcttgctgtttgtgatacttagtgtggggaatgcctttgaaacagcactttataaaccctgngatccatttaatgggataagttcaagctgcttgctggttttttcataggagcctccctaaaatagctaacacagtggaaaaanttttctggattttanagggnaatgcagtaaaatc

SEQ ID NO: 55000 - DNA, 326 bp, Homo sapiens
gggatgtcaaagttgactcaggtggatcatctagccattattcctctcatttgtactcatttttaatgatcagcacctgagctcaacagtatttttgtgacactttcaatctgcaggactgagagagctgctgtttatctatttctcactggagacattagcattaatgagctgactcctgcactgtctggtgctaactatgggtcacattggtataaaggtagttgcctcttgaggtggcccatgccatctctattttctggacaacagctggcagataaatcttccactattaacatcagtgtgaactgaatgccagctacctg

SEQ ID NO: 55001 - DNA, 624 bp, Homo sapiens
gtggccttggggttaaacgaactggatgatggccgccagctactaacagacctcaacttgcttacccctggaatgtggtgatggatggttccttgcagggcatttagggtggaaggcagtgatgtggatgtacctcgcagagcggatgttccactgtgtagcctggcttctaccctctacaagcttaagagggaaaacttagggaactatgacctaagcagtcaagcaagaaaccacacatatgcacatacccagaatcgaacaccactagaactacccaaaaactgagatggttgggggaggtatcatttattcatattactttctcccatgtactttttgaaagacagcttattctttcccttttagagatgagggaccagatttaagagcttattttgtgctttacattcattaactcacttgatctccacagcaactccatgagaagggtgctaatattaccactgggtactgagtagtacctctctttcactagttgcataataagaattaacccagagagtgacctgagggcgggattttggacacacttgacaagagaggaagaggctggagcgcaggaggtagctggtgctgggctcctagtcttggcagaggagc

SEQ ID NO: 55002 - DNA, 73 bp, Homo sapiens
agggttacatttatcttttttctttatttgtctgccttgattagttcaaaaagactagtcatcaagttctgag

SEQ ID NO: 55003 - DNA, 617 bp, Homo sapiens
tgttaccaatctgagactataggattttattaatttaatacaaagcaaaaagatttagaccactgcatcaatggtgaaaccttatgcactttctgaatgcatcattattgtcttggtactggtatttcagaggaagatcacccacccaacctcaccctccaagcacctgacaccggctgagacagaacgggagcctaaaaggacaactggtcttccctggcacaacacttcctatttctgaaatcacaggcagtgcatttagtctgacctgggacatccaggccatctgagtacagcagcctggatatgaaatgcaccatggtcttgcaggagcttaggaaggaaatgatatcaggaaagagatgctcaatatagtgtgctcaccttacgatgaacttattttattgcttacagaaggaactgaagcattcttttcactctgtcggtgtattcgtttctacacctactagatactgttttggcagagggaaaatggcaaaacaactaaaaaaggtgcacacctgtggcaccaccttcctgtacttctctccagagccctcaactcagtgctcaatagtttacttactttttcctttagtgcaataaatgatgaaggg

SEQ ID NO: 55004 - DNA, 417 bp, Homo sapiens
ccaccctggaagctcatcaggccaagacccggacagagcttcagaggagtgttgagtgacacctgaggatgcggctgcacacactcagccaagggccgagtctcacctgcggtggggtttcggctctgcctgggggctccatccctttcagccactcgtggccttggggatttctggttgtccccagctgggactgttcacagatgtcacctgcagacctgcctctccctggcctgaggttcaaaggcctcatcggatggtcagtacagtggggtcacctgctgtttctatacaacagcagggaaggggccatggagcttttccctgctgggtgctcctgctttggcccagcccacctttcctggtgctccaagctaggaggctgtggccccagcctgaggagggtgtcctggcctt

SEQ ID NO: 55005 - DNA, 394 bp, Homo sapiens
aacgtgagtggtcatagcccgatactgcttatggcagtattttaaattggaaatggaaaagctcagtgtggcagtcttggagactgtgtgaaaaacagtccattttgtcaaacaatgtattaggtctgtgcgcagtctctaaacgggatgaagaatgtcaggggatttcaaggtaacagcatgccaacaaagaaaaaagactttttcttctttttcaatttatttcaaatgcttaccttggaacttgttagttaagagatgtatttgctcatgagtagataatattggagaagaagaaaaagccgcggtacaaacagtgaatctcttcttaaggaaatcctggcatgcagattaatgttgtttttattcaggtttttgatgtcattacagaatt

SEQ ID NO: 55006 - DNA, 1004 bp, Homo sapiens
attcattaccttaaaactttattgacatatttcaaagatataggaaaggtaaatgatttcaagaaaatccgtgtatttctaccatgcagatgtaataaatgttagcatttggctatatttccttcagacacacatatgcatgtaattgcaaatgttagatacatttgaagtttgctttgttacctgtttgaccctgtcccgttcctccctccccagagtccccagagggtaaccactagagggggcataatatagcatgtgtttttatatttttaatacaaatatattttttaaaagcgctacaaaatattgttttatatatgtggtagccagcttccagatggcccagtgatccctggcctcctggtggtcatgccccagtatagccttctcctgcattttacagtgctgacttttgtaactaccaggatattgagcaaatgcagtgtgtgatttctgaggccatatcttttaacccttttttttttttttaaagagacaagatctcactctattgcctcaggctggagtgtggtggcaggatcatagcctcactgtaaccttagacttggactcaaacaatcctcccatctcgcctcctcctataaagcactgggagtacaggcatttttgctcatttttctatgttgttttttttacttgtcagtttttagatattacattttttgaatactaatgatctgttatgtatgttccaattatcttttttagtctggtttgtcttcatattttggttatgaaatcttgaatttttaaaaacgtaattttaccaatctttcataatgatttgctttttctggtttttgtataggaaatgtcataaaaatagtcctattcagccttccaaaagttacaaaatttttgtttttaacatttagatgtttagtccaactgaaatttgttttcttttatggcatgattttggaatcttgttttaattatttttacatatttatagctgttcctccaagtatcaatttttc

SEQ ID NO: 55007 - DNA, 354 bp, Homo sapiens
gtaaaaccctgtctgaaatatatattgagcataatttcatgggtttattgactacttgtgtatcttctttggaggaaactctgagacttagtgatttaatttctgaaatggagatagtggttctggccttgcactatttttgagaatgatgtaatatgaaagatgtatctaatcccccagcacagggcctaacacttagaagacatttattaaacgttaatttcttctttcccattccttctccagtttcacagatgaagaaactgaggcttagagagaagacacacaagtaattcaccagggttcatcttacagttagcttgtgaacgctagattcaaatgcagaattttgtt

SEQ ID NO: 55008 - DNA, 386 bp, Homo sapiens
gcagcagagggaacagggaagaaacctaaaggctgcaggctgccaggtgtgcttggagagcccccttcttccgccgggcctcgcaagcagcgtaggactgtggagaagggcggtgggcaaggagggaactcgagagcagcctccatgggcacacaggagggctggtgcctgctgctctgcctggctctatctggagcagcagaaaccaagccccacccagcagaggggcagtggcgggcagtggacgtggtcctagactgcttcctggcgaaggacggtgcgcaccgtggagctctcgccagcagtgaggacagggcaagggcctcccttgtgctgaagcaggtgccagtgctggacgatggctccctggaggacttcaccgattt

SEQ ID NO: 55009 - DNA, 388 bp, Homo sapiens
ggggaggctgaggcaggtggtctcgaactcctggcctcaagcgatccacccaccttggcctcccgaaatgctggaattacagacatgagcctccacatctggcccatagtttgttttttctaacgttgagagacatttgagttatctcacatttttcctgttacatcaatactagcatgagcattgttacatgtgtctgttggtagacctgtgcatttctgttaggtatgtatctagcagtggtagagggaatcaggtcgatgcatcttcacttttgctatgtaaaacaaaactttgccggagagattttatccccttgttcatagaaatggattagaatttcagcactctgcatcttctaatacttggtatcagacttttaaatttc

SEQ ID NO: 55010 - DNA, 440 bp, Homo sapiens
tgtggatcttacaaagccttatcagaaccaacagctatccattagagtgcctctacggtcaagtatgctaacaagaaattcccggcagccagaagtactcaatgggaatgaacatttggggtatggatttaataggccttatgctgctggtggaaagaagttggctttaccaaatggcccaggtgtaacttctactttaggttatagaatggttcatccctctctactgaaatctagccgatctccattttctgggactatgacagttgatggaaataaaaattcacctgctgacacatgtgtagaggaagatgctacagttttggctaaggacagagctgctaataaggaccaagaactgattgaaaatgaaagttatagaacaaaaaacaaccagaccatgaaacatgatgctaaaatgagatacctgagtgatgatg

SEQ ID NO: 55011 - DNA, 569 bp, Homo sapiens
  misc_feature (1)...(569): n = a,t,c or g
tgccaggaaaggtggtgacaaatggtagccataattatttattgtcctctctgtccagactaaatgttcccttttccatattaaacatttaccattccgcccgcctnnnnnnnnnnnnnnnnnnnnnnnnnnnnnnnnnnnnnnnnccttcatccattcttagatcttatcctctaaacctttagtcatcgtttcactctcctttgattccttgttatgggtctttcaactctggaaagacaaagagatagttggagaggaagcccggtcactgagcatctacagagggctaaatatatttattctcatttgttattcccaatattctctgtattgtgatttccatttcacagatgaggaagctgagggctagaaacatgcagtactttgcccaaagtcacacacatattaagaagagctgaggtatgaatctgggtctgcctgactcaaagcccaaacgctttcctttgcatcgtgtcacaaagtcatagaccatgacattgtttgtatcttcaagaccagttattaactttctggctccaaggagatcccctgcccaagtgcctagg

SEQ ID NO: 55012 - DNA, 372 bp, Homo sapiens
ggcatgctcatattcaggtgagaatacttaggaaagacttttccctagcccctgaatcaggtgtggaaggagtggtctgatcaggtcacttacagggctgggtccacagagaccttgtttatgcctcccccatcacttcaccctggggtctccaggatgcctgcaagaggtttggcctcttccatggtggaagcaaatgattccatcacgagaatatcttgagtgaggacacagatgatgtgtgttcacatggccctgctccccatggcctccctaatgcttaatgccgtccttgcattgggtcagtgagtggaagaggaatcactccacctcctcattagtaggaaaacccaggtgacactggaccaggtt

SEQ ID NO: 55013 - DNA, 388 bp, Homo sapiens
gtaatatttagctcttcccagggaaatcagggaaggcttccaggaggaggtaaatatttgatccaagactgagggatgtgtacaagatagctggcaatcagaaagcatgaccgtgtagtaggcagaggacctggcatgtgtaaaagcgaggaggcagaagagacaggacattagccatgacctttcagtagcgcagtgttgcaagaggacacctctgctgtggtgtggagaagaggtgagaagccaggccatgtatgcaggaagtgtgtcacaaaaggcttggaaagaagatgattttattctgtagggggctaaagagcattgaaaaatgcttagcaggaaggtgacagacttatgtctgctttcaaaagaagctctgctgtgaatg

SEQ ID NO: 55014 - DNA, 689 bp, Homo sapiens
atgtctaaaattaattcaaaagaaaaataactatttgaattattgcttgtgtgtgaaaacaatatttactgtagtattccacagtttcttctttttttaagctaagacaattaaataaaaatgtaagggataagaaatatagttgaagtcacaataaagtatattttcttttattgacataaaacataaattttaaatgttggcttgttaagaaaaaaattctcctggtaaatattatgcataaccgttgcccaaaaatgtatacagctgttttccaacatatttatatacacagtggttcacttaagaccagccctgttagaaccttctgaatataatgtgctcttaatttataaatgggctaccctcagtgtataaaatatataggcatgtatgttatacatacaaagtaaaaaatataaaaaggaaagatggaagaaaaaagaaagtatcttttcctataagatccagacagaaagtcattataattagtgggaccatggaaaacatctgaaggatttcagttttggcaaataacttttcagaaaaatatccaagctgtgagaacactaaatgtctattttaataatttagtagaggtttctattcaaacattcagtgaagatgttgctgtcttcaactatgtagaaaagaagacttttagggtgtctgttaaaagcaaagagctg

SEQ ID NO: 55015 - DNA, 349 bp, Homo sapiens; identical to SEQ ID NO: 43111

SEQ ID NO: 55016 - DNA, 2803 bp, Homo sapiens
ctgagagacaatggtcctgacataataaggatctttgattaacccccataaggcatgtgtgtgtatacaaatatacttctctttggcttttcgacatagaacctcagctgttaaccaaggggaaatacatcagatctgcaacacagaaatgctctgcctgaaatttccaccatgcctaggactcaccccatttatccaggtctttctggatctgtttaatcaataagccctataatcacttgctaaacactgggcttcatcacccagggataaaaacagagatcattgtcttggacctcctgcatcagcctattcaaaattatctctctctctagctttccacaaatcctaaaattcctgtcccaagccacccaaattctcagatcttttctggaacaaggcagaatataaaataaatatacatttagtggcttgggctatggtctccaaagatccttcaaaaatacatcaagccagcttcattcactcactttacttagaacagagatataagggcctgggatgcatttattttatcaataccaatttttgtggccatggcagacattgctaatcaatcacagcactatttcctattaagcccactgatttcttcacaatccttctcaaattacaattccaaagagccgccactcaacagtcagatgaacccaacagtcagatgagagaaatgaaccctacttgctatctctatcttagaaagcaaaaacaaacaggagtttccagggagaatgggaaagccagggggcataaaaggtacagtcaggggaaaatagatctaggcagagtgccttagtcagggaccacgggcgctgaatctgcagtgccaacaccaaactgacacatctccaggtgtacctccaaccctagccttctcccacagctgcctacaacagagtctcccagccttcttcagagagctaaaaccagaaatttccagactcattgaaagcaaccccccagcctctccccaaccctgccgcattgtctaatttttagaacactaggcttcttctttcatgtagttcctcattaaggcaggggccagaatatctcagccacctgcagtgacattgctggacccctgaaaaccattccataggagaatgggttccccaggctcacagtgtagagacattgagcccatcacaactgttttggactgctggcagtctaaaacagtccacccaccccatggcactgccgcgtgattcccgcggccattcagaagttcaagccgagatgctgacggttgctgagcaacgagatggtgagcatcagtgcaaatgcaccattcagcacatcagtcatatgcccagtgcagttacaagatgttgtttcggcaaagcattttgatggaatagggaactgcaaatgtatgatgattttgaaaaggctcagcaggatttgttcttaaaccgactcagtgtgtcatccccggttatttagaattacagttaagaaggagaaacttctataagactgtatgaacaaggtgatatcttcatagtgggctattacaggcaggaaaatgttttaactggtttacaaaatccatcaatacttgtgtcattccctgtaaaaggcaggagacatgtgattatgatcaggaaactgcacaaaattattgttttcagcccccgtgttattgtccttttgaactgttttttttttattaaagccaaatttgtgttgtatatattcgtattccatgtgttagatggaagcatttcctatccagtgtgaataaaaagaacagttgtagtaaattattataaagccgatgatatttcatggcaggttattctaccaagctgtgcttgttggtttttcccatgactgtattgcttttataaatgtacaaatagttactgaaatgacgagacccttgtttgcacagcattaataagaaccttgataagaaccatattctgttgacagccagctcacagtttcttgcctgaagcttggtgcaccctccagtgagacacaagatctctcttttaccaaagttgagaacagagctggtggattaattaatagtcttcgatatctggccatgggtaacctcattgtaactatcatcagaatgggcagagatgatcttgaagtgtcacatacactaaagtccaaacactatgtcagatgggggtaaaatccattaaagaacaggaaaaaataattataagatgataagcaaatgtttcagcccaatgtcaacccagttaaaaaaaaaaattaatgctgtgtaaaatggttgaattagtttgcaaactatataaagacatatgcagtaaaaagtctgttaatgcacatcctgtgggaatggagtgttctaaccaattgccttttcttgttatctgagctctcctatattatcatactcagataaccaaattaaaagaattagaatatgatttttaatacacttaacattaaactcttctaactttcttctttctgtgataattcagaagatagttatggatcttcaatgcctctgagtcattgttataaaaaatcagttatcactataccatgctataggagactgggcaaaacctgtacaatgacaaccctggaagttgctttttttaaaaaaataataaatttcttaaatcaactcttttttctggttgtctgtttgttataaagtgcaacgtattcaagtcctcaatatcctgatcataataccatgctataggagactgggcaaaacctgtacaatgacaaccctggaagttgcttttttaaaaaaaataataaatttcttaaatcaaaa

SEQ ID NO: 55017 - DNA, 1356 bp, Homo sapiens
aggatacctaccttcagggagcttataatctgactatgtacaagctgtctataatggtagtttttagaagatataaggaaaagataaaggataattaaggggaagtggatggaggacacagaatagtaggaaatggttttgtaatgctccattgcgcacatagcaaacctcattcaacatacagacctgctcccttttccctaggtccaaagaccttaaaaaacctggagctagaaagcagtagactggaggcttctacagactgtaggattcaaggtgatatttgcagactggctttatgagagacaacactgatctactaggggctggaccctagattggttgccagggcttgtgtgtgaatcaaccctaggaggaaaaacctactaccaaaccagaagagcaggcctaagagtactttgagcttctagaagaagtaagcgggaaaggaagagaaagagtagaaagttggtgcatcttctcctccccaagagcctgagtataagaagttggattttaagggtgggggagctgggttggagaaaggtaatataattaaagccaccacaaaacaacctaaacaagccatgttcatgagtaattgtaagtggcttctggatgagacctggcagtgtctctacatacttcctcagggagatagcaattgaaaatgtaattgaataaataaggaaaggaactgctatttggtgtgttcctctgtggacccagtttatttaatccttaaaataatatttttgggaagacattgattttgtccatttatgtggatgggaaaactgagactcattaatttgtccaatgtcgaacagctggtgttagtagagcctagactcaaacccagcttttaaagcccttgttctttactccactaaactgtaacctgtaatcctgtatgcactaacaggagttttcggtgaccttgaaaacacagattactataattactataataaatcccttacattcctgtctctagcatggtttagggagtgccaaggctcaatgtagatggggtcaccttgtcagagcatctgttcatacagaaactgggtttcctgcagaccccaggtgctgcataggattcctcaaaccctacaggatatatctccccactggctgctgtccattttgcttgttaccctgactccccctcttcagccagagcagtctttgtaactaaagctgccagcctggctcatctttcctgacaacgtgcatctcctgcctgtgatcacctttgtgcttggctcctgccctcagcctgaatgtgttctaggaggctgaattcctgcttctagtcctgccaagaccagcttggctcagccctactcactc

SEQ ID NO: 55018 - DNA, 318 bp, Homo sapiens
ccgggattcaacatcttcaagatctcaaaaatcaatgaaaatctaaaatagctaacatttcaaaaataaaaatgccaaaatgcaacaggatcgcttgaggccaggagtgtgagaccagcctaggcaacaaaatgagactcccatctctacaaagaaaaaaaaattagctgggcgtggtggcatggtgacctgtagtctcagctactaggaagactgaggcagaggatcacttgagcccaagaggtagaggctgcagtgagccatgatcacactgtactccagcccaggtgacacaacaaaaccctgttgtatcttgaa

SEQ ID NO: 55019 - DNA, 183 bp, Homo sapiens
  misc_feature (1)...(183): n = a,t,c or g
gctttttttaaaaaaaaattaaagtggtttagtaaatggcaaatgcaagttggcattaatgatgtaataattcttagaatgactatcttaaaaaatgtaaaagtaggccaggcacggtagctcacatctgtaatcccagcagtttgngcggncanatcacctgaggtcangagtttganacca

SEQ ID NO: 55020 - DNA, 295 bp, Homo sapiens
tcccattccccacctgttatactggttgagatccacggtttcacgagactcgatgttggcggagctcgggggaagaggcatctcgtgtgttgctggtgggacagaggtacaaacccctgagtacctttgcttttttaaacccctttgctgagtagcatgcactctgctggaaccaccacctccagactcctcttaaaacagaaaacgagcccgaagttatacatgagagtccgaaagtgtttttaaatcaaacagatgcaaaatgccattttactgagcatgacgcaacaccaag

SEQ ID NO: 55021 - DNA, 612 bp, Homo sapiens
gtctagtatttgctttaacatattctaacgaaaaaagtgtggggaattagatgagatgcactggaaaatgttaactattgaagagttgggagattcatttttctgtttttctcttttgtatatttctaaaaattatgtaataaaaagttttctaaactgaattaaaaaaataaagaattggagatctaaataagttaagtgacttccccagggctacccaattctggtctccaggctctaattcctgtgccatttcttctactccacactaagccagcgtgctttcatagtggtactgtttcgagacacaaatagattatactggtgcaaggctccatctttatctcccaacacatcatgtcaggaatgcagagcttgtatatgctgtacatatacacgtttgtgggtggaaacagcacatgaggaatgggatgttggtgggctaggtaacaagcctgatttgggcaactcgggaactcaatggcaatttcttgtgttatacaatgctgttttcagtaaaattttggaaaatacataaactaatccagtttgctgtgtttgggtcttcttcacatcctagcagaacttagaaaataaacctattcatgttag

SEQ ID NO: 55022 - DNA, 342 bp, Homo sapiens
gtcttagtctgtatttccaatatttctaattcctgagccacgtcaaagatgccttgccaaattcctccccatttctctacggggctagcaaaaatcttcagctttatccctcaacccctgccaaaggaacttgattacatggtgtctaaccaaatgagcaggcttaggaatttagatgagatgtgtaagattcacttacaggcagtagctgcttctagcattagcaagatcctacacttttaccttctttaagggtgtacattttgatgttgaacatcagttttcatgtagacttaggactcatgtgcagtaaatataaataagtgtagcatcagaagcagt

SEQ ID NO: 55023 - DNA, 369 bp, Homo sapiens
cctagcagatagaggacttggtctgaccttcagggttgtgatggggcaggttgggaggtgggcggggagtctctgtggtctgggtgctgaggttgacccgatgggcaggtgaagaaaatcaccttctccattccccttgatttctttatcgtgtgccgcacgaggcatgctgaagggacacacacctttccccctttttatttacaaagtagagagctgagaaagacagctcatgttctgttttgttttgtacacattatctttctcaagagatgtgatgtccttaagtaaactgacctgccttcatggcttgtcctgtaatgaatgcgttcaagacagtgttttggggacaggaaagaggcattctta

SEQ ID NO: 55024 - DNA, 410 bp, Homo sapiens
cttggatataatataattagaatgtatacgcactgaaattgtttccatggaagaaatgcagtggattcagttctttattacatacaatcttaacagccagtctccaggagtgcggcaacagatctgttctcttcttaaaaagttgttttgtaggatacaggaaagttctcaggtactttatatcattggagcagagtaaatccaaacgtgaaccagagaatgagttaaccaaacagcacccttctgtttctttacagcagtataagaatttcatgtcatccatttgtaacagtctttttgaagcattgtttcctggatcttcctactcgactagattttcagctttaaccattttaggttcaatagctgaagtttttcatgtcccagaaggcagaatttatacagtatat

SEQ ID NO: 55025 - DNA, 358 bp, Homo sapiens
  misc_feature (1)...(358): n = a,t,c or g
tctcgaggatccgaattcgcggccgcgtcgaccgcggccgcgtcgacatnnnnnnnnnnnnnnnnnnnnnnnnnnnnnnnnnnnnnnnnnnnnnnnnnnnnnnnnnnnnnnnnnnnnnnnnnnnnnnnnnnnnnnnnnnnnnnnnnnnnngtttgaacccacttttaatactcaaagatgtataggggtagaattgctgggtcatagtaattttatgtttaacttactaaggaactgctcaactcttttccacaggagctgcaccttttgaccttttcaccagggtgtatgaggtgccaatttctccacaatcttgccagaaattgtactttttcatttttttaattatagccatttc

SEQ ID NO: 55026 - DNA, 2773 bp, Homo sapiens
  misc_feature (1)...(2773): n = a,t,c or g
tttttttttgcttttcgggtctatttattacagaactagcagagccctaatacagtcattgctacgtggccataatacatgtattctataattgcgcctaattttattcaccggaggaacgtcctttaaagattctaaatttttcagaaatgcaacattcaaggttaaagtcgctgctagaccaaggctaaaccgtggcgaggtagttgcttgcgccgcagagtgtgggtgtgaacagctggagctcagtggttcctggagactcagggaccacctgtattccacatccggcttcccacccacggcacacgcagtatgacctggggtttcccctttatacagtggaatgctaagtgcctacaccctagccggggtcagccaactatggcctgtgggcaccatcccacctgcagcctgtttttgagctaagaatgttgttgacacttttaaaaacagagaacatgtgacagtctgtacgtgggcctgcaaagcctaaaatctttactatctgcgtctgctttataggattgctgggaggattacaaagactttattaggccagtgcccggctcaaagttagcatgccacacaaaataatacgtacagtacagctattcacgtctccaaaaagcaattgtcccacatccaaattttgcattttgtccagttgatgtctctccttccctccaaaaaaaaaaaaaaaaaaagacaaaataaaaacacgaagagctgcatcttgatcatcatggacagatacttttcagttaaaaagttgctggtagtctgagttcacttacttggagtatggactaaggaggggaaagcaaagagatgcgacatcagcagcagaaagcctgcgacacggcagctctgctcagttttctccgtggggaaagatcggaacacttacaaatgagaatgggactttaagtagatagtatgcaatggaaaactgagccggcaacagtacttaatgctggttttctcaataaaatcattttgctgtgtaaacgcgcttataatggggatctgttatgagtctcaggcaggcgacatgaaaagccggcctttcaaaatctgattaggtggataatgtttgcaaacatgacgccctggcaaaaccggtctgattctaaggtaaactcattttggacataactgatgtctcactgagacagcttttcaaagcatgtctgcaaacaccggacccccggggacggtgcgtgcgtgtaggggagggaaattccagggtttcatatatcaagatgacacacccgctgcacacttctcttagaaagtccacgancacagtactgtgcgtcacaggtattgagaaacaccaccatagagtcaattgactttgtttaacctataaccttttttcctcccacatagtaggtagtaacatcacacggaaacagtgctctgaagacattctggacacatcgtatacagcacagccattcaaatcaacggcaacagaacgcacgaagaacctggttttctttcaaagcatgagcagttctcattttacaacatgtgttttaacataattcagaaagtgcaatctttgcatgacaaccagataattctcaaaggttactagtgagctgataaaattaacgtttggcaaggaggtcatggtttacaggtaggctgtccgctcaccaatgctcagaaaaattcagcagaacatacttttcatatttagatccgaagagaggtgagagacattctactcaagtcatggctgggctttctgtcctcaaacgaaattgggcaggccatttgcgtggtttctctggataagttccatttattaatcattgtacaaaaaaatcttggcattcatttgaagagaaaagaagttgctatatccaaatatttaacattttaacattgtgaaagttcaacgtttataacagggctttttaaaatggagaaaagttttggaaaatttttaaaaagaaacttatgatttattagagtacaggatccaaaacacgtttttagaaaaatataaagtgcccaaataccaacttacacaggtgatacaggcttcctggagccccatgaagcattcatgaagaaagacatttaaaaacagtctagatacatatgtacagctgggtcagtaaaggtaaaaccatctttcttgactttgatgtgtctaagaaaaaaggaaatcaatcaaaccagaaaaccaacaattgcaactctcagcatgctcaggttcttattaatgcatctcattcatattaattaattccgtattatcaaactttcccctttaaatgaaagtagtgtacaatcctcccaaccttggcgggccaggtgctgtgagtggttacgtttccagatgcaggttcaaatcctttgactttggatttgactgatgaggaacatggacagtggattaaatagctcattcaggctggaggagccaggggccaaatccccatctctttctagtaactgcttaaagccttcccttgctatgaagtggtctcaggtggctttccaaaccttggtcaccccagggtttccaaagggtaaacaagcagcaggcattcaacatgggtgagaatactgcatgcagatggacagacaggtgcagagacaggcccctaacgccccattcactagagcaactgcattattttaaatgttgagagcaaagtaactaggtcctaacttcggaagttagcttctatcgattaatgacaagattagctcgcttgagaactggcaggccgagagttgggtggagctc

SEQ ID NO: 55027 - DNA, 373 bp, Homo sapiens
gggataatggcattgccataatttaggagaatgtctttaattgggagatacttgctaaaataggagtatcatgatgtctgcaacttaccttcaaatgcttcagcaaaaacagacagggagagaaagcaaaagtggcacaattgttgaatctaagtggaaggcttatggatattaaaaaccttaatcataagacataatagtcatagaggatgacagaccacccattttttatgttattttcacaattctagggacctccatggaggcaccttaagtactacccacacctctgcttttatctggtcatacactgggatttcacataatattttattgaaaaaaaagggttcactgcaaaaaagtggtgaaatca

SEQ ID NO: 55028 - DNA, 521 bp, Homo sapiens
  misc_feature (1)...(521): n = a,t,c or g
ggctctgtcaatgtcaggcccgagaacagcctgcggaatgacagcctggggtccttgtgccacctggtggacgggaaaggcagggcggctgcagtttcagaggccagagcctggccctcctgtcatctgctgacttcacagaaggcccaggctacaaaccccacagtttatccaaggaaaatctagttaaaataatccaatggacagaagccccaggaaggggtatttccaacacttggcgtctcaatgaggataaaagggagggactgtaggttgtccagcataaggagccccagagttctttcaccagcagacagattctccatgtgttttcccactgttaaggactctgtccaaagaacctcagcatcagctccctcaagcttaatgatccaggctgcagaagaaagttgtcactccagtnagttacccagggctccagggagcccacagcagcatcagacccatccaggggctacagggcctgcccccctgcaggtagaaacacagtatacccgttt

SEQ ID NO: 55029 - DNA, 420 bp, Homo sapiens
gagaaggatgacatggaaaccaaacttctacatctggaagacgtcgtccgggctctggagaaacatgtagatttgagagagaacgacagactggagttccatagactttctgaagaaaacactttgttgaaaaacgatctgggaagggttcggcaagagcttgaagctgcagaaagtactcacgatgcacagaggaaggaaattgaggttttaaagaaagacaaggaaaaggcctgctctgagatggaggtgctcaacagacagaatcagaactacaaggatcaattatcccagctcaatgtcagggttcttcaactgggacaggaggcttctacccaccaggcccaaaacgaggagcatcgtgtgaccattcagatgttaacacagagcctggaggaggtggttcgcaatgggcacaac

SEQ ID NO: 55030 - DNA, 372 bp, Homo sapiens
cttcctccaaactttaaaaagtacttccttgacaaaatttctattcattataaaacatttcaagtattttaagcttaaattttgcttttgctgaaagcctaccatttggcgtgttaagtatgaaatatagtgcagacttttatcttggttttaagtggggctcaataaaaaacaccagccacttttgtaataatggcatcacagtgtcatcatgtatgcaagcaataaaactctttagggtatggttttatactgaaaatttaatatgaaggccccttcccacaagaatatagataattattaactttctagatgtgatacggtaattcgaattgcagagtataaggaagggaaatgggaaggggcatcatt

SEQ ID NO: 55031 - DNA, 387 bp, Homo sapiens
caggattccttaggaaagaacacaagcactttgtgggatagagcacttgtgtctgagataacaaggctgttagtagttgtaggaggcagagcaatggatattgcatttattgcttctgttagcattagaacatttttatatcacattttaaaagccccagctaaaagccagcggatgaagttttaagttgtacccaagtttaattttcctctgggtgcgcactttcatttggggattcataatttttcaaggcattggtaccgtggtactgcttctgagctttgcttctctcaatagagtgagctttcaaactgtgataaagattatttgttacagtgttacttccataaagactgctattagaatggagataacttgtttttaaga

SEQ ID NO: 55032 - DNA, 476 bp, Homo sapiens
tcctttctttctggttgaggtagggctcttaaggtacagaactccacaaaccttccaaatctggaggagggccccatacattacacttcctcccttgctcggcggtggattgcgaggcccgtcccttcgacttcctgaagctggatttttaactgtccagaactttcctccaacttcatgggggcccacgggtgtgggcgctggcagtctcagcctccctccacggtcaccttcaacgcccagacactcccttctcccaccttagttggttacagggtgagtgagataaccaatgccaaactttttgaagtctaatttttgaggggtgagctcatttcattctctagtgtctaaaacctggtatgggtttggccagcgtcatggaaagatgtggttactgagatttgggaagaagcatgaagctttgtgtgggttggaagagactgaagatatgggttataaaatgttaattctaa

SEQ ID NO: 55033 - DNA, 504 bp, Homo sapiens
  misc_feature (1)...(504): n = a,t,c or g
ccccaagggggagctgcagggccagaatgtgctgaccgtccggtactcgctggagctgactgctgcccgctttggcttngatgtggaggccgtgcggaccttgctcaattcagggctggagaagctcttccaggcccggaagcatcggcccaagccgcacctggacagcaagatgctggctgcctggaatggcttgatggtgtcaggctatgctgtgactggggctgtcctgggccaagacaggctgatcaactatgccaccaatggtgccaagttcctgaagcggcacatgtttgatgtggccagtggccgcctgatgcggacctgctacaacggccctggggggactgtggagcacagcaacccaccctgctggggcttcctggaggactacgccttcgtggtgcggggcctgctggacctgtatgaggcctcacaggagagtgcgtggctcgagtgggctctgcggctgcaggacacacaggacaggctcttttgggactc

SEQ ID NO: 55034 - DNA, 318 bp, Homo sapiens
gcttctgaatctcctcagccgtctggtttactgatactttctcacttctgcaagtgattaattttatacatactgacattttaattttttttattatagccttagatgatacatagattttgaggatgtcttatgccttaggtagtgactgctacttagcacatggattgttttaaatgttttgctatgacttagctatagccccgcccaaaattattaaactactttgagactatttgttaaacttaggtaagtcttcacatcactgtcctagtagtacctaaagtagtgtctaatcttgtactttttttttttttt

SEQ ID NO: 55035 - DNA, 384 bp, Homo sapiens
tttctaacctaaccactcccctcatcaagcttcttcactatttatccatatgctctctatcacccttactcactgtatctttttttaaaaaaagaaatggaatatctaacaagttcttaggtgacgggggcaggggggcaaagaaaagaaacacgatcttgtataactgacaatggctacatccatgtgaatactccatatgggaataataacctttcaagtgttaacaaagtggagtcactcatgccaaatgtcatataatcaaactgcaactgtaagaaagcagatagatcccaaaacagacgagtttttcctaaaaacaggagattctagcctacctgagtcagaacaagaaagtcccctctgctttaacccttataaaaa

SEQ ID NO: 55036 - DNA, 641 bp, Homo sapiens
ggcatacacagttttaactacctagccaggggcagctggcctttccccaggccctttaaaacacctgtttgaccagcctgtgggtcctttcccatcggggttccagcttgagtcctgctggtagcccttggcacaaggcctggtaggcagcctggtgctgccatgtaccaaactctgctggggaaacctcagccacagcagatgcaaacccattaggtatagcatggttcaagatatttttgcttgtttcaataacacttttgttcttgattttaagggctattttagaaactgctttaaaatatttttgaaagtataaagaggtgaataaaacatactcctgttccactgtgcaaagatagtcactgttaatgtttctttccagtcgttttctatgcatagtttagccatgacttctcatggggacaaacccactggtttaattcaacccccaatgtcaggtttttataggtcagcccagagttctcaagcccagtcacaaagcagagccaggactcaaattcacaccctgtgactgagctgtttccactgtaccatggagacactacccacaaatcgctccttctccagtatctatgacacgaccataacaaaccataccccttggacagatattcctt

SEQ ID NO: 55037 - DNA, 60 bp, Homo sapiens
gggtgggcagacatgcaagaaaaaaacaaacctgtaatgttcttatatgaaataataaac

SEQ ID NO: 55038 - DNA, 386 bp, Homo sapiens
cttggattaaaaggatcagagagaatacaacatgacaaagaaggttgctagatgtacattatacttttgaaaggaagcatgttgataaaattactcaagtgtatgcacatattatctttcatgaaaaaagaaaaggaaacatgactaaaggagaatgaaaccaagagcagaaacgatcatagccaagacctatcagggctcaaatgagagctcagggacagagaaaagagccataaaagattatcctcaagctttgaaacctaatcaagcaattcaggttagattcagcctggctaaatttcagaattgctttggaccagttattcctttttaccacccatttttaccttttttgaattggaatgcctataactattatccaatgc

SEQ ID NO: 55039 - DNA, 247 bp, Homo sapiens
gaggattcaacacatatttttatattatgttaaagtaaagaaatgcataaaagacaagcactttggaagaattattttaatgatcaacaatttaatgtattagtccaaattatttttacgtagtcatcaacaatttgaccagggcctttatttggcaaataactgagccaaccagaataaaataaccaatactccactgctcatatttttatctaattcagatggatcttccttacaactgctctaa

SEQ ID NO: 55040 - DNA, 369 bp, Homo sapiens
ctgaaccatacacaaataaggttgatcttgttttcctttttggagaaagagaatacaaattaacattaaaattgaaatgtagaaagtaaaatatgaataattttttacaaccactccaaattagttgaaacaaaatcttgaacggtcacgcacttaaatttaagctagccaaatatgttgcactgaattttgaaaagaatgagtgagataactgtaagatacgctcgttcccttttaaaaattgttatttttctttaacatgggtgccaaatcaaatatccatgggctatacttcttaagataataacagctcaaaataatattttttaattcagtagaactaatagcattatggaaaagattctatta

SEQ ID NO: 55041 - DNA, 1467 bp, Homo sapiens
ctgagttctcatctgaaagctttcatatcggttgactgcagatttgatttgtatccactgtcaccagcactgctcacttaggactttctggatccggacccaggcagcgcacactggactcttgaggaagaaggagactctaattttggattccttggtggaggaaaataaaacactctggtcttgccgccaacgatgcaagtgtgactgctggcgtcttcatgagcttccagaggtcacagcacgctaccaaggactctcatggcccctcggatgatttccgagggagacataggaggcattgcttcaaatcacctcctctctattcctggggcagaggcagtgtgggcctccaatcggcacctcctccagggttcgtgggcatcacctggcattgttaatgctaccattgagatccctaatttcaactggccccaatttgagtatgttaaagtgcctctggctgacatgccgcatgcccccattggactgtactttgacaccgtggctgacaagatccacagtgtgagcaggaagcacggggccaccttggtgcactgtgctgcaggggtgagccgctcagccacgctgtgtatcgcgtacctgatgaaattccacaacgtgtgcctgctggaggcgtacaactgggtgaaagcccggcgacctgtcatcaggcccaacgtaggcttctggaggcaactgatagactacgagcgccagctctttgggaagtcgacagttaaaatggtacagacaccttatggcatagttcccgacgtctatgagaaggagtcccgacacctgatgccttactgggggatttagtgccactgaagcctgcgtcagcagcccgagcggggccggcatctgctccccgccgtctgctccctctccactctcttctcaaatggctgacttctggttctccctcaagtgttttttacactgggtgttcaaatttattttaagagatagggagggaggggacataaagggaatgcatacattgctagtcacatttttaaaattaacattttggaatagtgtttatggaaatctttagcttttaatcatttttaccaatttgaacagtttaataaactggttctgctctcttctgaatctcatgcctttggcaccttggtaggtgcaggaggagctcagtgcaaaaatcactttggggcctcattaaccctttagagacaagctttgccccaggctgcggaccagacagatgcttagggaaggttgataccagcttcagtctctactggattagccctactctttcctttcccctccattatttagtgactctgtaagtaagttaaatacacccttattatttagctgttaagtaactataatgaaatctgctgcaaaatctctcttggaatccatgtgcccaggattatattagcattatttttaataaatctatatgcttaacatattagaatttttact

SEQ ID NO: 55042 - DNA, 366 bp, Homo sapiens
ggacaggctactgtaactatggaatggagaataattcagaaggaagtgggattgaatagggcatgagcagaaacagaagaatcagaagtcttctggggctgtcgagcaaatgctagtgcaattcagtgaaatattaccctagaaggagatgctctctttgaaatataacgaattctcttttgaatacatgcaaattgcaggaattatggaatatccaagcaaatatatccatcgagactttggatataccagtctgtttcagccagtgatttaggcagaagttaaaatatttgagagatattgattagttgcttgaagataactaaagaaaagtaagtgaaatcaccaggtaaaggataaggacag

SEQ ID NO: 55043 - DNA, 892 bp, Homo sapiens
cagtgtcggcccaaacacaatgcccaggttgttggcagacatcttgttttccataaatcgtgcagccaccgtgaacagatgggccaccaggtgccgcaggtgttgtagttagagtcaggcagctgtaccaagagggtcttcagcgagcggataacctcagggctggggctgggggtcccagggtcgtccccagggtctgcatgcaaggtcttagccagagagatgaaggcgttgtagaggtggaaggggatcacgggctcggtgagctcctgaagaaatcgcttgaggacactcgagacgtcatgaggcgagttccccgacagctccaccaacgctcggccattctcgaaagcctggcacagccgctccacacggacccgggacccgctgacccggtaaatgccctgcacatccagggcacggtgttctatctcagccgtgcacttcgtgaccacaaagggtacctcctccgggaagttcctgggtagctgcaggaagtcaaccccaaaacggggtgtccgggctgggagccgcctgtgtccacagaggatcaggagagtctccaggcagcgcttgtggcaggtcagaaagcactcctcacactccgtcccgctgaccatgaagggttcgcactcgcggcacttggctgggccccgcagtcgccgcagctggtgggtttgagccgcgctggacagtgtccacttcccgaaggggctgcccagcccattctccagcccgtctcccaggtcagggtctcgctcctcaaagtcatctgaggactcagtgcctgtggacgaagccttcaccagctgcctcgtgccagcgcctgggctggaagtgggtgagtccagggaccgagactcgctgccgccacccacgctgtccacatcgc

SEQ ID NO: 55044 - DNA, 302 bp, Homo sapiens
gcggcgatggaagcagcgcaagaacgtgcagaacatcaacctcttcgtggtggatgaggtccaccttatcgggggcgagaatgggcctgtcttagaagtgatctgctcccgaatgcgctacatctcctcccagattgagcggcccattcgcattgtggcactcagctcttcgctctccaatgccaaggatgtggcccactggctgggctgcagtgccacctccaccttcaacttccatcccaatgtgcgtcccgtccccttggagcagtccaagtgcataatcatcgaggactatatggacg

SEQ ID NO: 55045 - DNA, 423 bp, Homo sapiens
gcgctccggagcgctggctctgctggcgctgagaaatggaccaattttgacaagatatagtgctgcagcgtgcctgatgggatatattcagtcatggcgtccgaactttgtaagacgatctctgtggcaaggctagaaaagcacaagaatttgttcttaaattataggaatctgcaccattttccattggagttactgaaagatgagggactgcagtacttggagagactctatatgaaaaggaactccctgacatccttgccagaaaaccttgctcagaagcttccaaaccttgtggaactatacctgcactcaaataacatagttgtggttccggaagccattgggtctcttgtaaaactccaatgtctggatcttaatgacaatgccttagaaattggttgccagaaattggtcgctgaa

SEQ ID NO: 55046 - DNA, 417 bp, Homo sapiens
caaactgaaactggtgactttaagcttcagaaaaatcactgcaacagagcacttatgccttaatgccaatcttaatgcctgctgctatctgggtcactcagagagtttaccagaatgtttaatgaaataaccagagacattcaaattgcaaaccagtaaagcacatcacattgcaactgctatcttcagtctaccatttaaacttgcctcaaactcacctctagaaattgtttcacctagctgccctctaaactcaaaaactaagatcataatttgctccaaatattaactttgtttttttaatagaagaatactctgaattcctttcaagcaatacaatctaaaatgagcaagttagcctcaatagcaccccaaaatagaagttcttggtatcttaacagcttaacaaggaggagc

SEQ ID NO: 55047 - DNA, 364 bp, Homo sapiens
tgttatcaacataaaattatggaaactataatgagatttcttatgagtcaatatcagaaaaatacctctctagcaatcagtgatattcagagatgccattaatggctttagaataatcacttagcaggagattcaagcattaaattggcaatcagaccagaaaacattaaaggccacgcaaattctgtaatttttatccacttgagggcctgtagtgtctaaaattcactcagagtcctttgggttaagacatggtactcaaaaaagcactgttaaaataaaatgtctccacagacagattacatgttaacttttagtatcccctgaatatctggtaggtttatcgtgttagattagtcaaaat

SEQ ID NO: 55048 - DNA, 326 bp, Homo sapiens
tatggctccatgctccacactgaccctgtggccaccagcttcctccagaaactctcagacctggtgggcagggacacccgactcagcaacctgctgagggagcagtggccagagaggcggcgatgccacaggttggagaatggctgtgggaatgcatctcctcagatgaaggcccggaacttgcctgtttggctccccaaccaggacgagccccttcctggcagcagctgtgccatccaagttggggataaagtcccctatgacatctgccggccagaccactcagtgttgaccctgcagctgctgtgacagcctccgtgagagag

SEQ ID NO: 55049 - DNA, 447 bp, Homo sapiens
cggacgcgtggggggaaggcgtgagagctcggtgcactggggacctgcatggggaaggcgggagagctcggggcacctcggacctgcagagggaaggtgggagagcttggtgcaccgcagacctgcagggggaaggcgggagagcttggtgcactgcagacctgcggggggaaggtgggagagcttggtgcactgcagacctgcggggggttccatattggcagaacaagattgggtgggcatgccaagaggtgacagcagggagaagcgggggcagattcagggcctgctgctgcccatgggcagaggagagatggtcaggggtacccgacaggtctttggctgtggaggtggaatgaggggactcgaggcagggaagctgacaggcttgccaagaaaccagatgagtagggaactggtattgacccagagcctgggcaaagcctt

SEQ ID NO: 55050 - DNA, 1513 bp, Homo sapiens
  misc_feature (1)...(1513): n = a,t,c or g
gggccgccgccgtcgccggagagatgagccgggaagcttgaggccggagacgcccgccttcggcgccgtccgcccggcttccccgctcccgggtactggaagatgaaagagactatacaagggaccgggtcctgggggcctgagcctcctggacccggcatacccccagcttactcaagtcccaggcgggacggtcttcgttggcccccacctcccaaaccccgactcaagtcaggtggagggtttgggccagaccctgactcgggcctcctttcatgtactctgcccaacggttttgggggacaatctgggccagaaggggagcgcacgttggcaccccctgatgccagcatcctcatcagcaatgtgtgcagcatcggggaccatgtggcccaggagctttttcagggctcagatttgggcatggcagaagaggcagagaggcctggggagaaagccggccagcacagccccctgcgagaggagcatgtgacctgcgtacagagcatcttggacgaattccttcaaacgtatggcagcctcatacccctcagcactgatgaggtagtagagaagctggaggacattttccagcaggagttttccaccccttccaggaagggcctggtgttgcagctgatccagtcttaccagcggatgccaggcaatgccatggtgaggggcttccgagtggcttataagcggcacgtgctgaccatggatgacttggggaccttgtatggacagaactggctcaatgaccaggtgatgaacatgtatggagacctggtcatggacacagtccctgaaaaggtgcatttcttcaatagtttcttctatgataaactccgtaccaagggttatgatggggtgaaaaggtggaccaaaaacgtggacatcttcaataaggagctactgctaatccccatccacctggaggtgcattggtccctcatctctgtttgatgtgaggcgacgcaccattcacctattttgactcgcagcgtacccttaaaaccgccgctgccctaagcatattgccaagtatctacaggcagaggcggtaaagaaagaccgactggatttccaccagggctggaaaggttacttcaaaatgtactgcaagcatctggccctgtctcagccattcagcttcacccagcaggacatgcccaaacttcgtcggcagatctacaaggagctgtgtcactgcaaactcactgtgtgagcctcgtaccccagaccccaagcccataaatgggaagggagacatgggagtcccttcccaagaaactccagttcctttcctctcttgcctcttcccactcacttccctttggtttttcatatttaaatgtttcaatttctgtatttttttttctttgagagaatacttgttgatttctgatgtgcagggggtggctacagaaaagcccctttcttcctctgtttgcaggggagtgtggccctgtggcctgggtggagcgggnaatcgnccccttccccgtgcagg

SEQ ID NO: 55051 - DNA, 154 bp, Homo sapiens
aaggcaataagcaaaacccagatctctacccaagcagaccttgtacttgatggacaacaaagaagtctgggagctaatgtttatttcatgaatactgactgccagaataattgtaagcaataaacaatcatgcattctcaatttctttctttcc

SEQ ID NO: 55052 - DNA, 443 bp, Homo sapiens; identical to SEQ ID NO: 44425

SEQ ID NO: 55053 - DNA, 1306 bp, Homo sapiens
tgtttttgtttttttggggtttcttttttttttccatgctgttatcattccttggttataaaatgaaatggcatatgtaaaggcagagttgttaactgctatatttcatctgttctatagggaagccattttgtctgtttaaaatttcagtttaattttgctttttttttttttttttttttttcctttcaacttagttgacatacgtgccttaaaaaggaaaactagtgttgctattgtgcatttactagaaaaaaggaattggttgtttagggcacactgttatatgggaattaaaatatgtttaggcaggggtgtgtaaaaaggttaagtttttgtttctcctgcttggaacttattttgaattactgggcttgtcacctttttttctatttaatcaaataagatacatgatattgaaagaataaagcagcatttttagtttttactaccttaggctttattgctttgaaaacaacattggccttttgtatctcacaattctggtctagattcagttatgaatgtaggcattagttaaaattaacaagatgcagagtattaatttcttaagacaacaaagtgatttctgtaagtttgagccctatgtggaaagcattgtggaatcttaacctttttgtacacactcttgtgggacgtatcatataaatgtcagcactaagtaatgtcttgtttgtggctgaatatttttcgtagatgtttttgaagttgacatgacttacgtgcatttaaatatatattgccatccttagtttgtaattaagatttggaatatggttgtggatttctgagcatgtgcagactggtctagctagttcaggaactggtgcatgtatttttcaaagataaagaaagtgtactgcgaaaatatgcaggaagattaattttgtggcagttttctaaaactgacaaccaggtgggaccaaagtttatgtgcctttagtcttaatttaccttgcattgtaatattcagttttaataaatcttcaaaatattttgtatttaggaatagatctgactttaataaaaacatggctcagaatctacaggtcaaattaatttgaacagttcttgtcaatccgaattgttgattctgtttaaatgaccaatactttttgaaattgatgtacttagtttcaagattcatagattctgttatctatgtagacagaatggtcatgtatattttctattagttgagtttttacatctttagaaatgtaaaattcagtatagtttgaaagcggcacaattaaaaattaattttctaacaaaaaaaaaaaaa

SEQ ID NO: 55054 - DNA, 526 bp, Homo sapiens
tcagggaagctgtggtctgagggtggctggtagaactgccagagagtagggcattttccatggctccagatcaccttctgaaaatgcgactatagcccctgcctattcccggggtccacctggtctgcagaccccataataccaggaagagctgggtgttctggcaccagtgaaacaatacctggttttttattttaaaccagcccatcttccccgctgcagttggaaccgttctacgtggatttgggatcaaccagcaggcctttcctgagctgttactgtgtggagtgggcgctgaggctccagccattgatgcaaagaccccaatcctgacctgaaggcgctcacaatctctccccaacggcctggtgtgaaacgcagacgcaacgcagcaggcattctccccagtggctgcctgtagagcaaatggtgcagaaatggtcactcctcaaaaagcaagccggctggagccagcccagctcccagttttgcaagaaaaaaaaaatcacagctccattttcaaaga

SEQ ID NO: 55055 - DNA, 595 bp, Homo sapiens
gctgcctctggcagccaagcctcttttcgcccggccccagcccctctggttgataaacgggtgggcctcctcagcagcgtggctgcctttcaccttgatttccccagggctctcggcaacatcgataaaccagcctcgcccaccagctgggccctcccccacccagtctgccaggctgggagctggagcttgctgagtcttgaatgcccttctagatggcttctctagaggctctcctggcaagagagggtcccaaggggagccctgcaaagcaaaggctccttgtctggggcgggatagagaatctcgcctctgtctggtgtgttacctactgggggcacaggaaagtcaggtgggctcagagagagccctcaaatctgggccctgggtcagggtggggtcaagtccagccttgaagagaatggactctggaatctgacgtctgggtttgaatccagcttccaacactcactggctgtgtgactttgggcaagataacttatcctcttgtccccatgtgtcattggagataaactacccacctaccagattgttgtaccatgctgggcaaacactaagtgcttaataatggtaa

SEQ ID NO: 55056 - DNA, 355 bp, Homo sapiens
ggtgattcttcattagctttacacattttataaaaaaagacttcttcctaagaaaggaacttagagaaggcagttatttatcatggataattaagtcagggagattcatttgcagggagtaaattgtgccatagctctagaattcccttttgtgaactatttctttgtctcgggatgtgtggggtagcagatggtagacttttctagactcatgacagaccttttaggtagaagggtgagggaacagagagacaggttaccgtataccctttgacatggttcctccttaaaaatctgctgtattttaaggaagttaatgaaattgccttcaagcttcaggctttgagtagtacag

SEQ ID NO: 55057 - DNA, 350 bp, Homo sapiens
  misc_feature (1)...(350): n = a,t,c or g
ctaaaagtgattatttggtcgtatctacttttttttcaggctgaccttgttggtttcacattaaatgttgcaaaactttaacatttcaacttggagttattcttttgttaaaagagtataatactgtttttgagagaatatgatatgattccatgcaattcacatctgtgtggcagttagatttaattatttggactgggaagccccatattaaagcacatgctgggcttagaacatgatgacaatcaaggaatttaccctcttacttgtttcgctgcagntcagnacttttccttntaanaaatttttattggaaacacattttttaaaaaatantgaanactggctgg

SEQ ID NO: 55058 - DNA, 1052 bp, Homo sapiens
gctattagcacacaagcacagtaaccggagtgcttgtaggatgctcagtaggataccccaggttacctgctcgtgctcagggctaccaaaggcacgtaaagttccttccacagatcctgggatgttgccatgatgacccctctgtgagatagtaacaaaaatgacaaagattccactggcttgtctgggactcttcttcattcatttattcagcaaacattcattggacacttaatatgggctaggcattgttctcggctcttgggacatgtcagcaaacaaaataaagatccgcaccttggcagagcttgcatccaaccaggaggagactagagaataaacattaaacaatacaaataaatagtatagtatattagaaggtaataggtactattaaaaagaaagaaaaagcagagcaagaggaagtcagagttcacccactttaatcttcctggtgagcatgtcagcaacacccaaacatcactaacatggattattgcatgtatatttacacataagataagaagtgtttattctcataataagtctttgtcatcattcttgaggttaagttcaattctgctttatgtggcttgttggattgtcccagtccttgtatttaacaacatttgcagaaaatagtaccacattaaatcaattatagattatcccttatccaaaatgcttaagaccagaatgtttgagatttaagaaatttttcaggttttggaatgtctgcatatatataatgagatatcttggggatggggcccaagtctaaacacaaaattcatttatgtttcataaatgaaacttaatgcacatagcctgaaggaaattttatttttcccttagggatgttgaatcaactgttgtgtgccagcatgttgacaatgacctgtcacatgaagtcgggtgtggaattttccacttgtgcgttcatggcggtgctcagaaagtttgggattttgaagcattttatatttcagattttcacattagaaatactcaagctgtccttgctcacagtggacaaaaaaaaagagaaaaaa

SEQ ID NO: 55059 - DNA, 584 bp, Homo sapiens
ttttttaaagtctttagtatatttatttgtataaagagtaaacaaagtgcatatagagtggccacaggtttgacacagagaccttggtgatgtaggctatgaacaaatttaaatggcaacttcattgctgccactgaaccaatcctgaatttgggctcaacaggtgaaaagtaacaatatcaaacgaatactaaacagcataacaaaaagattttcagactcttggtcataaagaccgtaatcgttcacattgaatcaatgactaaacatttttgattacccagctacctccaagcaaactgaaaactgtctagtggatcctgaagtccatagtgcctctagccgggtctttcaagtgttgcaccacagggtgatgattgatggtaaaaacagggatcaacccttgtagatcggtggtaagtatggaaaccctctaagaacagtgcagcgtatgtggtattcagactggttgcatacagcattcaaaaccagtgctggaatagcttgccccaaagtggtagagttataaaaggatatacattgacgtttcttaaaagcatgtgtaatagcatccaggttctggg

SEQ ID NO: 55060 - DNA, 407 bp, Homo sapiens
cggacgcgtgggctggaattacaggccatctaaatcttttatctcaggtttgccttgtgacaaaaggtggggtactttttctgacatgatgaggcagagaaaggtgaggtgggtgcatcctgtgcatatgattttctcaggtgatgggaatatggtgggctcttgcctaatgggatatattttctctttgaatgatttggcaagatatcagatgagagaagttgaataaatgttagaagaacatagaaaaaataggttatacacattgggtttctgaagaaatgatgtcattggagaaacaaaacttttattgatttctggaaacatttagggccaattttttgtgtaagtaatttgaatttatgatgatatctctgaccactttttgatattttttctggttcagg

SEQ ID NO: 55061 - DNA, 354 bp, Homo sapiens; identical to SEQ ID NO: 35151
  misc_feature (1)...(354): n = a,t,c or g

SEQ ID NO: 55062 - DNA, 419 bp, Homo sapiens
ccgctatgacatgattacgaatttaatacgactcactatagggaatttggccctcgaggccaagaattcggacgagagggggttggggtgtggtgggggggtacccttatttcctcgacacgcaactggctcaaagacaatgttattttccttccctttcttgaagaacaaaaagaaagccgggcatgacggctcatgcctgtaatcccagcactttgggaggctgaggcaggtggatcactggaggtcaggagtttgagaccagcctggccaacatggtgaaaccctgtctctactaaaaatacaattagccaggtgtggcggcgtaatcccagctggcctgtaatcccagctacttgggaggctgaggcagaactgcttgaacccaggaggtggaggttgcagtgagccgtcatcgc

SEQ ID NO: 55063 - DNA, 346 bp, Homo sapiens
gtcggcgtggagtggcaggtgcatctacttataatcgcacagacctaacccatctaatctcagtccccacatatgtaaacgaaaggagattcacaccagctgttagggttatgtgacatgcttagctctgagtttggcacagggtcggtgttctacggccactgggtgccccctccgcccccaccactgactgccctttccagctgtcccgactctaagcaggctaggcctgtctgggaagctcctggagggaatcttttggtaaaacagttcctggcagatgctctggaggcttactctgcagctgaaatctcaggaaattctactctgcccgttccaccactgt

SEQ ID NO: 55064 - DNA, 368 bp, Homo sapiens
catacctaccaatcattccgtagatattaattgtaaacctctttggcttttttgactagtaaactgaatggctttggtagcttaattgaaaaaataacttcgtgtatacaaatttaacacttgtcagtactgttttctgtggttaaaagtgtcaatttttcctggcaaagagcagtagaagaagctgcagttgagaccagccctagtggaagcatttctgtaggttttagaaatgtgcattttttaggtgtcacaagagccatttgaagtagattctcttttgtagtgattcaccatatacgaagctagtgattcaccaagtttcaggccataagtttaaattttctttttctatggttatgggtgaa

SEQ ID NO: 55065 - DNA, 443 bp, Homo sapiens
cggacgcgtgggcagaatatgatttttacctccagacagtaagaattgaacaagaactgaggcaaacacaccttgctattttgttttcttcactatgtaaatattatttgggcaaacattacaaaaagggatccaaacaatttgagtttcagtatttttttctccctaggcatgtgcttcaatttcaaatatttttttctgtgtggaaaatgccatgtaactattgcactaccttctgtgtggactgtgttggtattggttctttctgtatatcaaaagtcagggtgtttataactgcaaagtttgtataagtggctttattcctcttctagaagatttatgaggagcctaggaagcactattggtacaggaggaaaaaagaatggaaaacatgtttacagactctagctttccttattagcttaaactggggccctcaaaga

SEQ ID NO: 55066 - DNA, 1304 bp, Homo sapiens
gccgcttcttccgccggagcgtcatctgcgactccaatggcactgcactggagcttcccggccttcctctttccctgccccagcccagcatccccgcggctgtcccgcagagtgctccaccggagccccaccgggaagagaccgtgaccgccaccgccacttcccaggtagcccagcagcctccagccgctgccgcccctggggaacaggccgtcgcgggccctgccccctcgactgtccccatgcagtaccagcaaagaccgcccagtgtcccagcctagccttgtggggagcaaagaggagccgccgccggcgagaagtggcagcggcggcggcagcgccaaggagccacaggaggaacggagccagcagcaggatgatatcgaagagctggagaccaaggccgtgggaatgtctaacgatggccgctttctcaagtttgacatcgaaatcggcagaggctcctttaagacggtctacaaaggtctggacactgaaaccaccgtggaagtcgcctggtgtgaactgcaggatcgaaaattaacaaagtctgagaggcagagatttaaagaagaagctgaaatgttaaaaggtcttcagcatcccaatattgttagattttatgattcctgggaatccacagtaaaaggaaagaagtgcattgttttggtgactgaacttatgacgtctggaacacttaaaacgtatctgaaaaggtttaaagtgatgaagatcaaagttctaagaagctggtgccgtcagatccttaaaggtcttcagtttcttcatactcgaactccacctatcattcaccgcgatcttaaatgtgacaacatctttatcaccggccctactggctcagtcaagattggagacctcggtctggcaaccctgaagcgggcttcttttgccaagagtgtgataggtaccccagagttcatggcccctgagatgtatgaggagaaatatgatgaatcccgttgacgtttatgcttttgggatgtgcatgcttgagatggctacatctgaatatccttactcggagtgccaaaatgctgcacagatctaccgtcgcgtgaccagtggggtgaagccagccagttttgacaaagtagcaattcctgaagtgaaggaaattattgaaggatgcatacgacaaaacaaagatgaaagatattccatcaaagaccttttgaaccatgccttcttccaagaggaaacaggagtacgggtagaattagcagaagaagatgatggagaaaaaatagccataaaattatggctacgtattgaagatattaaga

SEQ ID NO: 55067 - DNA, 413 bp, Homo sapiens
caagaattgatgtaattagaagaaattgacttccttacctattgcctctgatatttacttgcttaaatttttttttattggaaatccagaaaaagtggatttagagaacaacactaactcccacctaatctatgacagagatgtagaagagagtacctgtgaaaaatgtgaaagtatctgaaaaatgtaacctttggcagcctgagcatagtcaaccagaaaaactatctgaattaaaataattggtccataggtactattttatttggtccataaggattattttttcaacttttttttcaagtgtattattatgtcatttcccacgtaggttactgatacctgaagactttttccacctttaaccttactcgttgaggagctttgtagtctaataaaagagaaatataagg

SEQ ID NO: 55068 - DNA, 408 bp, Homo sapiens
  misc_feature (1)...(408): n = a,t,c or g
atgagaggcccccacccaccatggacagaggtgagggggccccctcccggtatcgtccccgagaacgggctcgtgaggagactcaacaccgtgcccaacctatcccgggtgatctgggtcaagacacccaagccgggctaccccagctccgaggagccaagctcaaaggaagttcccagttgcaagcaggagctgcctgagcctgtgtcctcaggtgggaagccacagaagggcaagaggcagggcagtcaggccaagaagagcgaggcaagcccagccccccggcccccagccagtctaaaggttcccagtgccaagggccaggtcgctggccccaagcagccaggcagggtcctagagcttaccaaagtaggcaagctgtgctgaggctgnanaggggagccgctg

SEQ ID NO: 55069 - DNA, 412 bp, Homo sapiens
gcggctgataagagaagtcagagttgagctgggggaggcttcagaggctctgcatgcccaggaggcttctctgagactgggaaggagtggaaactcagtagcccgtggtcctggttgcgcgctccctcccatgtcttcattatctgatttggtaaaatatctacaagacgggggagtccgggctgctttctttgacactggtcatcactccacacctagacgctatgtccatgtctggaagaagcttttaaggaagttttgatgcaaagaagagtggccggtgctcttcctcgcgtgccaccatctgcttacttccagaagctaattattttcatgtgactgatgtgactaatattttttaacgcctgcaggttctgaaaacagccagttacttccaagagttgcacagaga

SEQ ID NO: 55070 - DNA, 428 bp, Homo sapiens
gagaaccacccatgtagaagctgggttaggatttgctttgcacctgccttttcacctgtagaagctgggataggatttgctttgcacctgccttttcaccgatagaagctgggataggatttgctttgcacctgccttttcaccgataaaagctgggataggatttgctttgcacctgccttttcaccgatagaagctgggataggatttgctttgcacctgccttttcacctatagaagctgggataggatttgctttgcacctgccttttcacctatagaagctgggataggatttgctttgcacctgccttttcacctatagaagctgggataggatttgctttgcacctgccttttcacctgtagaagctgggataggatttgctttgcacctgcttttcacctgtagaagctgggataggatt

SEQ ID NO: 55071 - DNA, 347 bp, Homo sapiens
ccagatgtcagaagccctgctgcttcctgtccctctctctcctcgaaattttgggaagaactaggcaggactgaggtgagggggagggaagacctagacatggccaggaagcctctgtcaactgcatttggtgctcggacaagtgaatttcgcagaggtgatctctacccacctgtcaggactttgcatgtgggggcagaggcatcaacccagcaagacacctagtagcctggcaagttccgagcaaaacgttaaacaggcatgaaaggaaaggagctgctcattgtccaggagggcggaagtagagtcctccaaggaggcatcactgcctcctcgatccagtccag

SEQ ID NO: 55072 - DNA, 307 bp, Homo sapiens
  misc_feature (1)...(307): n = a,t,c or g
gctgggagtgtgacaagctgggaggaggctggggtgcagggagaggagatggagccaggaggtggtgaagtttgccaggatgcaggcagatcgctactttttgtgttcccgggtctgctccacccaacgggtctcctcttgcacgtttctggagatgggttgtaaagtatgctgcagcttcttagcagcaagtgccaagagttcctaattattaggctcatacaattatattttgcttttttttttttaaccaaccatnttncnnnactnnancntnnctanattnccagtnaattnggaaaaattt

SEQ ID NO: 55073 - DNA, 380 bp, Homo sapiens
gaaggcccttcatggtctgagtccctttgcctgggtcagcaggatgcctgttatttcaaaccctcccatccagcactaccaaactatgaactttcataactcctccctttggcatcagctcttgcctctgccaggcacacaaatctataccgtgcctgactgatgagatcctatttatctttcaagagagctcagtgctctcattctgtgcagccttccctaaatccccaaagcagaaatggtcacccctgtgtagcagctgcaccttgtgtatgctctggtgctgctcttttcttactatagtatcattttctttttgtctgcacctaacaaatggtgagttcctaaaaggaatcatatcatgttcatcggacacactg

SEQ ID NO: 55074 - DNA, 299 bp, Homo sapiens
ggatccccagatttcatcaaaaaggcctttcccccaaataacattccatgaaagtcacaagtttcacatcagcgtttcatatcacaaattaacctcctttccaaatttctctttaagttttaatcctcttgtttaagtggctttatttcttaaggtttgaagtgcctttattcacattgtatagactcgaacattcctcaaataaatttaccaaatttctgctttctggcttgaaaatcatcacttttttagattttcacatcactcaagagcaagactagcagctggccgtttttccc

SEQ ID NO: 55075 - DNA, 378 bp, Homo sapiens
attaaacctaaaaaacaatgcttatgggcctcttttgaattccatgtctacctcttgagccaatcactgttgccaggactggctagtcctggaccacatccccacagacagaggtggggttacctgttgtcactgacagcccatccaaactgcatataatgggttagaagcatttccccaaagagagaaatccagacaaaaaccacatctgcccaggacaccactgaaatctggaacaagagggctgagagaacccagaggattcctggaactgcttggtccaggtggcagcgtgagaaattggccctgaccttgtttttctgcattctatggatgtagtacattgaaattccagagatatatgcacaattcagtatt

SEQ ID NO: 55076 - DNA, 339 bp, Homo sapiens
gaaaatttcaaagtcagtatgacattctcagaatcccaaagagttcacgtatttttcagatttccagttaacatccagaataaacgtcaaacctaagagaatttaatgagcagtagaactactgtgataaaaattgtcttatcttattccatggctttcctttaggaaaatgtttagtatgtttttgcttgaatgccagaaccctgtttttttgagagtttctgggcctgtcttatagtttcaaagttttgatgagtctcctggagtagctggggagctctatccttgcccatccctagtctgggatgcactctgagcatgttcagcaggttgcatgcc

SEQ ID NO: 55077 - DNA, 2071 bp, Homo sapiens
cagtgtgtgagtcaccacacccggccccagagtaatggtttcttgactttctgtagcccttgttccttagtctgctgtgatatttatgttgacctttatcattttctattctgaacccctcttagcatttaatgtgaaatctaagaaattagaagtagaatggcttttattgttttgacacctttgaaattattattaataatttttccagagcaaaaaagcaaacacgctcaataagactaaacaaaacaaaatataaatgtacatcatttaatgtcccagtggctctattctacctgtaagaaaatgatacaaaaccacctaagatattttgaagcctgacaaatcagcttcatggaaaaaggtaaaaaatgcatttttcaaccgaaagggcagatccaatagaagacccgctccttaaataaacataaaatgtaaaaagttggaaaattaagagtaatgttccatctggaaactgaacttttgtccttgaacttgtgttggcaccaagcctcatacacagtgagctcaataactgttgggacaaaggaaggaaggacaaaatgtgtaacttcccagcatctgggagatgctgtctcttgcctcactgagtgttccttttctttgctctcatgtcattccctgagaacaatgaattcctgggacaggctaaacatcatgatgaagtttcttaaacagactttcttagtggaaatccatttagatctgggtgtgctctatggggagtgctgacgtcaaagagcaaatgtctataaggggcccttttaaaatgaacattttcctcattgagcaagctgggattctctaatgtagaaatcaagccatctttataatttcacttcagatgtttatgtttttgttttttttgtctccaatgatggtaaaaataaaaactacgcattacttaaaggagtttccctcacatgtaaacactgttaggaagtctggattaagttgaaagtcctgttttaactttttttctctcatataccaaacactctgtatttctcttaaagaagccctttaagagaaagccctaattttatatctgacagtaaagtttgctgcaagtgtatgagttcaaacacatcccttgttttctgtccctaggggaaaagtcatgtagttttagcttggctccagtgttaatattatattcagtagcagccttagaagagtggtctaagacttgaacctggagcaattttatagcacagaatcctacgaagataggactgtgaacatttgttttctttttcgtgtgtgtcaaactaactggtttttgctttaccaataaaatgtcctcggcagagtaaattttaaacgtgaaaattatagatcttgatattgaatccatcagtgattcaagagatacacctatttgcctaaaacaacctaagatgtattggttatggaatcatgtgttggataggttcttaagacctgtttcctcaaatcttgacacagttttcaagggtggcttattgacttgcacggttgggcagataatccagatttacctaagattgggtaaaaaagtcatctgtgactttgctggcagggcatttgctaagtggagtacaggatctaaaagggttttcttagaaagggcaatattgtccaatgaagtaagcagaaggactctgggttagaagcatctgcacaaaaactggtgagacctactctccactgctctgcagctggatggctgatggcaggctgagcagtggggaagcaggttttaacaacagggagtccttccaggtcactgtatattgagaagaaacataaaactattgtctgttacattccgaggtcagccttcttcttaacgttttataatatgcaaatgccagcttctggaaagcaagtatcatcatgtaccaaatgctttatacaccatcacattcatgaattttttagcatggtcagaacttgtgtaaatatgtctcttagatgattttggggagatgtgatttatttttcatattttcaaaatgcatttcatttcaaataaagttatctattgagacaaccgaaaaaaaaaaaa

SEQ ID NO: 55078 - DNA, 352 bp, Homo sapiens
  misc_feature (1)...(352): n = a,t,c or g
gatttaaaaaaaagtttgatttttaactgacaggtagtaattttatatatttatgcaacacagtatggtgtatatttacacatacacatatacatatatacacacacnnnnnnnnnnnnnnnnnnnnnnnnnnnnnnnnnnnnnnnnnnnnnnnnnnnnnnnnnnnnnnnnnnnnnatgagacattaaaaatctcttctattttgcaatatataatagattattaactgttgaccctgctgtgcaatagaacaccagaacttatttctcccatttaaactaacttctcatctgttttaccaacctctcctcattctactcctccctactcttcccagcttttgataaccgct

SEQ ID NO: 55079 - DNA, 1278 bp, Homo sapiens
  misc_feature (1)...(1278): n = a,t,c or g
cggcgtttaaattgcgcttccgccatctttccagcctcagtcggacgggcgcggagacgcttctggaaggaacgccgcgatggctgcgcagggagagccccaggtccagttcaaacttgtattggttggtgatggtggtactggaaaaacgaccttcgtgaaacgtcatttgactggtgaatttgagaagaagtatgtagccaccttgggtgttgaggttcatcccctaggtgttccacaccaacagaggacctattaagttcaatgtatgggacacagccggccaggagaaattcggtggactgagagatggctattatatccaagcccagtgtgccatcataatgtttgatgtaacatcgagagttacttacaagaatgtgcctaactggcatagagatctggtacgagtgtgtgaaaacatccccattgtgttgtgtggcaacaaagtggatattaaggacaggaaagtgaaggcgaaatccattgtcttccaccgaaagaagaatcttcagtactacgacatttctgccaaaagtaactacaactttgaaaagcccttcctctggcttgctaggaagctcattggagaccctaacttggaatttgttgccatgcctgctctcgccccaccagaagttgtcatggaccccagctttggcagcacagtatgagcacgacttagaggttgctcagacaactgctctcccggatgaggatgatgacctgtgagaatgaaagctggagcccagcgtccagaagtctagttttataggcagctgtcctgtgatgtcagcgggtgcagcgtgtgtgccacctcattattatctagctaagcgggaacatgtgcttcatctgtgggatgcctgaaggagatgagtgggcttcggagtgaatgtggcagtttaaaaaataacttcattgtttggacctgcatatttagctgttttggaacgcagttgattccttgagtttcatatataagactgctgcagtcacatcacaatattcagtggtgaaatcttgtttgttactgtcattcccattccttttcgtttagaatcagaataaagttgtatttcaaatatctaagcaagtgaactcatcccttgtttataaatagcatttggaaaccactaaagtagggaagttttatgccatgttaatatttgaattgccttgctttttatcacttaatgtgaaatctattggggttaatttctccctatgtttatttttgtacatttgaggtcatgtcacacaaactggatgantgac

SEQ ID NO: 55080 - DNA, 407 bp, Homo sapiens
cggacgcgtgggcagggatactatgtgacctgaaatatatacacatttttaacaagtggtccatgttttaacaggtttggccagcccttcttacaagcttcctttgtgccaaattttcattgttttttgaaatcaccaaaccatgttactaatgttgtgttttggtttgttttacagtgatccttttctgtatggctgccctaatatttccaataggattttacatcaatgaagtcggaggtcaaccttataaattacccaacaacacagtagttgggtcatcatatgtactttttgtcttatcaattttctttacaatagtaggacttctatttgctggcaaagtttgtttaccaggctgatgaatgtctaaattgcttgactcttattattttttattttatttt

SEQ ID NO: 55081 - DNA, 735 bp, Homo sapiens
tcaagatgataaacttcaaagtgtattttttaaaatgcaagttgcctgtatgaaataaattaaaaatttatatgtaatttcagtgtaaaacaccaaaaccgaacattaaaactgttcacagaaaatagaaaaaaaaaacaaaaaaacaaatcacaattataaaagcacagagatatcagttataagaaccaagtaaataaactaatttctattaatattttcatttactttataaaactttgttgattaaattgggggagtctctgacaatctaaagggtaacaaaataacaaatatacatcatttctttataagtcataccacacaaaccaagttaagttttttctatctgattacagagtcaataaatattgcatctgtatttagagcagcaacataaaactttattagaaagaaatactatatctggaccaaaaaactgcaacatggtttggaaatctaatgactaagaaggtaaaactggcaactatgtgcaactactgctcgtagatttgggtttgtttcccccccaacatctttaaaataagcagcccccacaaagggataatccattgaataaggagacaatgtaggccaaagaagggatttgtgggaaaaccatatgaatttaaatcaacataaaaaggaacacacaaagggccatgggaaacttgaggaagggtgaaaggaaaaaaaaaaaaaaccccaaggcaagggacaggtcagcttccttgg

SEQ ID NO: 55082 - DNA, 626 bp, Homo sapiens
tgaataacaggacttgctttcaagccttaataaatgtctcgagaaaatcaagtaactttcatttaacgttaaagaaatagatccaattcctttcttgcaaccaaaaataaataaaatacgttgcctcaatataaggtttgggctattctgtgtttctatagaagcaatctgtttttggtaaaatgtacttttaaggatccagtcatctgaagtattttatgtagagttagagatttcacaatattgactatacatatatttaaaatataaattatccagctgatgtttgaatttgtcttactttcctggccacctcgttgtcctattttataagctggggagttaactagcttaacaaaagatgcttagcttttgtaaaagaacaagtgtttcattttacaaagacactccaaatgatagttacttgattttctcgagacctttaactatggtgatgaataacaggacttgctttcaagccttaataaatgtaaaatgccttttaatgaagatacagctgagtgttttcctcatgaatctgaaccaattaccaatttgtgttccagtcttgattggtattgactgattcaaataaagttggtttattttcaaatattaaaaaaaat

SEQ ID NO: 55083 - DNA, 417 bp, Homo sapiens
ggcatgggcagaggatacttcatggacatatacctgtgacacagccaggggagggtgcagatgaaaatacgtccagtgggatggtttctaaggagaagtgtgagggactccactggggctccgtattttgtctggctgaggagggagagatgctgcctctccaggaatctggtaataggcaatgcttgagattggtgtgaaccaacgcatcacatagagccaggagaagtcacgaaggaggcaagaaaaagaaatggctgggctaaagctgtggcagagccctttttatcctcctttgggccctcatatggcttctcttttggtctgaagaatctcatccttcttgagtttagccttctaggtgaaggagtgggcagactgcttgcatggagacagggaggccgtgtttgtgtcctt

SEQ ID NO: 55084 - DNA, 3605 bp, Homo sapiens
  misc_feature (1)...(3605): n = a,t,c or g
aatgagtggggaagtggtggttcaagtggaggatgatggggatngcgattacatgtctgagccntaggtgtgctgaccaggaggaagtcaaatgtaatccgaaagccctgtgcagctgagccagccctgagcgcgggctccctagcagctgagcctgctgagaacagaaaaggtacagcggtgccggtcgaatgccccacatgtcataaaaagttcctcagcaaatattatctaaaagtccacaacaggaaacatactggggagaaaccctttgagtgtcccaaatgtgggaagtgttactttcggaaggagaacctcctggagcatgaagcccggaattgcatgaaccgctcggaacaggtacttgggagctggcccaggtacttgtgggcagggcacactggcctctctgtcttcgtgccatccgggaagggccccaggagactgtctgacaggggtactgtaaactcaggaaagctgtggggtccttggatgtcataaagtccatgccctggtacaggtggggacacaagtcctggatggcgtaacggacatgtatatgagggactctgtgcgacgaatttggggttggctttcctatgcccctggcccccccccaccttggctttggaaaaagggatccacatacaggggatggctgttgggaaaagcccccctggccacccccagataacccccctgctggcttctctgtccggggcccccgaaacccaggcccaactcttcctagagactgtcagcaaccactagggccagggactgtgggtgaggccactcggtaccctgcccccagtctgtctgggcctgagaagggcctggtgtgcggtgggcttgcagcactcagtgatggtcaggccaggcaggttatgtgttgccctctcccaccctagcgtccccaccctccccaggcagactcttcccagcagcaagcggaagcccgggcagaggctgctgtcataggcagaggcccccgctgatgccggccctgcttgcccctcacactgccaggtcttcacgtgctctgtgtgccaggagacattccgccgaaggatggagctgcgggtgcacatggtgtctcacacaggggagatgccctacaaggtcaggcttggcctgtctccagggccagggttgggtggccccaggatccttcctgctgagccctttacgtggggtgctgtcaggcacctccctcacagtagctgtcagggagcctgccttccctgcctttccagtgcccccttatctaggcagggctactgtctgcagcctcacctccaaggtccttattaggcccttgtttctttccatggaggacaggcttggcatcctctgggcagctgagccctgagggccctcctttgcaccatccttcacaccagatcaggggtcctcccagaatcatctcaccggggcctccctctagttcctgccctatagcccaagggtgggtggcagggtttcatgggtgcaggccgccctggaggtgactgtggcctctttttcagtgttcctcctgctcccagcagttcatgcagaagaaggacttgcagagccacatgatcaaacttcatggagcccccaagccccatgcagtaagtgacagggagggctgggcatgctttgatgctggcatgagcaagagtgagctgtgcccagagtgggcagccggccatgtactttctgttgttcgggggggtgcttgtgggtctcccaggcagcccttccctgctctcaccctggccctggtccctccctctgcctgcctggtctgcctgcagtgccccacctgtgccaagtgcttcctgtctcggacagagctgcagctgcatgaagctttcaagcaccgtggtgagaagctgtttgtgtgtgaggagtgtgggcaccgggcctcgagccggaatggcctgcagatgcacatcaaggccaagcacaggtgcgtgtcgcccgttctctcttggggcccagtcctgctgccagcccaggcttgcaccggcagggaagacagagtttgctgacttttacacagatgagtgtgcccttggcctccaccctgaatctagtgcctacagcctctctgggatagtgggacctgaggggcaagcagctatgccaggcagagaggcggggggcagatgtttcaggctcagacaagcctctgtgcccccggggcagattctgagcttccttagtttcctgtgactcctgctcatagattgtccttctgctctcggggtggaggtggtgcccctttcctagcactgcccaagccctctttccaccaggcatgctcctagctgtagcagagcaagggggtcacttcccttggtgatggcctctgccccatgtccccaccttaacaggaatgagaggccacacgtatgtgagttctgcagccacgccttcacccaaaaggccaatctcaacatgcacctgcgcacacacacgggtgagaagcccttccagtgccacctctgtggcaagaccttccgaacccaaggtgaggtacgccctgcccctcccctcgtctccccatcctgaggtcaaggccacaggctgagctcttgccttgtgcctgcagccagcctggacaagcacaaccgcacccacaccggggaaaggcccttcagttgcgagttctgtgaacagcgcttcactgagaaggggcccctcctgaggcacgtggccagccgccatcaggagggccggccccacttctgccagatatgcggcaagaccttcaaaggtacctgggcggccctgggagagccatttcctgctcatccgagttggagggtctctgaggaggaaacgctcctttcttgcctgtgaacctcttttgtgccccacatggttagagttgagagtggacctgctttgaaggcaggggtgtcctgtgcagtagtgaccctgggtggcactggagagcctggcagggcctgtgcagcacttgtaaaccactggtcccctcccttgctgcctgtcccaacctcctgctgggtttcctcgagggtcccggggctcctgcatgatcccccacggtgttctccctcttgcagccgtggagcaactgcgtgtgcacgtcagacggcacaagggggtgaggaagtttgagtgcaccgagtgtggctacaagtttacccgacaggtaggccagggcctggcccccttcccctaccctaggatcccccaaagttctgagctcaccctccccgacaggcccacctgcggaggcacatggagatccacgaccgggtagagaactacaacccgcggcagcgcaagctccgcaacctgatcatcgaggacgagaagatggtggtggtggcgctgcagccgcctgcagagctggaggtgggctcggcggaggtcattgtggagtccctggcccagggcggcctggcctcccagctccccggccagagactgtgtgcagaggagagcttcaccggcccaggtgtcctggagccctccctcatcatcacagctgctgtccccgaggactgtgacacatagcccattctggccaccagagcccacttggccccacccctcaataaaccgtgtggctttggactctcgta

SEQ ID NO: 55085 - DNA, 195 bp, Homo sapiens
gtgcttattgttgactcaagttctttccatattctgcatgaaaaacatacatgtaatatatagaattctttgtctccatttgtgacaaatattgtgaatattttcatgtttggtttgcctgttcattttcttaatggtgtcttttgaatattttttattaagcctaatttatcaaagatttgggtgtggtggctc

SEQ ID NO: 55086 - DNA, 2759 bp, Homo sapiens
  misc_feature (1)...(2759): n = a,t,c or g
ggggagtcggtgctcggcctcctgcggggagcagcccgaggaatctgcagggagaggtcgggaggtgacaacgccagcatgccagtgctatcggaggactctggtttgcatgaaaccctggccctgctgacctcccagctcagacctgactccaaccacaaggaggagatgggcttcctgagggatgttttcagtgaaaaaagcctcagttacttaatgaagattcatgagaagcttcgctattatgaaaggcaaagtccaaccccagttctgcacagcgctgtggccctcgctgaggacgtgatggaggagttgcaggccgcctccgtgcacagtgatgagagggagctgctccagctgctgtccaccccgcacctgagggctgtgctcatggtacatgacacggttggccagaagaattttgaccccgttctcccgcctctgcctgacaatatcgatgaggattttgatgaggaatcggtgaagatcgtccgcttggtggaagaacaaggaacccctgggtgccaccatccggcgggacgagcactcaggggctgttgtggtggccaggatcatgcgaggaggcgcagcagacaggagcggcctggtccacgttggagatgagctccgagaagtgaacgggatcgcagtcctgcacaagcggcccgacgagatcagccagattctggcccagtcccagggatccatcaccctaaaaatcatcccagccacccaggaggaagatcgcttaaaggagagcaaggtgttcatgcgcgccctcttccactacaaccctcgggaggaccgggccatcccttgccaggaggcgggcctgcccttccagcgcaggcaggtcctggaggtggtgagccaggacgaccccacgtggtggcaggccaagcgagtcggggacaccaaccttcgagccggnctcatcccctccaaggggttccaggagagacgactaagctaccggagagccgcgggcaccctgccgagcccccagagcctcaggaagcccccctatgatcagccttgtgacaaagagacctgtgactgtgagggctacctcaaagggcactatgtggctggtcttcggaggagcttccggctgggctgtagggagagactgggtggctcgcaggaaggaaagatgtcctccggagctgagtctccggagctgctgacttacgaagaggtggccaggtaccaacaccagcccggagagcggccccgcctggtggttctaatcgggtctntgggagcccgactgcacgagctgaagcaaaaggtggtggctgagaacccacagcactttggcgtcggttgttccacataccaccaggccccgaaagagccatgagaaggaaggagtggaatatcactttgtgtctaagccaagcatttgaggccgacttacatcacaacaagttcctggaacatggtgaatataaggaaaatctgtatggaaccagcctggaggccattcaggctgttatggccaaaaacaaagtttgtttggtggatgtggagccagaagcactgaaacaactgaggacctcagaattgaaaccctgatattatatttgtaaagcctgcaattcaggaaaaaagaaaaacgccacctatgtccccagcttgtgaggacacagcagccccatttgatgagcagcagcaagagatggccgcttctgccgccttcatagaccggcattacgggcacctggtagacgccgtgctggtgaaggaggatctccagggtgcctacagcccagctcaaagtggtcttagagaagctgagcaaggacactcactgggtacctgttagttgggtcaggtaactttatcccagaacatccaagctggacgggaccttgaagatcatctagtccagactccctcattttaccatcaaggaatctcaagcgcagagagggagagaattctccacaaattccatcatcgagaagagtataagtgggaagtcttgtttgttgttggtttttgtctgttgtttttcactgcacctctttggatcatgatttgaaaggggcatatcagaaaacaacacatttcatttattaaagtatcacaggcaagctgaccctgattctttgtaccaaagttaagtagccactgtcttttgtgggtggtagtggttaatttatacagtactgattcgcagaatgtttaagctttttaaacatagtgacgcttagtagtttttttggaagctaacttgttttatccagggggattttacatgtaactgaagttcccctgtcttcaagcactaaaacgttgatcttaaccttttttttgaagtgcttgcctggtaatagaaaacgggttctctgcctattttaaaatagtgaatatacgtaaattttctctggaaggctgaggcacacttcaccatcaacatgaattactgtactatcctgtactgcagtggtgccttcagggactcgaggaatgtaaggttgcctttcccctttctaaataccctcagattcctaacatcgagcccatgctttgtttgatttgttctattccatccattgtcccttttgttactgacagttgccttggtcctagccagtccctgccatgagatcataggggttcccattgtgctagatcttgggaaaccagatgactctccctgtcaaaactatggctacgtcactgtaaaccatttctgtcaagaataaaagtatgtagacccagagtgtgggcctaaaaaaaaaaaaaaaaaa

SEQ ID NO: 55087 - DNA, 489 bp, Homo sapiens
  misc_feature (1)...(489): n = a,t,c or g
gcttatttacctctctgcttcttcattatcttcttcatataggtaagtgtaatctattttatttggttactgtgaggattaatttagttaaacaagaggtacttggcacatcctaagtgattagctaaatgttagctattctgtttcattctgtaaaactcacttttttcctaggcataaagagaaggctattattcagctgggcgtggtggctcacgcctgtaatcccagcactttgggaggccaaggtgggtggatcacttgaggtcaggagtttgagaccagcctgaccaacatggtgaaaccacgtctctattaaaaatacaaaaattagctggatgtggtggtgggtgcctgtaatctcagctactcgggaggctgagacaggagaattgcntgaacctgggaggaggttgcagtganccganatcacgccactgcactccaacctggggcganagacaagacncagtcncaaaacaaaacaaa

SEQ ID NO: 55088 - DNA, 472 bp, Homo sapiens
caagagttgaatcaaatttttggaacactggactctctaattcctctacatgaagagctccttagtcagcttcgagatgttaggaagcctgatggctcgactgaacatgttggtcccatcctcgtgggctggctcccttgcctcagctcctatgatagctactgcagcaatcaagtagccgccaaagctctgctggaccacaaaaagcaagatcaccgagtccaggatttcctacagcgatgtttagaatccccctttagccgcaaactagatctctggaatttcctcgatattccaagaagccgcctggtaaaataccctctgcttctccgagaaatcttgaggcacacaccaaatgataatccagatcagcagcacttggaagaagctataaatatcattcagggaattgtggcagaaatcaacaccaagactggtgaatctgaatgccgctattataaagagcggcttt

SEQ ID NO: 55089 - DNA, 547 bp, Homo sapiens
  misc_feature (1)...(547): n = a,t,c or g
atgttgacaacaacccaatgaaataacattttgcatatctgaaaagaagcattgaatataagccaaaagctttcactgaaggtttttttttcttaaaaataaaaaaaaatatataaatgtaacatgttttcattccaaactggtagtggtatatagaattaaagataataatgttgcttcttattcaaactgttggtcatatgtacagtatataaacataaaacacacaaggaaggtattatgtatgcagtagtatactagagtttaggaaaatgaaaattttagaaaatatgttttgtcaccctgttggtcagaaagatgtctttctggttttaacgcatgcaggcatgtaaatatttgtctggagtcacagtattaatgaatgagatcttaagcatctggtgacatcagaactctgtgtcagccacttttatttgtattattggaacccctnggcttggtgcccccaggctggcacttttggggggatgggggttgtggggcctggaaccagccaaattcccaaaaccaccccgggaantatttt

SEQ ID NO: 55090 - DNA, 1108 bp, Homo sapiens
  misc_feature (1)...(1108): n = a,t,c or g
gaaaaatgtccagtggatagtagttttcaaaatctaggaaaactacattcagcatgatcccaattttatgtaacaaattcgtaaggaaggaaatttcttaacttacacatcaccagccattctttctaggttgtagaatgacaccagtgtgggttgtgggtttttgttttttgttttgggggatattttctgtccatttatgtcacttttacaattaaagaaacacgatagattcacttatgttatgaatctatattgtctgaaacttttttcttaaatgattttcttaggcttcttcactctctctgactttactagctctagtaattgacgtacttttcataacagttttaagtaatcaaacagttatatcacttcagaagtgaaaaactctttgtcttcaaagacatctctttgataatagacttaccagttgctgatcctgaacaactggctaggcctgttcatttgttttttgtttgtttgtgagatggannnnnnnnnnnnnnnnnnnnnnnnnnnnnnnnnnnnnnnnnnnnnnnnnnnnnnnnnnnnnnnnnnnnnnnnnnnnnnnnnnnnnnnnnnnnnnnnnnnnnnnnnnnnnnnnnnnnnnnnnnnnnnnnnnnnnnnnnnnnnnnnnnnnnnnnnnnnnnnnnnnnnnnnnnnnnnnnnnnnnnnnnnnnnnnnnnnnnnnnnnnnnnnnnnnnnnnnncagcctcccaaagtgccgggatccacacccgttccatttgttaaagccaatttgcctaaaaactgacgaggtttattccattgcctatacagcagtgtttgattcagataaatatccttaatagagtcacatttccttcatgtcatgccctttaaggttgttccccaaatagtcataaagaacagaggatacctcaggtatgtaagatcttagagccaagagagagtatggaaatggatgttcagctggtatttactgtcataagtgggattaggaattgtgggtttagggaattaaaaacaaccaacaattctacttggcttttaatctcttcagttatgagtgaagcatatttgcttgtaagggaagagataaggtaaaggaaatgaaataaag

SEQ ID NO: 55091 - DNA, 349 bp, Homo sapiens
  misc_feature (1)...(349): n = a,t,c or g
aagaaaaaagaccaaagaaaaaaagccatttcctttagtatttattttctctttttaaacaacagacttgttaggaacncaaactatggagacagactgcttactgcctaaattcaaactctgtcaccttgacaaagtttgaatttaggcagtaagcagtctgtctccatagtttgtgttcctaacaagtctgttgtttaaaaagagaaaataaatactaaaggaaatgttctttttttcttttgttcttttttcttttgttctttgatatgtcttaatcctgtgtttttgaatgaaaacttttttgcatcctacttcaccatttttcctagttatacaaattttagat

SEQ ID NO: 55092 - DNA, 252 bp, Homo sapiens
ggtaaaatttcttaagtgctttgttctgataaacggatgtaaaagtaacaaaaaaggaataacaactaatatggcctgtggatctgacaaagaaaaacctgaagaaattcagaatctagatacacttagattctaaattagacacactcagattctaatgaacacttagaatgcttcgccagtggcttttcaagttacactggaagcttgattatgagaaagttttgttttcattggcaagagggtagatga

SEQ ID NO: 55093 - DNA, 375 bp, Homo sapiens
ttatatatgtaaaaactataattaagaattagctcttgcctctttccctggaaattataaaagtaaatgaaagtatttttatatgaaacaggcagtgttgtggtttgaattaaatgaggttatggcatagttaggttggataattatagtgcaaattgttatctaggttgtgatgatgacagacatgatacttgatgttttatattttgtagatgtcagtgggatatacaactttgttacatttactgaactcaataatgtatagacaacttcacgtgcttacatttttaatagtttttaattttatggagacaaatgagaatggggggaaaaggaaaaaataattctaagtatgggaaattatcttttgtgcta

SEQ ID NO: 55094 - DNA, 822 bp, Homo sapiens
  misc_feature (1)...(822): n = a,t,c or g
tggccatgggatgagtttttaatgtgaggcaaaatcagtccacaatacaaaatctaaaaatcacacccacttttcccacctggntncnnnnnnngggggaagctgggggtttctnttgcctgcagggtgtggggaggagcagaggagggccaagaaagggagaaggaaacagaggccacagaggctggctggaggtatcctgctgccccctgccctgtcctggagctgcccttgnctcctgtgcantnttaccnggtgcacgcctgtgtnggcccagccccatctgtctggtctggccctgagaggctcgggcaccagctgcatcatttctctttcttctccagccccttcgatgctgatgcctctgttccctctttgggattctgtcactgccagctggatccttaggatttgactcctcataacttgggccccggggcagtagggggaagcgggcaggtgggcaaccgctgggcattacatggcgctgggattctgcgggcgcccggcggcgagggccagctagcttctgctgcatggagtcggccaggctggctggggagcccgagactgtggggaagtgggtgagcctcggggtatgaggcaggatttccgccgaggactcgtagctgaacatctctgtcacttctcccttggccagcgccaccaggacaggaaaaccgatgcaggcggggaccaggtataggagggcaggctgagcatgcttgaagatgtgcatgatgaagatggtaaggcccaggccgaagatgtaggctgcaaagctggtgtagaagtaggtgtgggtattcttcttcaagctga

SEQ ID NO: 55095 - DNA, 375 bp, Homo sapiens
  misc_feature (1)...(375): n = a,t,c or g
gctagaggctcctccctaggaccctttccttctctcgttaggaggggagagggcgtgagcagcagtgtgattctggcgggacagcttggcctctggcagccctgccttctggaagtggcagacagtgtaggagtctgagccagcctagactgggtgggaagggaagacagttgggagcagcagtctgcccacctggctccccaagcatgtcctgcccttgagccttggtcctgtctttgggactgtcctgtggttcccaaactagtcctcagcgagggactctttaaggccnagggctccctccncanggctggcaagtgtcntttccatttgtgtanganttgnccaantanncccnnaganagngtngaggag

SEQ ID NO: 55096 - DNA, 400 bp, Homo sapiens
atttcagactcagccttcacaggaagccttctacactttctgtttaaatgacagcacttaggatgatgcatgaatttcaaagaggcaatgtccaagctcatctcgggtttacttgggcattattattcatgaagccctttctgagctctatctgaggatatctgtaagctgtttcaaaagaccagggacccctactgtaataaacaagtcatttacatgggggaaatgaaaaacctgccatgtctgccaaatgaaggcggatgtgtctaagcagaggaggattgatgaagtgagattagagaaagctaaaggctggattaaaatacatcaaatctgccaagtgatggagaatatactaccaaccaacaggaatggatgttagtgcctagatgatgttgcc

SEQ ID NO: 55097 - DNA, 1331 bp, Homo sapiens
tttttttttagtgtaaacattcacatatttaatagtacctttaaaataagcattactacatttaaaatggttccaaaatgaatctataaatggtaatataaattaaaaaatacgaacttaaagtgaataaatttttaaccttagctatggtataaataatggtaaatgtatagtgtacctttgagtcattaaaatgtcttaaaagataacagcttgttaccagaacattagaaaccatagccatgattctcaagcgttaacaatctacatttgatattttcttgggccactgcattcttcaatgaataataatttccagaattccattccatgttgttttccaatagatcttttcacactcgatgttgaatacatggctctttgcagatgaataaaacaagtgcattcagtttagagatccattttgcgaaggctcattcgactgaaggaatctctgtggcaggtgacaggcaatactgccttgtataactgagggatctttctgttgatcagtggctgtagggcctctttaaggcgatgatagtttctctccagttccctttgatactccttttgatccggcccaattaagctcttattttttcttaaggcatcttcacaccttttagtaaaatctttaaagcagagtcgcagtttattatgatgtctgaagagctttgggtcactaggtatttcagacagaaaaacctgggcaacttccaaaggcccctgattcactgtggtgcctacagatccctggagtaccatctgaagcattttggggtctgcgggatcctgatgtgttgcaaatgccaactcctgtgtctttttctgcatgtcctcaatagcaacttcaattggtgttaagatgatctcttctttatgagtgacattgacccttgttttaatataaggaaaggcatgagacgtagtcagaatggtcttccttttgaattgttcatgaagttccccatgggcacggccatctaaagtaaagggtgtacagtacatgaatcgacgaagattgtaatttttgtcgaaataggtgattctgtccttcatctcatatgtgtcaaagtatggctccacataggtaatctgaatatatgccttgttaggatctaatttacacttgtctacaggattagagtctttgattacttcaaccacatcctctccaaatctttctccgtaaaatccctccaatctgtgagatatctctgcaagtttggttattgcaggctccttgtaaacaaattcttgttcatccaaatccccgaacttggttccataaaaaccaacacgaaaataggtgccaaacatccgcttac

SEQ ID NO: 55098 - DNA, 967 bp, Homo sapiens
caactaaatacaagaagcaagcacatggagaaactagaagtagaccctagcaagcactcattccctgatgtgactaacatagttcaagagaaaaaacacacacccagaagacgacctgaacccaaaattataccaagtgaggaagacccaacctttgaagacaaccctgaagtgcctccgctgatttgaaacatctggctgcgttgccattggctgagacccaccaggtccagttttggttggtgtagagaccatatgcatattattcctgggataaacacagagttatttgtcaatatcgctgctccagtgttttaactcttactttgcatagtaatatccttaagatagcttaaaattaaaatgtatgtcttaaatgctataactcatcatttacctataataaagggttggtattgaaaatgtttagtaagatcatagaactattgcataaaacactgattataaatactgtctacttatgcaaagtattaattcatagataaaaggactgagtattaaattggtacttcagcaaagtggtcaagcttagaagttaaaactgtaatttcagacccaattggaatactttaatatgattttaaacagcatttccattttccttcccatgatgtgtctgctttctctggtggcatggtataatggcaagaatatgagttttgaaaccagacactctatatttggattccagctcaatcactttgtaaagaccttcagcaagtcctttaattctctgagccttagtggcttcatgtataatctgggaataataacacttgcctcacaggtttgtctcaagataaactgcagaaagcacttagtacagtgtcagccatacatttaggagcctcttctctctctccttcttccctttctcctctctcttctcctccctttctcctgtctctcctcctccctgctccttcttcccctccctccccaatta

SEQ ID NO: 55099 - DNA, 430 bp, Homo sapiens
agataacctggcaagtggtagtggccgcttctcgggtgctgtgcttcacgttttggtactaaaggccgagactgttgtggcgacggcgacctctacggcaacggcttaagctctcggaggagtggcagagtactatctgaaggaggggcttctggttagcccaggttccatcataatgaatggatccaatatggcaaatacatcaccgagtgtaaaatccaaagaggaccaggggttaagtgggcacgatgaaaaggaaaacccatttgcagagtacatgtggatggagaatgaagaggatttcaacagacaggtggaggaggaactgcaggagcaagacttcttggaccgctgcttccaagagatgctggatgaagaagaccaagactggtttattccatcacgagacctgcctcaggccatgggacag

SEQ ID NO: 55100 - DNA, 295 bp, Homo sapiens; identical to SEQ ID NO: 40740

SEQ ID NO: 55101 - DNA, 402 bp, Homo sapiens
ctccgcaatgccttggacgtcctgcatagagaggtgcccagagtcctggtcaacctcgtggacttcctgaaccccactatcatgcggcaggtgttcctgggaaacccagacaagtgcccagtgcagcaggccagcttgaaccacttggaagcaaaacagagaccctggacctgagagcagagatgcccatcacctgtcccactcagaatgagcccttcctgagaacccctcggaatagtaactacacgtaccccatcaagccagccattgagaactggggcagtgacttcctgtgtacagagtggaaggcttccaatagtgttccaacctctgtccaccagctccgaccagcagacatcaaagtggtggccgcctgggtgactctctgactacagcagtggg

SEQ ID NO: 55102 - DNA, 109 bp, Homo sapiens
tctcgaggatccgaattcgcggccgcgtcgacctgcccccttttgacctctgctaaaattatttgttactgtagacttaacacatgaagtcgacgcggccgcgaattcc

SEQ ID NO: 55103 - DNA, 396 bp, Homo sapiens
cttctgtactactgacatgacacttcatttggcgttctaattttgtatcactacagtgatgatgtaaaaatgacatggccattggaatttgcctagaatcccggccctaggtccaaaagtatattttgcaagatgatttcaatgctaatttcaaaaaacacgttgatgaagagaaggaaatgtatgaagaaggaagtgggttagctcaggaaatgaataactgcctctataagagtttattctgtgactgtttggtttttcactctgtgggagccttgagaaacgatacccagagaagcccatttgaggtctttcaaacaccctcaactaaattttagtagaagagaatctgtaccactagtgacaacaaagtatgaacacaaattctggcaccat

SEQ ID NO: 55104 - DNA, 344 bp, Homo sapiens
  misc_feature (1)...(344): n = a,t,c or g
tttttttaataaaagattttttttaataacagaattttagtttgcttgcagttcattcattgtatctgctaagnnnnnnnnnnnnnnnnnnnnnnnnnnnnnnnngcggcttcttgggagagactctaaaacctgagaggtttcaggccactgagctgagcccacatcatgtgtctggcttaggatggggcttctctgaaccctcactagctctcagtttctggtacatccggaaggaaaactgacagcacatctctctcttttaactcaagttccacctgggccaagtttggcttttctgagagcaaagtttctcttagcccacgcgtccgcccacgcgtccg

SEQ ID NO: 55105 - DNA, 359 bp, Homo sapiens
tttttttgctgcaatatatatattttaattcaaagtgaatcgacagtaatacaccataaattcttattttgacactcaccaaaatagtcacctggaaaacccgctttttgtgacaaagtacagaaggcttggtcacatttaaatcactgagaactagagagaaatactatcgcaaaccgtaatagacattacatccataaaattttcccagtccttattgtaatattgcacagtgcaattgctacatggcaaactagtgtagcataggagtaaaagcaaaaacaaataaaccaaagaaagaaagccacaagtctaaaattgttaaacaattaacagttcaaacttagtaatcaaatctg

SEQ ID NO: 55106 - DNA, 5247 bp, Homo sapiens
gctgtggctgcggctgcggctgcggctgagatttggccgggcgtccgcaggccgtgggggatgggggcagcgagctccagccctcggcggtggcggcggccgtaggtgtggggcgggcgtccgcgtccggcacgcgagatggagcgccgtggatttcagtttttctgactgttacatgaaaggatgattgctcacaaacagaaaaagacaaagaaaaaacgtgcttgggcatcaggtcaactctctactgatattacaacttctgaaatggggctcaagtccttaagttccaactctatttttgatccggattacatcaaggagttggtgaatgatatcaggaagttctcccacatcttactatatttgaaagaagccatattttcagactgttttaaagaagttattcatatacgtctagaggaactgctccgtgttttaaagtctataatgaataaacatcagaacctcaattctgttgatcttcaaaatgctgcagaaatgctcactgcaaaagtgaaagctgtgaacttcacagaagttaatgaagaaaacaaaaacgatctcttccaggaagtgttttcttctattgaaactttggcatttacctttggaaatatccttacaaacttccttatgggagatgtaggcaatgattcattcttgcgactgcctgtttctcgagaaactaagtcgtttgaaaatgtttctgtggaatcagtggactcatccagtgaaaaaggaaatttttcccctttagaactagacaacgtgctgttaaagaacactgactctatcgagctggctttgtcatatgctaaaacttggtcaaaatatactaagaacatagtttcatgggttgaaaaaaagcttaacttggaattggagtccactagaaatatggtcaagttggcagaggcaactagaactaacattggaattcaggagttcatgccactgcagtctctgtttactaatgctcttcttaatgatatagaaagcagtcaccttttacaacaaacaattgcagctctccaggctaacaaatttgtgcagcctctacttggaaggaaaaatgaaatggaaaaacaaaggaaagaaataaaagagctttggaaacaggagcaaaataaaatgcttgaagcagagaatgctctcaaaaaggcaaaattattatgcatgcaacgtcaagatgaatatgagaaagcaaagtcttccatgtttcgtgcagaagaggagcatctgtcttcaagtggcggattagcaaaaaatctcaacaagcaactagaaaaaaagcgaaggttggaagaggaggctctccaaaaagtagaagaagcagatgaactttacaaagtttgtgtgacaaatgttgaagaaagaagaaatgatgtagaaaataccaaaagagaaattttagcacaactccggacacttgttttccagtgtgatcttacccttaaagcggtaacagttaacctcttccacatgcagcatctgcaggctgcttcccttgcagacagattacagtctctctgtgatagtgccaaactctatgacccaggccaagagtacagtgaatttgtcaaggccacaaattcaactgaagaagaaaaagttgatggaaatgtaaataaacatttaaatagttcccaaccttcaggatttgggcctgccaactctttagaggatgttgtacgccttcctgacagttctaataaaattgaagaggacagatgctctaacagtgcagatataacaggtccttcctttataagatcatggacatttgggatgtttagtgattctgagagcactggagggagcagcgaatctagatctctggattcagaatctataagtccaggagactttcatcgaaaacttccacgaacaccatccagtggaactatgtcctctgcagatgatctagatgaaagagagccaccttccccttcagaaactggacccaattcccttggaacatttaagaaaacattgatgtcaaaggcagctctcacacacaagtttcgcaaattgagatcccccacgaaatgtagggattgtgaaggcattgtagtgttccaaggtgttgaatgtgaagagtgtctccttgtttgtcatcgaaagtgtttggaaaatttagtcattatttgtggtcatcagaaacttccaggaaaaatacacttatttggagcagaattcacactagttgcaaaaaaggaaccagatggtatcccttttatactcaaaatatgtgcctcagagattgaaaatagagctttgtgtctacagggaatttatcgtgtgtgtggaaacaaaataaaaactgaaaaattgtgtctagctttggaaaatggtatgcacttggtagatatttcagaatttagttcacatgatatctgtgacgtcttgaaattataccttcggcagctcccagaaccatttattttatttcgattgtacaaggaatttatagaccttgcaaaagagatccaacatgtaaatgaagaacaagagacaaaaaagaatagtcttgaagacaaaaaatggccaaatatgtgtatagaaataaaccgaattcttctaaaaagcaaagaccttctaagacaattgccagcatcaaattttaacagtcttcatttccttatagtacatctaaagcgggtagtagatcatgcagaagaaaacaagatgaactccaaaaacttgggggtgatatttggaccaagtctcattaggccaaggcccacaactgctcctatcaccatctcctcccttgcagagtattcaaatcaagcacgcttggtagagtttctcattacttactcacagaagatcttcgatgggtccctacagccacaagatgttatgtgtagcataggtgttgttgatcaaggctgttttccaaagcctctgttatcaccagaagaaagagacattgaacgttccatgaagtcactatttttttcttcaaaggaagatatccatacttcagagagtgaaagcaaaatttttgaacgagctacatcattttgagggaatcagaacgcaagcaaaatgcgttaggaaaatgtgatgcatgtctcagtgacaaagcacagttgcttctagaccaagaggctgaatcagcatcccaaaagatagaagatggtaaaacccctaagccactttctctgaaatctgataggtcaacaaacaatgtggagaggcatactccaaggaccaagattagacctgtaagtttgcctgtagatagactacttcttgcaagtcctcctaatgagagaaatggcagaaatatgggaaatgtaaatttagacaagttttgcaagaatcctgcctttgaaggagttaatagaaaagacgctgctactactgtttgttccaaatttaatggctttgaccagcaaactctacagaaaattcaggacaaacagtatgaacaaaacagcctaactgccaagactacaatgatcatgcccagtgcactccaggaaaaaggagtgacaacaagcctccagattagtggggaccattctatcaatgccactcaacccagtaagccatatgcagagccagtcaggtcagtgagagaggcatctgagagacggtcttcagattcctaccctctcgctcctgtcagagcacccagaacactgcagcctcaacattggacaacattttataaaccacatgctcccatcatcagtatcagggggaatgaggagaagccagcttcaccctcagcagcagtgccctcctggcacagatcacgatccccacggtctcgtggtgaagtcaatgccagacccagacaaagcatcagcttgtcctgggcaagcaactggtcaacctaaagaagactctgaggagcttgggtttgcctgatgtgaatccaatgtgtcagagaccaaggctaaaacgaatgcaacagtttgaagacctcgaagatgaaattccacaatttgtgtagggatgtcaaatttcagggtttttttgttgttgttgtgttattttgtggtattgtgcttgttttgtgaaagaatgttttgacagggccccttttgtataggactgccaaatcatgggttttgccttttgttgttgtatttatcctctgttggtaatactgaatggtagaatgttttgatagggtcacatttgtgcctcactggaaattaacctttaaattctgtatttttaaagttgtgaataagatagggtggattccgtatttttttaaaagttcagttgactttccccaccaaatggtccatttgaatgcatccctaatatatgatatagtctcaactaataggtgcaatttgggaaaatcaggtttattttttggagtggaactgttataagtgcttatttataaaaggaatgtttctgaatgcaagtgcctaaaaagatctttgttggtatgcatatgttttgtcacacaattttatagtgcatctttcaccatttgtgcttttttaagatacgtatgtaagctcttatttttcaattggcaattcagttaatttttaaatgtttacataatggccagaaggcttgcaaatctgtatttaattgcattttaattaattgccagtttttacatgtgatagtcagttgtacaaagaaaatgcacttaaacctgtttctaaattatatattcagttatattatatttggctttagatggttttaatacatttgatagtttttcaccccttggctttattttatataaacttttgtttttcagcagttctgaactttttagtattttataaatggtccaaaaaatgcctgtttcagaagtttttgaattcagtgcatttcctcttgatttgtctgggttaaaaccattccttttgtatgaaatgttttgacttaggaatcattttatgtacttgttctacctggattgtcaacaactgaaagtacatatttcatccaaatcaagctaaaatttatttaagttgattctgagagtacaggtcagtaagcctcattatttggaatttgagagaaggtataggtgatcggatctgtttcatttataaaaggtccagtttttaggactagtacattcctgttattttctgggttttatcattttgcctaaaataggatataaaagggacaaaaaataagtagactgtttttatgtgtgaattatatttctactaaatgtttttgtatgactgtgttatacttgataatatatatatatatatatatatcaacttgtta

SEQ ID NO: 55107 - DNA, 714 bp, Homo sapiens
gcctgccttttcaatgatttaatttgattttattttatccgtcaaatctcttaagtaacaacacattaagtgtgaattacttttctctcattgtttcctgaattattcgcattggtagaaatatattagggaaagaaagtagccttctttttatagcaagagtaaaaaagtctcaaagtcatcaaataagagcaagagttgatagagcttttacaatcaatactcacctaattctgataaaaggaatactgcaatgttagcaataagtttttttcttctgtaatgactctacgttatcctgtttccctgtgcctaccaaacactgtcaatgtttattacaaaattttaaagaagaatatgtaacatgcagtactgatattataattctcattttactttcattatttctaataagagattatgtgacttctttttcttttagttctattctacattcttaatattgtatattacctgaataattcaatttttttctaattgaatttcctattagttgactaaaagaagtgtcatgtttactcatatatgtagaacatgactgcctatcagtagattgatctgtatttaatattcgttaattaaatctgcagttttatttttgaaggaagccataactatttaatttccaaataattgcttcataaagaatcccatactctcagtttgcacaaaaaaaaaaaaaaaagtcgacgc

SEQ ID NO: 55108 - DNA, 422 bp, Homo sapiens
ggagctgctgaaatggattgaagtgaaagccaaagctaaaaagctgcagatccagcccagccagctggaattgttctactgtttgtacgagatgcaggaggaggacttcgtgcaaagggccatggactatttccccaagattgagatcaatctctccaccagaatggaccacatggtttcttccttttgcattgagaactgtcatcgggtggagtcactgtccctggggtttctccataacatgcccaaggaggaagaggaggaggaaaaggaaggccgacaccttgatatggtgcagtgtgtcctcccaagctcctctcatgctgctgttctcatgggttggggcgctgtggcctctcgcatgagtgctgcttcgacatctcttggcctcacagcaaccagaaactggtggactggactta

SEQ ID NO: 55109 - DNA, 88 bp, Homo sapiens
gggcatttcagtcactggtttgcagagtccaggtacactcttctgaagagttcaatggagaatgtgctctattatctgttaaaatgct

SEQ ID NO: 55110 - DNA, 355 bp, Homo sapiens
gaactggaaggataaaaccaaagttgatggtaaggatactgaggggtagggagagtgactttttccaaaaacttcacctgttaaaaagaaatacttgcaccactggcccttcccctggtgctgcatctgtgtacagggaatcagaatgtttactgcgttttcttgtctcaggttgcctcgccccaaaccttagccccccaccaaagagaactgatacagcaggacctggggccccagtggcaggagcgtctttgggatggaggggctggaggtggcaaggctcccatagtgggcagtcagcagctcgagctcacaaaggagcttcaaagcccactctgaccagtatagcttgagc

SEQ ID NO: 55111 - DNA, 715 bp, Homo sapiens
ttaattaattaattaaaaggaatttcagctagaagagccttattccattttcctttttattaaacatctggcataagttggtaagtatgtgaagtttatcatatattcttatgcgaattattattttcgccttttttttataattctgtctgggatttgaatagtagagtttgaattcaggaaggacacctgtgataggacaataaaatctagagctggacatggccctcctgctacctgtcgacacaggtaaatttcctagaatctgttccctttatagatccatgttgaaattcacttatagcctcacttgcatgagatttgccaggcagaagtgaagaagacattagtcaggtattggaaccccaccatacagggagacagcctgcttcctgctcattttcctggttattttctctgccaatcaaaagtatcctgaaaacaccctgagctgcttgacttccattctcaaagagatgtgttggtttccacagttgtctccacaagctccgcatcaaagatccacgtacagtttggattttccttctagccttcatgtgtggcccaagcatctatttcagactgtcatggttggcattgttctctgaggttctgtcttccctttgtgtttctatgagctttaatttgtatggttcttgttctgttaatgccactagggactatgtattcctgattccaccatgacagctacagt

SEQ ID NO: 55112 - DNA, 380 bp, Homo sapiens
attagttgtaaaaagtaaaggcacaagagtcgggtacagtgactgacatctataatcccagctactccagaggctgaagtgagaggaatagcttgagcctaggagttggaggctgtgatcatgccactacattccagcctgggggacagtgcaaaaccacgtctcttaaaaaaagaaagaaagggctgggcgcggtagctcacacctgtaatcccagcactttgggaggccaaggtgggtggattgcttgagcttacgagtttgagaccaacctgggcaacatggagaaaccccgtctctacaaaaaatagaaaaattatcctgttgtggtgttgtgcacctgtagtcccagctactcaggaggctgaggtgggagggag

SEQ ID NO: 55113 - DNA, 126 bp, Homo sapiens
tctttcttcttttttttggaacatttccttattttctggcacaaaatcttccagactcatcttgtaccttctctgttccagttttagaactggccatttctcttataaatgaaaagctgagtgttc

SEQ ID NO: 55114 - DNA, 2805 bp, Homo sapiens
ggcacgagagcactgcctgtaaagccctcgcatgagaggccagcctgctagggaaatccaggaatctgcaacaaaaacgatgacagtctgaaatactctctggtgccaacctccaaattctcgtctgtcacttcagacccccactagttgacagagcagcagaatttcaactccagtagacttgaatatgcctctgggcaaagaagcagagctaacgaggaaagggatttaaagagtttttcttgggtgtttgtcaaacttttattccctgtctgtgtgcagaggggattcaacttcaatttttctgcagtggctctgagtccagccccttacttaaagatctggaaagcatgaagactgggctttttttcctatgtctcttgggaactgcagctgcaatcccgacaaatgcaagattattatctgatcattccaaaccaactgctgaaacggtagcacccgacaacactgcaatccccagtttaagggctgaagctgaagaaaatgaaaaagaaacagcagtatccacagaagacgattcccaccataaggctgaaaaatcatcagtactaaagtcaaaagaggaaagccatgaacagtcagcagaacagggcaagagttctagccaagagctgggattgaaggatcaagaggacagtgatggtgacttaagtgtgaatttggagtatgcaccatctgaaggtacattggacataaaagaagatatgagtgagcctcaggagaaaaaactctcagagaacactgattttttggctcctggtgttagttccttcacagattctaaccaacaagaaagtatcacaaagagagaggaaaaccaagaacaacctagaaattattcacatcatcagttgaacaggagcagtaaacatagccaaggcctaagggatcaaggaaaccaagagcaggatccaaatatttccaatggagaagaggaagaagaaaaagagccaggtgaagttggtacccacaatgataaccaagaaagaaagacagaattgcccagggagcatgctaacagcaagcaggaggaagacaatacccaatctgatgatattttggaagagtctgatcaaccaactcaagtaagcaagatgcaggaggatgaatttgatcagggtaaccaagaacaagaagataactccaatgcagaaatggaagaggaaaatgcatcgaacgtcaataagcacattcaagaaactgaatggcagagtcaagagggtaaaactggcctagaagctatcagcaaccacaaagagacagaagaaaagactgtttctgaggctctgctcatggaacctactgatgatggtaataccacgcccagaaatcatggagttgatgatgatggcgatgatgatggcgatgatggcggcactgatggccccaggcacagtgcaagtgatgactacttcatcccaagccaggcctttctggaggccgagagagctcaatccattgcctatcacctcaaaattgaggagcaaagagaaaaagtacatgaaaatgaaaatataggtaccactgagcctggagagcaccaagaggccaagaaagcagagaactcatcaaatgaggaggaaacgtcaagtgaaggcaacatgagggtgcatgctgtggattcttgcatgagcttccagtgtaaaagaggccacatctgtaaggcagaccaacagggaaaacctcactgtgtctgccaggatccagtgacttgtcctccaacaaaaccccttgatcaagtttgtggcactgacaatcagacctatgctagttcctgtcatctattcgctactaaatgcagactggaggggaccaaaaaggggcatcaactccagctggattattttggagcctgcaaatctattcctacttgtacggactttgaagtgattcagtttcctctacggatgagagactgggctcaaggaatatcctcatggcagcttttatggaaggccaactctggaacacgctggttatctaaatgagaagcagagaaataaagtcaagaaaatttacctggatgaaaagaggcttttggctggggaccatcccattgatcttctcttaagggactttaagaaaaactaccacatgtatgtgtatcctgtgcactggcagtttagtgaacttgaccaacaccctatggatagagtcttgacacattctgaacttgctcctctgcgagcatctctggtgcccatggaacactgcataacccgtttctttgaggagtgtgaccccaacaaggataagcacatcaccctgaaggagtggggccactgctttggaattaaagaagaggacatagatgaaaatctcttgttttgaacgaagattttaaagaactcaactttccagcatcctcctctgttctaaccacttcagaaatatatgcagctgtgatacttgtagatttatatttagcaaaatgttagcatgtatgacaagacaatgagagtaattgcttgacaacaacctatgcaccaggtatttaacattaactttggaaacaaaaatgtacaattaagtaaagtcaacatatgcaaaatactgtacattgtgaacagaagtttaattcatagtaatttcactctctgcattgacttatgagataattaatgattaaactattaatgataaaaataatgcatttgtattgttcataatatcatgtgcacttcaagaaaatggaatgctactcttttgtggtttacgtgtattattttcaatatcttaataccctaataaagagtccataaaaatccaaaaaaaaaaaaaaaa

SEQ ID NO: 55115 - DNA, 440 bp, Homo sapiens
attctttccaagcctaagaacagaccaaattgggctgttaaatggagaaacagtggggataatcaccctttctctaaatagatcttccataatgagtttcaatccttgaaagccgtgttttaattcatattgatcagtattaaatattttaacagagaaggtccatagagttccattttgtaaagccaattgtaagtgccaaaggtaacttaattttaattattttaatgtgttatttactgggtcatagcatccacgcccactgtggaacattttagggccatgttatgttacgaccatggggcagttaggcaaggcaccaggaacaacagttcccatactcctgcacccaaatgccagttatcatcatttcttactttggtcagtcagatctattaatagaggcctggtgggctcagcaaatgcgcccagagtggcct

SEQ ID NO: 55116 - DNA, 534 bp, Homo sapiens
  misc_feature (1)...(534): n = a,t,c or g
tgctttgtcaactcagctgggaacatttcccagtgcaactcacatttttcactgctctgtgcctgtccgtataagctcaatgagtattgatttaggggctttggagaactttgaatgctaccccccaagtaaccattgttggcaacctggtacctctacttttagccatttctccttctctataaataagtgcagaagtaacccacttggtaacaggcatccttgccaagccttcaccactaggtcagtgtaagaattaaagaaagaggaaagaaacacaaaaagtggcttgatggttaagacaggtttattttagagaaaacacacctgagaggggctgctggctgaattaggttagagtcttttctacagactaagagtgtttaaggatttagggtgggagagtttcttagaggcttggactgcttctgtgtttttttgttgtgcttatatgggagggagagtggtgtgtttgctttnatacatttttctgcagctgtaggcataccccccaagtctgcttttagcttccct

SEQ ID NO: 55117 - DNA, 765 bp, Homo sapiens
atggaaatggtggtcttttagaacctggaaagggatatttcttagccctttgaggcctatggttagactggaaatatcatcacataaaaactagacagaagctttcggagaaacttctttgagatgtgtgctttcacctcacagaggttgaacactttcttttgattgagcagtttggaaacactctttctgtgacatctgtaaatggatatttagattgctttgaggccaatggtgacaaaggaaatatcttcacataaaaactacacagaagcattctgagaaacttctttgtgatgtgtgctttcatctcacagatttgaacctatcttttgattgagcagttttgaaactctctttttgtagaatctgcaagtggacatttggagccatttgaagcctatggtagaaaaggaaatatcttcacataaaaactagacagaagcattctgagaaacttctttgtgatgtgtgcattcatctcacagatttgaaaatttcttttgattgagcagttttgaaacactgtttttgtagaatctgcaagtggacatttgtagcactttggagccaatggtagaaaaggaaatatcttcacataaaatctacacagaagcaatctgggaaacttctttgtgatgtgtgctttcatctcacaaagttaaacctttcttttgattgagcagttttgaaactctctttttgtagattctgcaaatggatatttggagcggtttgagactacggtggaaaaggaaatgtcga

SEQ ID NO: 55118 - DNA, 885 bp, Homo sapiens
ctactactactaaattcgcggccggtcgacgctggtgcacaggaaggatgaggaagaccaggctctgggggctgctgtggatgctctttgtctcagaactccgagctgcaactaaattaactgaggaaaagtatgaactgaaagaggggcagaccctggatgtgaaatgtgactacacgctagagaagtttgccagcagccagaaagcttggcagataataagggacggagagatgcccaagaccctggcatgcacagagaggccttcaaagaattcccatccagtccaagtggggaggatcatactagaagactaccatgatcatggtttactgcgcgtccgaatggtcaaccttcaagtggaagattctggactgtatcagtgtgtgatctaccagcctcccaagggagcctcacatgctgttcgatcgcatccgcttggtggtgaccaagggtttttcagggacccctggctccaatgagaattctacccagaatgtgtataagattcctcctaccaccactaaggccttggtgcccactctataccagccccagaactgtgacccaagctccacccaagtcaactgccgatgtctccactcctgactctgaaatcaaccttacaaatgtgacagatatcatcaagggttccggtgttcaacattgtcattctcctggctggtggattcctgagtaagagcctggtcttctctgtcctgttttgcttgtcacgctgaggtcaatttgtaccctaaggcccacgaaacccacgagaatggtcctctgaactttccagccacatccatctggcagttgtgccaagggaggagggaggaggtaaaaggcagggagttaataacatgaattaaatctgtaatcacc

SEQ ID NO: 55119 - DNA, 466 bp, Homo sapiens
  misc_feature (1)...(466): n = a,t,c or g
gcttacatggagtacctagagtagtcaaatttatagagacaaagtaaagtggtgttacaaggggctaggaattgaagggaaatgggaaattgtttattgagtatagagttttagttatgcaaggtgaagatgaaaggagttctatagattggttgtacaacagtgtgaatatacttaacactgctaaaaatagttaaaatggtaaatttgacgttatgtgtattttactacattaaaataaagtggttctacctggcctgtgtgggtgaaaaagaaaaaatttttgaagactatactttcagggatcatttctgcagtaaataccatttgacccagccatcccattgctgggtatatacccaaaggattataaatcatgctgctataaagacacatgcncacgtatatttattggggnactattnacaatcgcaaancttggaaccancccagnggcctntatggg

SEQ ID NO: 55120 - DNA, 414 bp, Homo sapiens
gccagggcagcaagaaggtgtctgttggagccagcagaacagaaccaatttgaacaagaacctccagaggaacgacgaaccctgagaccacagctgctacagaccacaaacaccccatcagccaagagagacccttgaaggatggccgacacccagacacaggtggcccccacaccaaccatgaggatggcaactgcagaggacctgcccctccctccacccccagccctggaggacctgccactgccgccacccaaggaatccttctccaagttccatcagcagcggcaagctagtgagctccgccgcctctacaggcacatccaccctgagctccgcaagaatctggctgaggctgtggccgaggatctggctgaggtcctgggctctgaggaacccaccgagggtgacgtt

SEQ ID NO: 55121 - DNA, 458 bp, Homo sapiens
cggacgcgtggggaaggtgtctgttggagccagcagaacagaaccaatttgaacaagaacctccagaggaacgacgaaccctgagaccacagctgctacagaccacaaacaccccatcagccaagagagacccttgcatccagcctctaccctgctgaacatctagatctaaggctcccaatcccatcctcatctctgccccttcttctcagaaggatggccgacacccagacacaggtggcccccacaccaaccatgaggatggcaactgcagaggacctgcccctccctccacccccagccctggaggacctgccactgccgccacccaaggaatccttctccaagttccatcagcagcggcaagctagtgagctccgccgcctctacaggcacatccaccctgagctccgcaagaatctggctgaggctgtggcgaggatctggctgaggtctgg

SEQ ID NO: 55122 - DNA, 573 bp, Homo sapiens
gcaaatcaaagatatttggtagtcaaaataagtaaaagaaatataggaatattccagtcaatctctgaaatgtttatgaaaaacaggttaatatgttgtatttttttccttgtatcaagatgcaaaacataatttgcaaaattttataattgaaataaaacttggtatgctgttttataataaattagcaatatactttaaaaaaaatccagtttctcctataacatgatgtaaattaaatattcaggaatatttcaggtctgaaatctgctgctgaacttgttagacatttttgaaaggaaaattaggttagcgtacaatttatcataaatatatgaggtaaaatttgcaaaactttccacagtactttcttgaattataatactgaatgttttctgttccgatagagaaaagtgaagcaaatatgtgaggaatgaagtgatctagtgcaagttggtaattccagctaatgggagagaatgtaaatgtgcaaaggtacatattaagcttagggatttttgaatttttacgtcagtttatattttaattcttactgtacttggcatgcgcaat

SEQ ID NO: 55123 - DNA, 724 bp, Homo sapiens
caaagtggcatcaggtcctaaactgtagcttgcaatgtgcctgtttccagaaaccaaggtgaaagtgcttttagacagtgttcccatgcaagagtcccttcccagcttttttctggaaatgcatgtttctctgaactctgagtcccaagaaaaatcacttgagacaccaagaaaatgggggaagtgctaaaattgtgtgggaattcaagcttaacaataaacatcaagacatttttgataaaaatgaatccactgacatcggggaggagcaagagaacagcacgctgacactgggtcagaggctaagaccgacatttctgggaaccactcccggaagggcacagaggagacgctttcagcctctcatcagccagcctggcctgtagctgctgcacgttatgagtgtgttcctggcatgactgcttctaacagcgaccatttcattaagtttttaagtgcctggtaattgcttggttatgaccggtgtctgctccatggcagcctcttcctgaagaaatgctgaggcagtgtcacgctggtgtctgtcctccttacagaatgcctgaacagttccattgactcaaagtgaagatcaaaagaaccaaatgacagcaatagccaagtgtaatcatcagtaaccctgtgttctatccacaggtaaaaaacaatcatcctcttcattatgggtttcaattttaaatgtaatacatttttagaaatgcct

SEQ ID NO: 55124 - DNA, 917 bp, Homo sapiens
cctagcattccaggcccccattacttcaaaagtgagcttgaaattgttttaagtgaactatggctgcggattttttactgttttatctcagggagcatacagtggagtgattaaagtttggactccttctccttgtgatgaagagaaacagtgagtccagctcttaggaatggcatcagttctcctgcaaacaaaatgctgggatgcagacttttggcacattgtggaagtaggagaactattaatcctgtaatggttttcatgccactgggtcaggaaggctgtcctacactaaaccttactgcatctgaaaacatgtttacatcccaacaagccaccttagcttttttttttttttttgaaaggaaaatgagattacaagtcaatacctccacagagaggtaactcctaatattcctatgatctctgaaccctatttaaaccctcctaaaataaaaatatcattttggtttttctattatatttaactctaaaggcgggctctgactaatttgcttgggcttgatgctacagtattagcacaagctataagctccctaccaccatataagccttgctcttcggccttccatcattttgaaccctaaacctcatagatttagaacgaaacactgtataaaaacaaacagataaagggttaaaatattacaaataaatagctaaaataatcttccctcccccagtcactcctaagaaacagacaccaaacattacttaagtgtccaaaatgaccaaagtccttcatttgcccatgactcaaacggacaactacctcaaacaaagttgaacaaccttcatgcaaatggctcaaggaatgtattgctttttcattttctgcccagcccttcatatacatgcactaaaatgagtttaaaacatggcctaaaaatggaaaa

SEQ ID NO: 55125 - DNA, 1098 bp, Homo sapiens
  misc_feature (1)...(1098): n = a,t,c or g
tttttttttttttttacagttcacgcatatattgcttgatttaatccaagactcctggtccttcaagatgcaactcaaaagatatactggtcaaatacacttgaggaatacagcaaattacagatggccttttcagtgatctacagtgacataaagctttgagacttcctatattaactgtttaactcagtatttcccaaacccatctaaccatttttttcctcttatgacttacaagcatcccagagaactaatgcttcatggaacacatctgaattgtctgaatgccaatgaccccagttcacagacaaccagacatccccacccaccccaaacttgagcagtgttccctgtttactgtctccacttgatgcgtcttctaatttccctgggttaccatcacttgtaatgatgtgtttttcatgtgtacaggtttcacagcactgtcacacctgttagttatctcagttagattttgatcctcacaaccaccctgtgaaggtactggacaggtaaggcaagcattattattctgattttaaagacgaggaaacaggtttgaatcaagaagtgaccaggcccagtagtgtgctggtaaatgttgaacaactggctctcgaggagggaaaaagccctgttttatggcatttagcaatttctgtggtgcaaatattcccaccatagcagattttaagctgccaacagctctcacagcctggtgcaagccagctctggcgtactactgcaactgcccaacggtcacacagtaagtcagtgagcgctaaggcttgaagccaggccaaggctcctatccaacaatctcctaagcacagaagaactcagtaccagttccaaaatcccttctcttatcaggcttcatccccaacatgcttgtccactgagatcgcataccccattgttggctgcaagccaaagatatttcacagctctctgctcatccaggtagggctccttggtgaaaagcaccccgaggaaagcttgggcctctctcaagcctgagtctgcagcctgcttcagcaaggacactgccctctgccgctcagggttccacgaagaggctgggtctcgtangtatga

SEQ ID NO: 55126 - DNA, 2224 bp, Homo sapiens
aggacgtgggcgtgcaggacgcgggcgtgcaggacgccagagctgggtcagagctcgagccagcggcgcccggagagattcggagatgcaggcggctcggatggccgcgagcttggggcggcagctgctgaggctcgggggcggaagctcgcggctcacggcgctcctggggcagccccggcccggccctgcccggcggccctatgccgggggtgccgctcagctggctctggacaagtcagattcccacccctctgacgctctgaccaggaaaaaaccggccaaggcggaatctaagtcctttgctgtgggaatgttcaaaggccagctcaccacagatcaggtgttcccatacccgtccgtgctcaacgaagagcagacacagtttcttaaagagctggtggagcctgtgtcccgtttcttcgaggaagtgaacgatcccgccaagaatgacgctctggagatggtggaggagaccacttggcagggcctcaaggagctgggggcctttggtctgcaagtgcccagtgagctgggtggtgtgggcctttgcaacacccagtacgcccgtttggtggagatcgtgggcatgcatgaccttggcgtgggcattaccctgggggcccatcagagcatcggtttcaaaggcatcctgctctttggcacaaaggcccagaaagaaaaatacctccccaagctggcatctggggagactgtggccgctttctgtctaaccgagccctcaagcgggtcagatgcagcctccatccgaacctctgctgtgcccagcccctgtggaaaatactataccctcaatggaagcaagctttggatcagtaatgggggcctagcagacatcttcacggtctttgccaagacaccagttacagatccagccacaggagccgtgaaggagaagatcacagcttttgtggtggagaggggcttcgggggcattacccatgggccccctgagaagaagatgggcatcaaggcttcaaacacagcagaggtgttctttgatggagtacgggtgccatcggagaacgtgctgggtgaggttgggagtggcttcaaggttgccatgcacatcctcaacaatggaaggtttggcatggctgcggccctggcaggtaccatgagaggcatcattgctaaggcggtagatcatgccactaatcgtacccagtttggggagaaaattcacaactttgggctgatccaggagaagctggcacggatggttatgctgcagtatgtaactgagtccatggcttacatggtgagtgctaacatggaccagggagccacggacttccagatagaggccgccatcagcaaaatctttggctcggaggcagcctggaaggtgacagatgaatgcatccaaatcatggggggtatgggcttcatgaaggaacctggagtagagcgtgtgctccgagatcttcgcatcttccggatctttgaggggacaaatgacattcttcggctgtttgtggctctgcagggctgtatggacaaaggaaaggagctctctgggcttggcagtgctctaaagaatccctttgggaatgctggcctcctgctaggagaggcaggcaaacagctgaggcggcgggcagggctgggcagcggcctgagtctcagcggacttgtccacccggagttgagtcggagtggcgagctggcagtacgggctctggagcagtttgccactgtggtggaggccaagctgataaaacacaagaaggggattgtcaatgaacagtttctgctgcagcggctggcagacggggccatcgacctctatgccatggtggtggttctctcgagggcctcaagatccctgagtgagggccaccccacggcccagcatgagaaaatgctctgtgacacctggtgtatcgaggctgcagctcggatccgagagggcatggccgccctgcagtctgacccctggcagcaagagctctaccgcaacttcaaaagcatctccaaggccttggtggagcggggtggtgtggtcaccagcaacccacttggcttctgaatactcccggccagggcctgtcccagttatgtgccttccctcaagccaaagccgaagcccctttccttaaggccctggtttgtcccgaaggggcctagtgttcccagcactgtgcctgctctcaagagcacttactgcctcgcaaataataaaaatttctagccagtcaaa

SEQ ID NO: 55127 - DNA, 542 bp, Homo sapiens
  misc_feature (1)...(542): n = a,t,c or g
gctagggacccactgttgattcctaagttgtgggtgggtgatatcagtggcctcagtgcctgcataaccctcacctgtttatgactgatctactgtaaccttcctcaggttgagagtgagctgctgtgagccagtgacaactactgctacaacttgctgttacttgaaattcgtgtgctatgttggtagcacaggagtaggcggggcgggggttttggtgtgggcactaggtaagtgggtggcaacccgggcttctttggggaccattggtgctgacctttgcctggtcacctgcctgtgcctaggccaagtgaatgttacatcttggaacctgagccatggaggtggcgccacctccctgangagaaaggngtggncaaaggaanctcctgcatggctcctgntccttccccttccctacatttcacttgggctaatgatgtaancnccnttgannttgtnnattngntnataacaantnatnnacncntcntacanncatttgtgtntgatatntttgtantnnnttnattttttntttt

SEQ ID NO: 55128 - DNA, 157 bp, Homo sapiens
atcaattggaatcaagtctcagtcctgtggaagtgtttgctaaaacatctgcctccctggagatgaatcaaggcgtttcagaggaaagaattcaccttggctctagccctaaaaaagggggaaattgtgatctcagccaccaggaaagacttcagtc

SEQ ID NO: 55129 - DNA, 319 bp, Homo sapiens
ggcctatggcccagccgtcccaccacagaccctctacaaccccgcccagcagatcctggcctacgcaggcttccgcctgacgcccgagcccgtcccgacctgctcgtcctaccctctgccccttcagccctgcagccgcttcccagttgcgccctcctctgccctggcttcgtctgaggacctgcagcccccttctccaagcagctctggctctgggcttcccggccaggctccaccgtgctacgcacccacctactttcccccgggggagaagccacccccctacgcaccctgatagaggcgtggagtaaaagataac

SEQ ID NO: 55130 - DNA, 1450 bp, Homo sapiens
tttttttttttaaccaaataaattaccagttttatttcaggatattagtataatctgcattctaatatatttcataaaagaaaatattttatttccattacataggcaaagtttgttttttcccatatcaaagccaaatattatttgatgtactgaccaataatatatgtagaaagaataacagcaaaatatcttatttctttatataatttaatatataccctattaacaccagtgtgcagatgtacagtactgacagtatactaaatagttagtattaaaaattactttaaaaatgttttcaacattaggtactggtggaaccagagctgttattttgtacatcatatcatttatgtgttgcaaaggaaaagtaaaatttccagtagccattaggaaaaaaatgtactggatattttatgtagatatacaaaatctcatggccatctattggaaaaccctcaccaattctattgtgcactaataaaaacaccttttcaaacaacttgcacttatactgagttcataaaggctactataaaaatattgcaaaagcaataaaaacacaatatccgtacaaagtcctttggttttttaaaaagtcaaattttaagaggactgtatttatataaatgtgcaatactttttagtgaccctgactaacatttttgtttaggattatctgattttagaaaactaagttaaatgtttttccttattttctgtttcagaatgagaagacactaagaatgcacagaggtttagaaataagattgggtaaaagctttatgaagtgggatagcaagcactctacatgttttacttgttgccctaccaaagatacaaatgcctgactgccccaatttctgaaatttaacttgaattctaaatcttaactacccccctttcctttataatctttgagatgaaagtgtaaagattttaggttctctaacaaaacccaaaatatcactaaagccattctccattttcaaagaatatttaaagaaatgcgtatttcaatataaaacctgaaaatgctgaattaagacaccttaataacatggctagccaattactgatgtgactttagccttagaaaaagattatcaaaattggctaagttccaaatttaagcatttggttttatactgttaatattgtacctttctgatatagatatcaaagaaaaatgatctgatttttttcctgaaaacaacagtaaaatacaaattttttgtgaaaaaatccatgtcaagataggaaatacattgtttcaaaactcagaataagtgttatgaaagaactataaaattataaatttctaaaaaaaaatacactgaaaatgtctctctaggaaaaaatatgcaacttgttagatacaagaaaatatggcattaccatagggtgcagtcaactaggctatgaggctttaaaaactcacaaaaag

SEQ ID NO: 55131 - DNA, 160 bp, Homo sapiens
ccactgcgcccaactactggcatctcttctgattggtcagtgacgatgccgtgtcttaggtaattgactatcaaaatattaaataattaagttgtggataatttgaaagatcatccccactcctgaaaaatcctgttgaaatggactttttttttttttt

SEQ ID NO: 55132 - DNA, 68 bp, Homo sapiens
gcagttttgcaagtaatttccagtctttctttcctgtgttagtatggtcttttaaagtaattgagcgc

SEQ ID NO: 55133 - DNA, 704 bp, Homo sapiens
ggatattgcaccttacagacttagggagcctttaccagagacgcctaaaacgccccaggttcagccattgtgctgaatagagtggaatatagaaccagggacagagtatttcatttaacgttgatatatacttgctaaggaaacactaacaatactgtaactttgttaaaggacatagtattgaaatgggaaatagaggtcaggctcacatcatcttagtttaatgctgggcaactttttctgatttctgtagttccctgaaaatgtgtccttcgtacccataaagagatacaaatgcatttgtaacatttttgattgaatataaaacctttacagaaatacttatctcatggaaaggtaaagctattgtttaaaaattagtggaaatattttttcaattatatttaacatgcctataaaaatagtccttgcaggaaattatttgataagagcaaaactatttttattttataaactattttggaggcctctgatcctttcaaaccaaccaaactactattagatatgtacaataacatttgttgatattaatcattggcctcattgttgaacatattatttgcaaagaatcttaaactctgtagtgccagaatgattctcatctgtgccatattttgcaattaaaagtaacacacccttagaagaatcaaataagagccatctacatcccaggaggatgcacc

SEQ ID NO: 55134 - DNA, 613 bp, Homo sapiens
tatcaattgtggcttccctgtgtatccgtaagagtattttcctacagttgagtatcagattgaggccaaatgtggaggaaaagttaaatattaaatttgaactcaattgaacatggacacaaacaatggtcaccaagtcccggaacaggttgtgtgagccccttgaggcattcatccagcgctgttttggagaaatctctatttcagtctactcctatacgtcagttattgaaaaacaacagacaatggcaaaaacaagttgacctttttgtgttccttgagcccagtcgcaaagggccctcgtgactgggcctcatgctagacaacatgttacaaaaagatctaggggtcccagaccacgccaaaaagcttcatgagacctctcctcgtctgtgcacggacgagtggccggctctggagcccaggctgttgcttcccagtctggaggtgaatcctccatagtctggtgagtgtaaatatatatatatatatgtctttttccttctcctcttcccattgcaatttgcttattatatcaatctgcttattatattaatttgcttattataatatctgcattgccatttacgtgggataaagcttgcttaccctt

SEQ ID NO: 55135 - DNA, 344 bp, Homo sapiens
cggacgcgtggggaaaaattaaaccttattaatcttgactttcacagatgaaacactgaccagtcaataaacaacagccactgcattaatctgcccagcatgatcagatagtaggttagaatttgaaattcattaataaaaaattaataacaaaactttgtaagccttaatggtttaatatttccgtgtcattgaaagttcctatttcaaattaaacaaactacagcaggatatttttcctttcctgtttcaaaacaaaaaccagatgaagaaaaaacaaagacaaactcataggaggaaagcatggcttctcttcaattatacttctcttactcaatattagg

SEQ ID NO: 55136 - DNA, 416 bp, Homo sapiens
  misc_feature (1)...(416): n = a,t,c or g
cggacgcgtgggtttttttacggacagcgcttttctatttccaaattaaatagctagattgtttatccttgacacacattatttatgcttactgtagaaagcaaatatagtagaaaagtactaaaaaaggaagtataattcctggaactgccactactcagagataactcatttaatgtttttaaaaaataccgtttagacagatagctttatgtgggtatatgtnnnnnnnnnnnnnnnnnnnnnnnnnnnnnnnnnnnnnnnatatacacccatctatataatcttacgtaaattgttaagatagatgtttttgtaagctgctttatttactaatctatttcatagagctttatcaattaacatagaactatggaattttttctttaaaatttttttttcttttttttggagag

SEQ ID NO: 55137 - DNA, 276 bp, Homo sapiens
ggaaagctgatgagaaattgggcatcccggaattcacacccaaaccatcagctggagctctgagactgttggggtgggaattcttccaagatgagaagcaagccagggaggctcaggtcctgggatgggcagggctttgatcaaaagaacacaggaagtgatttgctacttgaaagaaaggcaacccctccccaaggaagccctctgaaaatgcttagtcaacagtcggcttggcagacaaggtctgggaggggccaccccgtatccgcaaaggat

SEQ ID NO: 55138 - DNA, 379 bp, Homo sapiens
ctggttgcaaggattatgcaaatatcggtgaagatacttatgatatagtgatccctgtcaaagatgaccctgatgaaggggaggccagacttgagaatgaaataccaaaaacgtctggcagcgagatggcaaacaaacgtatgaaagtaaaacatgatgatcactatgagttaatagtagatggaagggtctattatatctgtattgtatgcaaaaggtcatatgactgtatgacaagcttgcggagacattttaacattcattcttgggagaagaagcatccgtgccgttactgtgagaaggtatttcctcttgcagaatatcgcacaaagcatgaaattcatcacacaggggagcgaaggtatcagtgtttggcctg

SEQ ID NO: 55139 - DNA, 385 bp, Homo sapiens
cgttcccttacccgtcaaagtctgcttcacgtgtaacaggagttgccgtgtggctcctctcatccagtgtgactattgccctctcctgtttcacatggattgcctcgagccgccgctcactgccatgcccctgggcagatggatgtgtccgaatcacatcgaacatgtggtgctgaaccagaagaatatgacactgagcaatcggtgccaggtgtttgatcgtttccaggacaccgtttcgcagcatgtcgtcaaagtggacttcctgaaccgaatccacaagaagcacccccctaaccggcgtgtgctccagtcggtcaaaagaagaagcttgaaggttcctgatgctataaaatctcagtaccagtttccaccccctctcatt

SEQ ID NO: 55140 - DNA, 375 bp, Homo sapiens
  misc_feature (1)...(375): n = a,t,c or g
gagatctctcgaggatccgaattcgcggcccgcgtcgactttaaagtggagctcagacaaatcatgacttattaagagactacaggaagccattcagcatttaataataactgtttacaacatgaggcaaagctaataatgttatggttttattaagagatctgtcatctctgtttttcttaaactggtttaacagtcagagctttgtaatgtgtttcagctgaagatttattataggcttgtaaattatctaaatgttctttttagaccccatgacaggagcacagaggaactgagataactctgtgttatgagagggtggatgctggcttgtgccnnnnttattttanagncctgntntttanggaaaacttt

SEQ ID NO: 55141 - DNA, 409 bp, Homo sapiens
  misc_feature (1)...(409): n = a,t,c or g
gtttattcaacaaatagtgttgagtatcatgtctcaggcactgtatattatagatatagcaataaacgggaaactggtttttccttaaagaagcttaagaactatcaggaagataatgtggagacagcctctaaaccatgggggtatgactttttttggggggtgggcagggtctcgctctgtcacccaggctggagggcagtggcgccatcatggctcactgcaacctctaactcctaagctcaagcatcctcctgcctcagcccccctcccccagcagctgggactgcaggcgtgagccaccgcgcctgccctggcggtatcacttctaatagaagcatttattggccaatgaaacaggatacttctttcattgnacaattttataaantggtccncnccggctata

SEQ ID NO: 55142 - DNA, 177 bp, Homo sapiens
cctaaaaccaccaacacatagaggctactgaatctcccgaagggcctcggtgatgggcctgggcaggaggaggcccctgcagcctgtgggtggtgcatgggcagcatctcctctctgcagtgtcctgcagcagcagtgcaatgtgattgatttcagaaatttaaaaaatatttgctg

SEQ ID NO: 55143 - DNA, 243 bp, Homo sapiens
  misc_feature (1)...(243): n = a,t,c or g
aaagatttttttttttttgaaacaaagtntcnttttgttgccggggagggatnnnnnnnnnnnnnnnnnnnnnnnnnnnnnnnnnnnnnnnnnnnnnnnnnnnnnnnnnntgaanagntgaaattncaggcncctgccnccatgccnggntaatttttnggatttttaggaccatggggtttnnccatgttggccaggntgtttttgaacancctttgattcccctgccttancctcccaaag

SEQ ID NO: 55144 - DNA, 347 bp, Homo sapiens
ggacgattgctgacatttattgagtgctagctaggtacctctcaccaggttaagcagcgtgtatacattctcttatttaatcctcccaatgagcctataaagtacttgttactattgtctccattttacagaacggaggtaagagaggttaaaaataacttaccaaaggtggtgcagtgagtgagtttgagaggtggggtcagacgtctgcctggtgaggtcattcttaactactaggccctactgcctatattctccacgtgtttctgaatcccatgcttttctccactactccatgctggctttcgcattggcaacccctgaagcgtcgtccaaaatgagttgga

SEQ ID NO: 55145 - DNA, 238 bp, Homo sapiens; identical to SEQ ID NO: 36173

SEQ ID NO: 55146 - DNA, 3075 bp, Homo sapiens
gaattcgcagcgagagctggaggtgttgggtcgggagaccagccattcgatcccgccgcaggtaggagctggtttccatcctggcaccacggcacacacctccagcctcgagcccggcgctgctgcccgggggtctccttcaggctctttgacgccgttccagggggcacctatccaggcatcctctgggcctctagccagaggactggctcccggcttcagcactccgggctgcagtaagaagtgcccttatcgctctgagccctgccaccatcccgtgaaccaccgaaaccctggtccagcgcgacagccttggacctgggactggacggatccaaaacgctcagcctcggccccccacagacggggctctgcatcgtctctgatatgtcacccaccatctcccacaaggacagcagccggcaacggcggccagggaatttcagtcactctctggatatgaagagcggtcccctgccgccaggcggttgggatgacagtcatttggactcagcgggccgggaaggggacagagaagctcttctgggggataccggcactggcgacttcttaaaagccccacagagcttccgggccgaactaagcagcattttgctactactctttctttacgtgcttcagggtattcccctgggcttggcgggaagcatcccactcattttgcaaagcaaaaatgttagctatacagaccaagctttcttcagttttgtcttttggcccttcagtctcaaattactctgggccccgttggttgatgcggtctacgttaagaacttcggtcgtcgcaaatcttggcttgtcccgacacagtatatactaggactcttcatgatctatttatccactcaggtggaccgtttgcttgggaataccgatgacagaacacccgacgtgattgctctcactgtggcgttctttttgtttgaattcttggccgccactcaggacattgccgtcgatggttgggcgttaactatgttatccagggaaaatgtgggttatgcttctacttgcaattcggtgggccaaacagcgggttactttttgggcaatgttttgtttttggcccttgaatctgccgacttttgtaacaaatatttgcggtttcagcctcaacccagaggaatcgttactctttcagatttcctttttttctggggaactgtatttttaataacaacaacattggttgcccttctgaaaaaagaaaacgaagtatcagtagtaaaagaagaaacacaagggatcacagatacttacaagctgctttttgcaattataaaaatgccagcagttctgacattttgccttctgattctaactgcaaagattggtttttcagcagcagatgctgtaacaggactgaaattggtagaagagggagtacccaaagaacatttagccttattggcagttccaatggttcctttgcagataatactgcctctgattatcagcaaatacactgcaggtccccagccattaaacacattttacaaagccatgccctacagattattgcttgggttagaatatgccctactggtttggtggactcctaaagtagaacatcaagggggattccctatatattactatatcgtagtcctgctgagttatgctttacatcaggttacagtgtacagcatgtatgtttctataatggctttcaatgcaaaggttagtgatccacttattggaggaacatacatgacccttttaaataccgtgtccaatctgggaggaaactggccttctacagtagctctttggcttgtagatcccctcacagtaaaagagtgtgtaggagcatcaaaccagaattgtcgaacacctgatgctgttgagctttgcaaaaaactgggtggctcatgtgttacagccctggatggttattatgtggagtccattatttgtgttttcattggatttggttggtggttctttcttggtccaaaatttaaaaagttacaggatgaaggatcatcttcgtggaaatgcaaaaggaacaattaatatatatgctactggacattctagcaaggtaattgtagtttagttttaattcggagagcaatgataatcagtgcacaggagtataaaatattattttaaacagcgaaattaataatataaaatgccaaatggttgaaaaaatagaaacctttctgtatatttgatcatattttttttttgccttgtcaatgtatttaaagtttacttaaggtcaggaaattctaaaacaacttttctggccttgttatttgatgtatatcttttaaatttactgaccaaagcatgttttaagctgcaatgcagtagtcacgggtggtaaccatgtagtcaggtattgttattagtacctatcactgctgagctgtatttaaaattttggtacaatatataaaatggagaagagcttgatattcaggtactaaccacaactagtctgacattgttggcagttaaaatcttattttgaattgtaaattagttaaattttatgtggaatttgctgagaaaagaatatagactactgaaatgtcattttagttatttttcttatgaccacattgtacaaatgaatctgtgttaaaaagactattttaaatgtatttcctgcttttgtaagcattaaagatttataagaaaattattcaaactattttttataaaatgaaagttatgatttttaaacttattgattcctcttgcccctaccccctctttttggaagatattttgattccttataaacttttaccctaagcttatatatgttttctgtcacaagtgcttcctggcacacagacagccaatggaggggatcaaattcagtgttgtatgtatgtttatggcaacattttgaaaataaaaattaaatgtttttcttcaagtagtttttttttaattgctgagagaaaaaaacagtaaagctttctgattaagtaaaatttaaatgggcagtaccataatttaaaaaactaatactttaaagagagagacaaagatattttgtgcctttgacaaattaaatctaatagtggaaaaatg

SEQ ID NO: 55147 - DNA, 995 bp, Homo sapiens
ttttttttttttatagtaagtttattgtatttttatttcagctcaggggagcaggggtggagagtgggcacaaatgcaaagtaagcaaatggggagccccagcagcaataggggggtcttcctggaagaggcaggctttaaagacaggaggagaaggaaatagggaaaaggagttgggactgagggaagtggtgaggaagggtaggaagagaggggatcctgagagaagtggatcaagaagatttgtaaccctgatttccctgtgtcctgaatggtctggaggagggtaagggagggtgtggggcaggcgcagagcctggcacaatcacctttgaggtcccttagagggttccctctcaggctagctaccccctctcccagcaaagctcgcttccaggaggttctgcacagggtcagtgactggtcactgggcattctctcctgcagtgcctgtgctcccagcttgcactctgattagaagagccaaaggctttgtcctctggtaacagattctgccaccagcgggggatgaaggagggattttagacagggaggccttcatccctgctcgtaaattctctgagatggacccttccccatgggtgctgtgcttctgtgaacccaaaagtacacattgagtacccaccactagcccactggtgagagccgtgtggcatttgtccctgcattcaagaggcagcagtggaacttgggacaagggacctgggttagtcccgactccagcacttgctagtccggcacttggtaatcaatcatctagcctctctgagctctggttctggtctataaactggagatgatcatcttagttctgtcactgccagccttgtaggatttttctaagtctcaaatagacagaggatgtgagacatcccttgaggccgtgtacatggggctgtgtccagaggggctgtttgtgcaaggtcaggatgtgagtctgtggccccacccacatagggtgagaagcgggcagc

SEQ ID NO: 55148 - DNA, 110 bp, Homo sapiens
cttggagttcacatactcttcactcatttttctatatctgcttgaaacagtctttaccatgaaccaaatcagcattatcaatcatctgaggagaaaaaaaaaaagcctct

SEQ ID NO: 55149 - DNA, 374 bp, Homo sapiens
  misc_feature (1)...(374): n = a,t,c or g
tttttttaccagtgtttctcaaactttaatgtgcataagaatcgcctacagatcttgttgaaatgcagattctgattcaataggtctgaggaggggccttagctctgcatttcttttgctgttttctttaaaaataggcaaaaaaccaatgcattgagcnnnnnnnnnnnnnnnnnnnnnnnnnnnnnnnnnnnnnnnnnnnnnnnnnnnnnnnnnnnnnnagcagcaaggctcttaatggccaatgctcagacatatctgaaacagagttaaccacttggggaaaatttccagaaggttggcctagtgttattctatttctcaacttgaacttgaaaagttccctcttgggaagccattctttttaaaatttt

SEQ ID NO: 55150 - DNA, 113 bp, Homo sapiens
tcttactgatttttttttaaagcactacataaatacagtcaacgcagtcaccatattgtagaaaaacagaagtatatacagttaaatgttttatgttggatgtacacatttga

SEQ ID NO: 55151 - DNA, 769 bp, Homo sapiens
gcgcttaatagggaacatacatacagctatgtaactgtgaataattgtatatatctctagttaagaatgagggaatggggaggtttgctttctaaacaagtgcattctgaaattgacttaaaaatttttagtgtgggtcctaaagtttagagatgggcaaggaggtctctaatccaccgcttcccgcttgagaagggaggggtatcaaaattgagccccaagctgtttgttccagtgtaccaagcactgactttatgcctttggcctgggagatggcagaagtgaaagctggccatctgcaaaaagcagataagtgagtttgaaccttttgcattttgttagctcagtcagtcctcatcgtggtcctgaggcataggtactgttgtaccaaggtcacttatctaacaaaataacccttcatgtattttaaatttatttgacaagtctgcagacaatccttattctaaccagctattttcttaattgctacagcttgacctaccagtattccggagtaaccaggcaaatgcaaagttgaccttgttcctgcatcatctttttgatggttcaaatttcagcctccctgactactacaaagccagagcagtcttagttaccaggaaacagtgttgcactttcgttggcatgtgctgtgtgaccccaaggggacaggggagttcactttgggtccatctctgttcccccagttacagatcttggattccataggtggacatttccataagtggggggttgacaggcaaatgga

SEQ ID NO: 55152 - DNA, 371 bp, Homo sapiens
ctagaatagtgcattggtactcaacatccagatctgacacttatcactatcttaccatgtttgcttcatttgtcatttttttgtttgcttaagtatcttaaaatcccatacattgtgttatttcactgctgtgaacactttgggtagataccacgatatcacacctaacagaggcagcagcagtccttcggcttcatctcatagccagtccttaagcaaatttccctgattatctcaaaaatcatcttctagttggtttgttagaatcaacagaatataagtcacatgatgatttcgtttttaacaatcacctcagatgactttgatgttagctactttgagaaccactggaaattattttgccaacttga

SEQ ID NO: 55153 - DNA, 1152 bp, Homo sapiens
cctcctgattacctacaatggtcaattttattacaaagaactgtatcaaaatatacaagtctgtttaagaacaaccaagaaatgcagctgtttaagggacaaatgagaatcaaccgttagagagcaggcagcctctccccgccgctgtccactgcaggagacggcatcctcagggccacattttccacgggacatccttctgaataatttaaagggtaagtccggcacattacaggtcttcgcgggagggcagctgtgtcgggctttctccttctgtggcttcagcctctgccggcggcacacaggcatcttccgtttcttcgaagccgtcaggacacacacagacgtagctccctggagtattgtagcagttttcgtttttcctcacacaggttttttctgctagtgagcactcgtccacatctgcacactgtccgtgctccctcgcgtagccagagatacactctttacagtttcctgggccttcccctgtgcagcccacacagctggagtcacactcttcgcacgtgtaggagccgttggcgttcttacagaactgcgcagcgctgcagggaggcggctcggccgcacactcgtccacatccacacaggcgccctcgtccagcacccagcccacttcacactcgccgcagtctctgttggtcaggcccgagcacgtcttgcaggactcgtcacaggctgtgcagatgctgtgggtctcgttccggagcgagctgaagtagccgtccatgcagtcagtgcacagcgggccctggtaccccatgtggcaccggcaggacccgtcgccctgtctgctcccatctccgctgcagtggccattcccgctgcagggcctctgggatccgccctggcatgcgagacagtcgggaccgtaggttcctggagagcagcacactttcagtgtcttcacacaaaaccactcgaataagtcaggatattcgctcttcagctgcagccaccaggcctccaggtgctcctcctgcgcctctagcatctgattgcattcgaagtcgctctctcgcacagcccctccaggatctccagcaggcgaatctcgctggactcgtacttggacagcgtcttttcctcccaagccgtgttcccgccgccaaagttcttctttgcggtgtc

SEQ ID NO: 55154 - DNA, 946 bp, Homo sapiens
ttattgactattacacctgttttagcccatgtggatatggctaaagagtgatggacccagaaaaagaaaaaacgattgggaatttaatgattagaccatggaaaatgaagtggttagatccttcgtgtgtggtgagtctttaattcctggaagttagagtcccgggcagttgtgtccccagctgcagacactcggtgtacatgctgcagggcggcatcctcacccagccacctgccctgtgctccccgcagctgggctggtggacgatgggtccacagatgggagttacaaaggcgaaagccggagggaaatattccgggatataaaagtgcgtctcgtgcttctacaaatcacattgggtgagactaagacgcctctggaaacagcagcatctcccagcctctgcacatggtttctgcctctccactctgaggttatgacaacatcaccgtggctctcagttgcctgagatccagttcctccagttaaatgctgcgttcgccccgtgggtcagggtcttcaccggtgggttcaccaactcccattttccttcctctttattttcttcacagaagcacatgcccagggaagggatctttctcacgagttgggcaaaatccccacattcccggggcggcagcccgagcagtggccgcgtgcaggagtccagagtggagccgtgactcacaattaggatgacacccgtgtcctgcggacaggtgttgacgatttgcaccgtgctcgccgtgcacctgtccatgtactcctggtagctctcggccggcatgagggcggacaggggaaacgcgggcctgtaatcagtgtcaatgttgaaatttgcctctttcagctcttccaggctcatgagggttggggtggttttgccagcttcccattttgtccattcaaagattccaggttccactcgtatcttgatttttttctc

SEQ ID NO: 55155 - DNA, 151 bp, Homo sapiens
gaaaattctcggattacagaggtaagccaccacacccagccaagaacagaaaccttttgttttccattttcttttattttgagacattgtcttgctctgtcttgctctgtgaagtgacatcatcacagctctcaatagttttcacttccca

SEQ ID NO: 55156 - DNA, 339 bp, Homo sapiens
gatctatcttacacctggaaagaattttacccatgtgtgatgttatagtatcattcatagatcatttggaagatactgatttactagttatgcagatcagccacaacttgacagattttcttataaaatattttaattacattttttatgactattgatctcaccagaaaagtccctaaatattagaagctgttaatctcacaatggtagagacaaatttttcagaatttttattttcatttgtaagttcctgtagttattgacaaattttgttatttttcttgaaatagttactttattcattcttaagaaaatgtttatcaaacaaatgagtcttag

SEQ ID NO: 55157 - DNA, 461 bp, Homo sapiens
ggagctactaggaagttgacaccaataagatgtcgttagtctgtgtatggggagtgagggaaaggaagaacttgccagtttccaggttttaatccttccaaaggatttctgcagaaagacactggaagagctgtattcctacttatccttaaaggaaagaaactgcccttgaattccaaggacatgattactgagctggaattccaaataatgtgtcccagtgagactcctgggggtagttttgtccggtaactgtgtgtgttagatgaaactgcagacttccagccactctatcttaccatgtctgttaacagttaatttgctctgatgaatttgcccatcttgggataagggggctctgctgactgttttttatcttggagtagatgtccttttgttaggaaggttctagactatattgttaaaacaacattgggaaggctggggcatgggtgggctca

SEQ ID NO: 55158 - DNA, 399 bp, Homo sapiens
gcctcagcccgggctctacagctacatcagggatgacttgtttacctctgagatctttaaactggagctgcagaacgtgcctcgccacgccagcttcagcgacgtccggcgcttcctgggccgctttggtctgcagccccacaaaaccaaactctttgggcaaccaccctgcgcctttgtgacattccgcagcgctgcagagagggacaaggccctgcgcgttttgcatggtgccctctggaaaggccgcccactcagtgtgcgcctggcccggcccaaggccgaccccatggccaggaggaggcgacaggagggtgagagtgagccaccaataacacgagtggccgacgtggtgacccctctatggacagggccctatgctgagcaacttgagccgga

SEQ ID NO: 55159 - DNA, 95 bp, Homo sapiens
gcgtgggtagcataactattgtaaattcatgaatagcaccttttgcatattaaaatatcttaaaatgggccaggtgtggtggtgtaatcccagca

SEQ ID NO: 55160 - DNA, 269 bp, Homo sapiens
ggagttttctaggtattccaggtcttggaaaactccttacttggaaggagattggggtggaggagaataagcaaggtgagagaagctcaacagccaggaacaggcctgtcaaggctggtgcctagacccaggcttcttggatacagtcgcttgctgttgagaacaatgctcaaagcaggaagctggctggtggaggctcaagcggcctcctctgcgtcttcatttcatatccttattgctctgcatctgggactgggatacctgttggc

SEQ ID NO: 55161 - DNA, 421 bp, Homo sapiens
tcgacccacgcggccggttccttttactttcctttgcctctgtcccataaacgtttatccttactgactttcattttatggggttgaaaggggttttccaaaactctcaaaggagaagcacttatcatagtgcagttatggtgacctttacttactgcttactttgggccaagtgccatgctaagcatttaactccgaaatgggtaatattattatccccattttgttaatgtagaaatgggcacagagaagtaacttgccaaggttactcaacagctaggtggtggacctaaggattcactgtgagcatgctgactccagagtccacatgctggggcacactctttcatcacctcccgtaactggaaacacgttctagatataggcacgttttcaggcaaccagccctctggtccatatt

SEQ ID NO: 55162 - DNA, 351 bp, Homo sapiens
  misc_feature (1)...(351): n = a,t,c or g
ggctgaactaaaaaatatgctgccagtagtactttttcattttcccccttataattttaatggcccaaatgaaagagccttttttctttaacaatagtatccttgttgaaagtcctttaaagaactgttctacgacactgaaacagtctaattaaaccattaatataacaatgatgtcaagagctgctaaattcaaagaaggcatttccatttcatggtaaatattgaaggtaatttttttctggcatgtagcatgagtcccagtttgggaactcttgtccattacacgtttccttgcagagaaatatcattaatctgtgatacttactacaatagtgnnttatttgcctc

SEQ ID NO: 55163 - DNA, 385 bp, Homo sapiens
gtggttcactatattgattagtaactggaaatggggtcctggtaatacatacctaagaatgtgaaagtgactttagaattgggtacttggcagagtatggaataattttgagtagcatgatttaaaaaaaaaatctagattaccttgaatagattgttagataaaatgtggatgataaagcttctgccagtgagggcccagaaggaagtaaggatcataggggagaaaacctacagtgtcttagagaatatctgaattgtcataagcagacttggtagacatacaggtgtttaaagtgctgacaaggtggtttagaaggaaatgaggaacatgttacccgcaacctgaaggaaaagggatctttgtcatatagaagccgaactat

SEQ ID NO: 55164 - DNA, 1056 bp, Homo sapiens
gcggccgcggccggtgcatgtgcggctgctggatgcggaggcggcggcgacggcgcggatcggcaggatgttagggcagcagcagcagcaactgtactcgtcggctgcgctcctgaccggggagcggacgcggctgctcacctgctacgtgcaggactaccttgagtgcgtggagtcgctgccccacgacatgcagaggaacgtgtctgtgctgcgagactggacaacaaatatcaagaaacgttaaaggaaattgatgatgtctacgaaaaatataagaaagaagatgatttaaaccagaagaaacgtctacagcagcttctccagagagcactaattaatagtcaagaattgggagatgaaaaaatacagattggttacacaaatgctcgaattggtggaaaatcgggcaagacaaatggagttacactcacagtgtttccaagatcctgctgaaagtgaacgagcctcagataaagcaaagatggattccagccaaccagaaagatcttcaagaagaccccgcaggcagcggaccagtgaaagccgtgatttatgtcacatggcaaatgggattgaagactgtgatgatcagccacctaaagaaaagaaatccaagtcagcaaagaaaaagaaacgctccaaggccaagcaggaaagggaagcttcacctgttgagtttgcaatagatcctaatgaacctacatactgcttatgcaaccaagtgtcttatggggagatgataggatgtgacaatgaacagtgtccaattgaatggtttcacttttcatgtgtttcacttacctataaaccaaaggggaaatggtattgcccaaagtgcaggggagataatgagaaaacaatggacaaaagtactgaaaagacaaaaaaggatagaagatcgaggtagtaaaggccatccacattttaaagggttatttgtcttttatataattcgtttgctttcagaaaatgttttagggtaaatgcataagactatgcaataatttttaatcattagtattaatggtgtattaaaagttgttgtactttgaa

SEQ ID NO: 55165 - DNA, 847 bp, Homo sapiens
  misc_feature (1)...(847): n = a,t,c or g
gcaccatgtccgagtggatcacctggtcgtcctgcagcatctcctgcggcatgggcatgaggtcccgggagaggtatgtgaagcagttcccggaggacggctccgtgtgcacgctgcccactgaggaaacggagaagtgcacggtcaacgaggagtgctctcccagcagctgcctgatgaccgagtggggcgagtgggacgagtgcagcgccacctgcggcatgggcatgaagaagcggtaccgcatgatcaagatgaaccccgcagatggctccatgtgcaaagccgagacatcacaggcagagaagtgcatgatgccagagtgccacaccatcccatgcttgctgtccccatggtccgagtggagtgactgcagcgtgacctgcgggaagggcatgcgaacccgacagcggatctcaagtctctggcagaacttggagactgcaatgaggatctggagcaggtggagaagtgcatgctccctgaatgccccattgactgtgagctcaccgagtggtcccagtggtcggaatgtaacaagtcatgtgggaaaggccacgtgattcgaacccggatgatccaaatggagcctcagtttggaggtgcaccctgcccagagactgtgcagcgaaaaaagtgccgcatccgaaaatgcctttcgaaatccatccatccaaaagctacgctgggagggaggcccgagagagccggcggagttgaggcagcttgaaggaagagtcttgaaggggagcatttcccaggtttttagggttgcgcccttgggacggcttggtcagattncaccaaattttgccgagttggatttcagggactttacatgattttt

SEQ ID NO: 55166 - DNA, 2036 bp, Homo sapiens; identical to SEQ ID NO: 13216
  misc_feature (1)...(2036): n = a,t,c or g

SEQ ID NO: 55167 - DNA, 641 bp, Homo sapiens
tggcacgaggaaatacagaagaattatttgttctgatcctattccaaattatataagttgataaccaaatgttaccattggaaaacgtcttggaactatttaagtctttctattgcactttttcttccaactttaaaagacaaaattttaaaatctgaccccagcccttgtgattgttcagtatataatcaatggtatcttacaaggactattttatttgggaatcaatcaaatttgtttcctgccaacaataagttaggattgttttttgcagttctcaagtaacaaatatgagggaccgaactctcattcaacatccaagcccttgcagtttgtgcaaatatatgtttagcaacaaaggacagacagaatccatcattagtatggctttttactggaatgttttgcatttattcattgttctttgcttggagagcaaatttagatatttcaaaaccacttttcatgggtgtggtggaacgattctggatgcagagcaatgcagtagtggccgtcctcgctggcattggtttggctgcagttgtgtctgagactaaccgagtgctgaatagcaatgggcttcagtgtctggaatggctttctgcaactctttttgtagtttaccaaatatattctaatta

SEQ ID NO: 55168 - DNA, 319 bp, Homo sapiens; identical to SEQ ID NO: 42281

SEQ ID NO: 55169 - DNA, 341 bp, Homo sapiens
ggatggttacctaagaagccaatgaggctggacaaggagacactgccagacctggaggagaatgactgctacactgcccctttcagccagcaaaggatccatcagtgagtgttccatgttaaagccccatctcactaaggatgtgcagctgtggtagagcctcaccctgcacgcctttgattcctgggcatgaggaaggaacagcatagtgcccttctcccctaaaagtcttgtgagtgttcatatcccttttatttcagtcaggggaagataactgctgtaaccaacaatccctgcatctcacgtggcttaagatgatacaatgcttgctcatgtgtgtg

SEQ ID NO: 55170 - DNA, 327 bp, Homo sapiens
  misc_feature (1)...(327): n = a,t,c or g
gtgtaaaatctgtgtaaccagataatttgatatgaattccatgtatggcattacagttcctaatgttttaaacaagctactgaaagtagattcttttaaaaactatttcatatgctttgactttaaatttctcaccctaatcctgtggttcaccaagtaggaagaagatgctttttaatattttaatatgaggaccatctgtagttttaatggttttgttgtaaaacatgtgctatagaaaaagagaaaggcttttgatatcttcaaagttgctaaagtagttttaatgttttaacataattntctttgatttcagagctgccggat

SEQ ID NO: 55171 - DNA, 584 bp, Homo sapiens
aaaccaaaaatgtcatggctctgcccccaccctgcttaggcagggagggtgaagcctggaggggggcaattcctatgctccacaataaaaaaaggttttttaaatatattcatcaaaatagttttcttttaaaaagccccccactgctgacagccccactggctggctctccatcatatccctccccagtccgacacagccggaggggtcctgagtggcccaagcgcccctttgagtctttcccacccaggaggtctttgtgggcagggaggagagtgccctgaggtccatggcgtgtggggtgggttttccactgatgctcttcatcactattccaggcccaggatgtagttgatgccttggactacaccaatgatgacaggctgccaggctaccaagtatcgaagccagtccagcagttgcccatacatgacgtgaggcctctcccagggattgctgaacatcctcttgaggtctaccttctctttgcagtagggacacgtttgcttctttcccacgatgcaccagccacggatgcagaactcgtggaagacatgattgcaggacagcctatacgtgttctc

SEQ ID NO: 55172 - DNA, 215 bp, Homo sapiens
ggttttgccacctcttgaaatgtgaattcaagtatttcatacattttgctgagttagcttcctagggtgttgtgtgctcagcctttatgaaacagtgaacatgatgacagtaaactgagagaatttggaaacctagcactcactatttttttagccagtcacctttctcatttctgacgatagttagatataaattgctgattaaaaatgagtcc

SEQ ID NO: 55173 - DNA, 403 bp, Homo sapiens
ataggcaccaccaagaagggaatcggaccaacctactcttccaaagctgcccggacaggcctccgcatctgcgacctcctgtcagattttgatgagttttcctccagattcaagaacctggcccaccagcaccagtcgatgttccccaccctggaaatagacattgaaggccaactcaaaaggctcaagggctttgctgagcggatcagacccatggtccgagatggtgtttactttatgtatgaggcactccacggcccccccaagaagatcctggtggagggtgccaacgccgcccttctcgacattgactttgggacctacccctttgcgacttcatccaactgcaccgtgggcggtgtgtgcacgggcctgggcatccccccgcagaacataggtgacg

SEQ ID NO: 55174 - DNA, 745 bp, Homo sapiens
tatttctttttcagacaactgtccaattttttcaaacttgctttttaggtttttagcttgaactagagccactcctttttaatttgatcagttcttcatattctctgctcaatccaaaggtttcattttcttcctcttcctctcccatttcctgtctcagttgttcaaattcttgtttctccatttctagcttatgcttccgttcctcctctgttcgtcgtttttcttcttccattttttgttttaataattcttcaaaattaatttccagttttcccggtgtaagaaattcttgagagattgtcttatacatctctggggagtcatcatctactaccatatttctccttgcttcagcaaacgcccttcttttcttcctctattctccttctggcttcttcttctgctttccttttttcatcttctcttctttgcctttccatttcttcaaaactgagtttgagtttaccagggcggtaccctttaaaaatttttgctgtgtcttggttttcctcatcttcatttaccatttgccgccttgcttcttcaaaagcacgcttctcttcttctaaacgttttcttgcttcctcttcagcttgcttctttcggttttcttgtctttggcgctccaggttccttcaaaaagttagtttcaattttccgggagaaagtgattctttttttgcttcactttctatttcatcatccataactaaatgaaagacactttggcttccctgagaga

SEQ ID NO: 55175 - DNA, 485 bp, Homo sapiens
agtgtatttttccattggcattttcatccaaaattgcttgtttcttttccttttatttatgtgcagaaagagactcatccgctgaatacacagcactgttaatcctacagtcttctgtccccacagagtctgctagatcttcctcttctgagtcatcctcttcttcctcctctggtgctgacgaactggaggtgggccctttgcaggttttcaggtggcgggtgagatggtatttggttagataagcctttgtacatttttcacagacataatcccgttttccttcatgagaattgagatgcttctttaagtgatttgttctcaagaacagcttatcacacttgggacacttgatctggcgttcttgagtgtggatgagcacgtgctgcttgaggtcctgcctccgcataaacaacttgtcacagtaatcacacttaagattcttctccccagtgtggataaccatgtgggactccaggtgagcc

SEQ ID NO: 55176 - DNA, 592 bp, Homo sapiens
acatgtgcttagtacacttacattactttatagtggagcaaatcatctaacacaaagccagttttataataaagtgctgaatatctcatgtcatttagtgaatactatattgaagtgaaaaacagcatggctgtgacaggtactcaaagtatggtttcaacttaatgtgtatcacttttgtgccatcataaagtagaaaaatcataagctgaaccattgtaatcggggaccatctgtattaactttgaaaactgatgtaaatgcaaaattatcttctgtatataaaaacaagccccaaggacaccaaaaaactccctacctccatttgctaactggaatagcaaatattctgccactcttctgtcccaagtccacaggagacacgactaatgaattgcaacacacttacttctggctcagaaagttgcctgagcatagcatcccaagcagcagttcaatcacctggagatggcataagatggaaccacctgccctctctttttcacatgtctgtatgcattcatgcacgcatgcattcatcagctggaagctacagcagtgtccagcagtatctccacgctggcatggacct

SEQ ID NO: 55177 - DNA, 343 bp, Homo sapiens
  misc_feature (1)...(343): n = a,t,c or g
ctcatctggaggccctgctggaccggaggccacccagttccctgggcaggcccaaggccacggtctaggacacaccttccctgagactcatgacatgagcctggggagacctcatttggtttccgttcagaagaccagcgtagcccttttgagacttttgggtacatttatcaaaaatgttttccttttgttttaccaggaatgatgattgggctatnctntttgnantgnntttgtnanncttatngntttggntagtnnagggtataatntatnatggntntgttncncttttntnttttnntgtatnnnnntctatctntnnnntattttntnntnatag

SEQ ID NO: 55178 - DNA, 431 bp, Homo sapiens
  misc_feature (1)...(431): n = a,t,c or g
anacctttgannancagctatgacatgattacgaatttaatacgactcactatagggaatttggccctcgaggccaagaattcggcacgaggggaattttatcttggactggaagtttgaccgggtacacaaatggagtgaagtgaatacagctatcaaaatgatcccaggtgtggtggacacaggcctattcatcaacatggctgagagagtctactttgggatgcaggatggctcagtgaacatgagggagaagcctttctgttgaccctgcaaggagcagagtgtgttcaccttgagtctccagcccacagccaaggtggacgtacctctccaggagcctttgccttaatgtatctctgcctggacaacttgtggtggggggtgggnggaaagtaccggnatctgtnaagacccacaactccnnagcc

SEQ ID NO: 55179 - DNA, 1501 bp, Homo sapiens
  misc_feature (1)...(1501): n = a,t,c or g
aaaagtcatttaggagtgaccctgtgtcattgctaagttgacagacttacaaataaacatgggcaaggtgatcaccttgtctccttttacaagacagacctcactcggtaaaaatatacactgacgtattatgtgcacatcaacctcaataataaaacatacacgcgccatcacagtcctacacataatttatggtattcagaacatcactttataaactgttgccaaattaccacttaaacactaatatccaaatacagaatttagaaaattattttaaattttaactctaccatccccccgagctctcggctatgaatttagtctgggaagagggctccgtaataggccactgaggtcctctgtcccaccacatcatcctccccggaaaactagctgcccgactgctctaccagacttgggctagaatttggcttcacggtggcaatgggaccacctgggccctacagtgtggcaaaatcaacttgcccacaaaccccatcccaggtgctgggatgctaacacactgaagctgaaagaccacacttggttttgccacagatcaagctgcatctgactagacagcctgttctctaccctatttcctgcagaagtctttttctttgtaatgcaacaagtggctacacagctcagattccacggggacacggggaaagaggctgtagtgcacctagccctgctgagggagacccttgccttgccaaagcactttgctcacaaaggcagtttcaaagagtatagcccgaactcattcctggtaaaacaaaaggaaaacatttttgataaatgtacccaaaagtctcaaaagggctacgctggtcttctgaacggaaaccaaatgaggtctccccaggctcatgtcatgagtctcagggaaggtgtgtcctagaccgtggccttgggcctgcccaggccgaggctgccgtcactgcagatcctgcaggttgatagtgcttcctgggaactgggtggctccggtccagcagggcctccagatgaggggagcacctcctggaggacgtagacgggcaggtccacagtgaggaaggggaggaaggtggctggccgcgggccgagggcaggacaccttcgccggaggggtcatcctgggaaggcaacacagaaaggcctgtcacatgtctgtgagagtgcagcaacggtcctcgtctcacctgagaagtctcctccagctgcaatgcgtggcagaaccagcccaccccctgtattccaagggaggcccgaggacccagcaggaattgtttatgggggctgggtactacctgttcccacctggttctcattctgtcaccttgatcccagcagcttttgctgggcctggaaccttctgctctccagctcctcccctcagtcagcccaaatactgctcgtgccgaattcttggcctcgagggccaaattccctatagtgagtcgtattaaattcgtaatcatgtcatancngntntccaaanggnnnncaa

SEQ ID NO: 55180 - DNA, 410 bp, Homo sapiens
cggactttgagaaatactaatttagtccttaagtcagtatcctgagatagctgatttcaaaagagctctctcagggcttctgaccaaaagtgacagattggctacacctgtacatctcttcttatttcctaatccctgcctaaatggaagaaagaaatcagagactgggagaggttacaacaggagacagaagctgctatacctctttcaaataagcagatggacaggtagtgactgactttgcagaggaatcacacagtacctgtaagtgcacaaaaatacctgtaagaaatgcagtactgtgtttgtccgaagctcccaagagtctcagcatttggaggcaccagatactaaggaagataggggtcagaaatggagctgaaaacaggggagctggtcggaaaatctgt

SEQ ID NO: 55181 - DNA, 428 bp, Homo sapiens
agctgcacagcctgaatagaagggctggtccagcggcggcggaggctggcgctgtcctgagagggagggctctgtgcggaagagatgaatcggacaaagggtgatgaggaggagtattggaacagctccaagttcaaggcttttacctttgacgatgaagacgatgagctttcacagttaaaggagtccaagcgggcggtgaacagcctccgagacttcgtggatgatgatgacgatgatgacctggagcgagtcagctggagtggggaacctgtgggaagtatctcatggtccatcagagagactgctggtaatagcggctcaacccacgaggggcgtgaacagctaaagagccgaaacagcttctcctcctatgcacaactacccaagcctacttctacctactcctgacagcttttttagaggta

SEQ ID NO: 55182 - DNA, 320 bp, Homo sapiens
ctttatttttcattacttgtcttctgctatttagctataaatccttatagaagagtataaataaataaaagtaattatgcaggaggcagtcatagtgaaatgctgcccactgtgatagcctgtgggttttttttaataaaatgccaactcagtttttcttaatattctataaatatctgaagtgaaattaaaccattgcgcatggctactatagatattttcttgcttctatccctgttttttaaatgtgcctttgctgtttatggtatatttttcctgcacatcatgactttgaagttctttacttactttccaaaccc

SEQ ID NO: 55183 - DNA, 497 bp, Homo sapiens
cagaatattttcataatgccaaaaagcatgcctgtacctatgggcagtcactctccaattccccacttcttacagtctctgacaaccactaatctactttctctatatatagatgtacttgttctgggcacttaattcaacaaatggtcctgggacaactaaatatccacatgtaaaagaatcaagttagactccctcctcgcacataaaaattaactcaaaatggatcagagacctaaaggtaggtggtaaaattataaatcacttagaaatagtaaatctttgtaatgtgggataagcaaagttttcacaaatatgactgaaagcacaagcaacaaaagaaaaaataaattgtattccatcaagttaaaaacatttgggctgaaaagtatatcatcaagaatgtgaaaagacagtacatagaatgacagaaaatatctgcaagtcatattatctgataagagacttgtatttaggatatatttttttaaaactat

SEQ ID NO: 55184 - DNA, 489 bp, Homo sapiens
agaaagtgattgatgcagaatggggattcttttaccatccacacgaacagcagcctaaggaactactttgtgaaatttaaagttggagaagaatttgatgaagataacagaggcctggacaacagaaaatgcaagagtttggttatctgggacaatgacaggctcacctgtatccagaagggagaaaagaagaacagaggctggacccattggatcgaaggagacaaactccacctggaaatgttctgtgaaggtcaagtgtgcaaacagacattccagagagcctgatccacatccagcagcagagcccacttgtggctgcagctttatgccaaattatattgcagactgaacagacgtttatctatcccatttggcgacgaggactcgtggctggagagagccacacagcgtgtaacctgaagtcatctagattatggggaaactgctcagcttcaataaacctgtccaaatgaaaaaaaaaaaaaa

SEQ ID NO: 55185 - DNA, 387 bp, Homo sapiens
ggctttctaatgggagagacttgtgtggaccgccaggcagtctaatgatagagacacctcggggaccccaggaaatccaatggaagaaacttccaggtgaccccattcattctaatgatagagacacctgggcgaccagatgcattctaatggaagagactcctgaacgacctcaggcattcttatgatagagacagttgggagaccctaggcattctaataaatcgaactcctgggcgatcacaggcagtctaagattagagacacctgggcgaccacagacattctaatgggagagactccttgctgaccacaggcagtctaaggatagaaacacgttagcattcgccaagacaccttggcgatcacaggcattctaatgaaaga

SEQ ID NO: 55186 - DNA, 664 bp, Homo sapiens
aaatcaatcattccctccagttatgtccctgacccacaggcttcatttgtgcaagtactggggctgtgctgtcagtaatgtgtgccgcttctgggaaggacgtccattgcccttgatgattgtggtaccatacacactgcctgtttccttgcctgttggttcgtgcgtgataatcacagggacaccgatcctcacttttgtcaaggacccacagctggaggtgaatttctacactgggatggatgaggactcagatattgctttccaattccgactgcactttggtcatcctgcaatcatgaacagttgtgtgtttggcatatggagatatgaggagaaatgctactatttaccctttgaagatggcaaaccatttgagctgtgcatctatgtgcgtcacaaggaatacaaggtaatggtaaatggccaacgcatttacaactttgcccatcgattcccgccagcatctgtgaagatgctgcaagtcttcagagatatctccctgaccagagtgcttatcagcgattgagggagatgatcagactcctcattgttgaggaatccctctttctacctgaccatgggattcccagagcctactaacagaataatccctcctcaccccttcccctacacttgatcattaaaacagcaccaaacctca

SEQ ID NO: 55187 - DNA, 365 bp, Homo sapiens
gccaatgcgtcctcgctggagcctttgcctccttctactgggccttccacaagccccaggacatccctaccttccccttaatctctgccttcatccgcacactccgttaccacactgggtcattggcatttggagccctcatcctgacccttgtgcagatagcccgggtcatcttggagtatattgaccacaagctcagaggagtgcagaaccctgtagcccgctgcatcatgtgctgtttcaagtgctgcctctggtgtctggaaaaatttatcaagttcctaaaccgcaatgcatacatcatgatcgccatctacgggaagaatttctgtgtctcagccaaaaatgcgttcatgctactcatg

SEQ ID NO: 55188 - DNA, 383 bp, Homo sapiens
gtaaacggggactctggaaagtcaggtggtgtgggtgatccccgtgagccattaggctgcctgcaggagggctctggctgccacccaacaacagagagctttgagaaaagcgtgcgagaggatgcctcacctctgccccatgtctgttgctgcaaacaagatgctctcatcctccagcgtggccttcatcatgaagacggcagccagcacatcggcctcctgcatcctggggacagagggcctgaccatgagtacgtgctggtcgaggaagcggagtgtgccatgagcgagagggaggctgccccaaatgaggaagcctttttcttggtctatgctctgggatgtttaagtatttactatgagaaggagcctttaacgatagt

SEQ ID NO: 55189 - DNA, 1247 bp, Homo sapiens
caacacatgtttgaagtactaagctgccatgaatcaccgatctcttatactcctggatgaatgcagtaaggtggtcctagataatatccatgggtgtcctttaagaataatgatcaacatattgcagtcctgcaaagacctccagtaccatagtttggatctcttcaagggacttgcagattatgtggctgcaactttcgacatctggaagttcagaaaagttctttttatcctcattttatttgaaaaccttggctttcgacctgttggtttaatggacctgtttatgaagagaatagtagaggatcctgaatccctaaacatgaaaaacattctatctattcttcatacttactcttctctcaatcatgtctacaaatgccagaacaaagaacagttcgtggaagttatggctagtgctctgactggttatcttcacactatttcttctgaaaacttattggatgcagtatattcattttgcttgatgaattactttcccctgggctccttttaatcagcttctgcaaaaagacatcatcagtgagctgctgacatcagatgacatgaagaatgcttacaagctgcatactttggatacttgtctaaaacttgatgatactgtctatctgagggacatagccttgtcactcccacagctgccgcgggagctgccatcgtcacatacaaatgcaaaggtggcagaggtgctgagcagccttctgggaggtgaaggacacttctcaaaggatgtgcacttgccacacaattatcatattgattttgaaatcagaatggacactaacaggaatcaagtgctaccactttctgatgtggatacaacttctgctacagatattcaaagagtagctgtgctatgtgtttccagatctgcttattgtttgggttcaagccaccccagaggattccttgctatgaaaatgcggcatttgaatgcaatgggttttcatgtgatcttggtcaataactgggagatggacaaactagagatggaagatgcagtcacatttttgaagactaaaatctattcagtagaagctcttcctgttgctgctgtaaatgtgcaaagcacacaataaagtgaaaatcaaccttttcatattaggagacatgcatttgtaaaaattaataaagatgacaagtcagttgtcaatggaattgagctatctgctaagacaaaaaatgttacctcagttcactattaaaattaattttaggagtggaaa

SEQ ID NO: 55190 - DNA, 572 bp, Homo sapiens
gacttgggttcttaataaaataccactctctgtgatggctacatctaagcctttgaaggtgagctgtggacataccacatgtggacagcatgaaatgcttcttctgacactgagagtcacttgaaaaacttgaattcaaagtcaagcaggccaaatctcacacctcatgaatcccaggaggtacacaatgaagaagagcttctgccttaaaggaacaaggctgtctgggaggcctgagagtccattaaaagacaccgcattaactacaacaaaaagaagagcagcaccacccaccagtggtgccccagacacacctctcctccaagctctgggctgctcctcttggagtctacacttagaccctgggggtgggggtgggcacacaaatggacagagtggtctaaatgcaggtctcctggggttctgcgaaatgtagccagaagcatctccatctcggtgtccatttcgatccaactaagcttccagtaaagacactgcagcaatgtaaacatgcaacctaagctagcatgaggttctagatagtaagcctgaactaggcctcgttccgaatt

SEQ ID NO: 55191 - DNA, 409 bp, Homo sapiens
atagagttgtttgagctccttatatattctggttattaattccttgtcagatgggtaatttgcaaatatttgtctctcattctgtgtgttgcctcttcactttgttgattgtattatttgctgtacagaagctttttaaattgatgtgatcccatttatccatttttgctttggttgcctgtgcttgtggggtattgctcaagaaatctttgcccagaccaatgtgctggagatgttcttcaaggttttcttgtagtagtttcatggtttgaggtcttagatttaagtctctaatccatttttatttgattgttgtatttagcgagagacagaggtccagtttcattcttctacatatggatattcagttttcctaggcctatttactgaagagactgctttttcccag

SEQ ID NO: 55192 - DNA, 409 bp, Homo sapiens
  misc_feature (1)...(409): n = a,t,c or g
gttcgatgagaagtatggcggccagcctcggcgctcgagagatgtaagctgcagccgcagccatgcctactacgtgtgtgcctgggaccgccgactggctgtggccatcctgacggccatcaacctactggcgtatgtggctgacctggtgcactctgcccacctggtttttgtcaaggtctaagactctcccaagaggctcccgttccctctccaacctctttgttcttcttgcccgagttttctttatggagtacttctttcctccgcctttcctctgttttcctcttcctgtctcccctccctcccacctttttctttccttcccaattccttgcactctaaccagttcttggatgcatcttcttccttccctttcctcttgctgtttccttcctgtgttgntttg

SEQ ID NO: 55193 - DNA, 599 bp, Homo sapiens
ttttttttttcacgtgattaaactactgttgtatcattgggctgcgacggttacaagtccacaaactgtttaactggacatatgtgaggtggtaaatccctccattttacaggtctttgggaagttctggggccaggaaatccaaatttgataataggattttctcaactgaactcagggcagagcacagatggtctgagtgaacgccctgtgtgacaggtgccttcctgcaggtaggaacacttcctctgcagtcagagggagaagaaaacatcaggagctggatgtgatttcagatctgcaccgagaaacatgctgatttcactggggatgtggcagtcccaggtgaaggctggctaggtcataattgacatctcctccctgtctctgctctcagacatggagttgattatgctttttaaatactttatgaattccatccggatctcctcagggtcatcttccaggtttgagtgcaccagcttcagcttgttcaagggtggcgacaaagacaggcttcctatatcatctccagagcctggtttgtggtgtgtcgacgcggccgcgaatttagtagtagtagtagtagtagcggccgc

SEQ ID NO: 55194 - DNA, 335 bp, Homo sapiens
ggcacgagatgtattataaggaattgactcacacgattaagaaagcgggtgagttcagaatctgcagtatgggctagcaggctggagacccaggagagtcgacgatgccagtgaagtctgcagggcagtctgctggaggagtttcctcttggagaggaggccagtctttgtgttttatttaaatgatcaggtgaggcccgccctcattatggagggcagtctgctttactgaaagttcacaaatttaaatgttaatctcatctaaaaaaccctccaagttgacacataaaattaaccctcacaagctaggtttatttggaattccatgatacttg

SEQ ID NO: 55195 - DNA, 399 bp, Homo sapiens
cggacgcgtgggccgagtactgtatttcagagctgccccttccccagcagcaaacactcgctgagtccatgtctggcttcaggtgggaggaaatgtttcagatgaaacttactcaattcataccaccctgaaatggaggacagaggtgacaaacttcagtttaataggtttctcaccaagttgtatgttccattggcccaggattcttgcactaatgggtttctatcacatcatgtctataaatgggtgcactttactgtttgaatttgtaactgaagtactggatatttaagtgtgagtaatgtcttcattagaaaatagcagaaccgctcttgtcttttagtgtatttttcaagaaaaaaggaaaggaaagacatcaagcagtggatcacaacattt

SEQ ID NO: 55196 - DNA, 411 bp, Homo sapiens
ggccctcgaggccaagaattcggcacgagggcgacagctctaggggaatctgccaaatcgccagtgacagagcttcaactttaatgcagtgggcacaggctccactgtcaaagtgctgggattacaggtgtgagctaccgcacccggccagaagttttattttctataccttcttcagctctcttaatttgtcaacccactgaaattaaccttttatccttatgactttactacatctattctcaaaatgcctaattgccaaatacaataacctttttttcagtccttatctgaatttttttcctctcttgtccttttaggaactcctgactttcttcccaatttcatatattcaatgagacaggggtccccaaaccctgggctgcagaccagcaccagttcatggcctgt

SEQ ID NO: 55197 - DNA, 975 bp, Homo sapiens
gcccctggcttggatcctaaaatcggtgaagtctgagggcccccctgcagtctcagcaggacctgctctatcaaggggcttcctccttcctttccccaccctgtctccttggcggggaggattagtgccaggtgggggaagccagacatttgactgacgggagaggaaggcttgccaggcagcccgaagactgttgtgaaaatggggctgcttttgcaagggaagctcttttactccccattcctgtcctccagaggccccccttttccctgccgtgttattggtgtcaaccctggggtaagtggctggctggactcacccctgctccccgtacacctgtgcctgtgactggcggtccaagctccccacacacacatcttgctggtgcctttccctgaagtcaccacccaggggctggctgtcatcagcccattcttgtcccagcagggtaccgagggaatgataaaacagaatgtgtttgaattacacacaaaaatgttccctgcagcaggtcataaactctgtgaactaatgaagctgacaaacagagctggagtacgtttcccctcacccttcctttcctcctagctcagcaaggggtgctcaggttcaggatgttgtttgttgattcaggctcaaccagggttccgcaagaaaaccttatcaggagattttattttcatgaacaggtgccagtcttcccgccagccacgtccagctggcgtcaataagcatctttggggatgtcctgcctcctccaggaccagccatgagtggctcttatggccaaaggcggtactgcaggccaagcaaacggctctgggctggaatagccctacctgagtgccctgtttgactccgccactatctgccatgtgagttgggcaaattgttgaccacctctgagccttgaaaaagtaggaggttactttgttagagcaaaataataaaatttaattttaaaaaagaaaacgt

SEQ ID NO: 55198 - DNA, 683 bp, Homo sapiens
  misc_feature (1)...(683): n = a,t,c or g
agagttttctagaagcctgtcgaaaaatgggggtgcctgagnatgacctgtgctcgccctcggatctcctccagggcactgccgcgggctgcggaccgcgctggaggccgtgaagcggtgggggggaaggctaccgcccctctggcccccctctggtctgggcggcttcgtcgtcttctacgtggtcctcatgctgctgctctatgtcacctacactcggctcctgcggttcctaggccccaaaatcggccctccctcacccctttcccttcctctctatttataaggtccctgctccacccgaccccacctgcggtgccttcagccccaaccaaagacactagtgcacccccttcacagacactgacctcagaggccccactctggtgcccccagaccctgggcccccagcctctggcctccctccagtagccccacgagtccccacctctcagtgctgacggtgccttcatgtccccgccggccctgcccctgccctctgtaccccgtgaggggtggcaggagctggagtctcccccttcctcctgtgccctccccttccccccccaacagctgctatgggggggctaaattatctctattttgtagagaggatctatatttgtaggggttcggggcccagggcgggtccctatctctgtgtataaactgtacagaccgtg

SEQ ID NO: 55199 - DNA, 1641 bp, Homo sapiens
gagcctaggactgagggcgatggctgctgtggccgtggctgttcgcgaggactcgggatccgggatgaaggcggacttccccctgggcctggggcagtggggagggaaatgaccaaagaagaaaagctgcagcttcggaaggaaaagaaacagcagaagaagaaacggaaggaagaaaagggggcagaaccagagactggctctgctgtatctgcagcccaatgtcaagtaggcccaaccagagaacttgccagaatcgggcattcaagtttgggcactcctcgggagaaagttccagctggtccggagtaaaggccgaacttcgggcttgagcgtcgagccaagcaggaggccgagccgggccctgaaacaggcaagaaaaggggaacaaggaggaccacctcctaaggccagccccaggaaaagttggagaaaccccctcaggagtgaagcgtctccctgagtaccctcaggttgatgacctacttctgagaaggcttgttaaaaaaccagagcgtcaacaggttcctacacgaaaggattatggatccaaagtcagtctcttctctcacctaccccagtacagcagacaaaactctctgacccagtttatgagcatcccatcctctgtgatccacccagccatggtgcgactcggcctgcagtactcccagggcctggtcagtggctccaatgcccggtgtattgccctgcttcgtgccttgcagcaggtgattcaggattacacaacaccgcctaatgaagaactctccagggatctagtgaataaactaaaaccctacatgagcttcctgactcagtgccgtcccctgtcagcgaagcatgcacaacggccatcaagttccttaaccaaggaaatcaccagtgtgggcagttccaaagcgggaagaggaggccaagtcagaacttcgagcagccattgatcggtatgtgcaagagaagattgtgctagcagctcaggcaatttcacgctttgcttaccagaagatcagtaatggagatgtgatcctggtatatggatgctcatctctggtatcacgaattcttcaggaggcttggacagagggccggcggtttcgggtggtagtggtggacagccggccatggctggaaggaaggcacacactacgttctctagtccatgctggtgtcccagcctcctacctgctgattcctgcagcctcctatgtgctcccagaggtttccaaggtgctattgggagctcatgcactcttggccaacgggtctgtgatgtcacgggtagggacagcacagttagccctggtggctcgagcccataatgtaccagtgctggtttgctgtgaaacatacaagttctgtgagcgtgtgcagactgatgcctttgtctctaatgagctagatgaccctgatgatctgcaatgtaagcggggagaacatgttgcgctggctaactggcagaaccacgcatccctacggttgttgaatctagtctatgatgtgactcccccagagcttgtggatctggtgatcacggagctggggatgatcccttgcagttctgtacctgttgttctacgagtcaagagcagtgaccagtgacgggggaaacacagggttaataaatgccatactccctac

SEQ ID NO: 55200 - DNA, 4083 bp, Homo sapiens
gaattcccagctctctgctcgctctgctcgcagtcacagacacttgagcacacgcgtacacccagacatcttcgggctgctattggattgactttgaaggttctgtgtgggtcgccgtggctgcatgtttgaatcaggtggagaagcacttcaacgctggacgaagtaaagattattgttgttattttttttttctctctctctctctcttaagaaaggaaaatatcccaaggactaatctgatcgggtcttccttcatcaggaacgaatgcaggaatttgggaactgagctgtgcaagtgctgaagaaggagatttgtttggaggaaacaggaaagagaaagaaaaggaaggaaaaaatacataatttcagggacgagagagagaagaaaaacggggactatggggagaaaaaagattcagattacgaggattatggatgaacgtaacagacaggtgacatttacaaagaggaaatttgggttgatgaagaaggcttatgagctgagcgtgctgtgtgactgtgagattgcgctgatcatcttcaacagcaccaacaagctgttccagtatgccagcaccgacatggacaaagtgcttctcaagtacacggagtacaacgagccgcatgagagccggacaaactcagacatcgtggagacgttgagaaagaagggccttaatggctgtgacagcccagaccccgatgcggacgattccgtaggtcacagccctgagtctgaggacaagtacaggaaaattaacgaagatattgatctaatgatcagcaggcaaagattgtgtgctgttccacctcccaacttcgagatgccagtctccatcccagtgtccagccacaacagtttggtgtacagcaaccctgtcagctcactgggaaaccccaacctattgccactggctcacccttctctgcagaggaatagtatgtctcctggtgtaacacatcgacctccaagtgcaggtaacacaggtggtctgatgggtggagacctcacgtctggtgcaggcaccagtgcagggaacgggtatggcaatccccgaaactcaccaggtctgctggtctcacctggtaacttgaacaagaatatgcaagcaaaatctcctcccccaatgaatttaggaatgaataaccgtaaaccagatctccgagttcttattccaccaggcagcaagaatacgatgccatcagtgtctgaggatgtcgacctgcttttgaatcaaaggataaataactcccagtcggctcagtcattggctaccccagtggtttccgtagcaactcctactttaccaggacaaggaatgggaggatatccatcagccatttcaacaacatatggtaccgagtactctctgagtagtgcagacctgtcatctctgtctgggtttaacaccgccagcgctcttcaccttggttcagtaactggctggcaacagcaacacctacataacatgccaccatctgccctcagtcagttgggagcttgcactagcactcatttatctcagagttcaaatctctccctgccttctactcaaagcctcaacatcaagtcagaacctgtttctcctcctagagaccgtaccaccaccccttcgagatacccacaacacacgcgccacgaggcggggagatctcctgttgacagcttgagcagctgtagcagttcgtacgacgggagcgaccgagaggatcaccggaacgaattccactcccccattggactcaccagaccttcgccggacgaaagggaaagtccctcagtcaagcgcatgcgactttctgaaggatgggcaacatgatcagattattacttactagtttttttttttttcttgcagtgtgtgtgtgtgctataccttaatggggaaggggggtcgatatgcattatatgtgccgtgtgtggaaaaaaaaaaagtcaggtactctgttttgtaaaagtacttttaaattgcctcagtgatacagtataaagataaacagaaatgctgagataagcttagcacttgagttgtacaacagaacacttgtacaaaatagattttaaggctaacttcttttcactgttgtgctcctttgcaaaatgtatgttacaatagatagtgtcatgttgcaggttcaacgttatttacatgtaaatagacaaaaggaaacatttgccaaaagcggcagatctttactgaaagagagagcagctgttatgcaacatataggaaaaatgtatagatgcttggacagacccggtaatgggtggccattggtaaatgttaggaacacaccaggtcacctggacatcccaagaatgctcacaaacctgcagggcatatcattggcgtatggcactcattaaaaaggatcagagaccattaaaagaggaccatacctattaaaaaaaaatgtggagttggagggctaacatatttaattaaataaataaataaatctgggtctgcatctcttattaaataaaaatataaaaatatgtacattacattttgcttattttcatataaaaggtaagacagagtttgcaaagcatttgtggctttttgtagtttacttaagccaaaatgtgtttttttccccttgatagcttcgctaatattttaaacagtcctgtaaaaaaccaaaaaggactttttgtatagaaagcactaccctaagccatgaagaactccatgctttgctaaccaagataactgttttctctttgtagaagttttgtttttgaaatgtgtgtatttctaattatataaaatattaagaatcttttaaaaaaatctgtgaaattaacatgcttgtgtatagctttctaatatatataatattatggtaatagcagaagttttgttatcttaatagcgggaggggggtatatttgtgcagttgcacatttgagtaactattttctttctgttttcttttactctgcttacattttataagtttaaggtcagctgtcaaaaggataacctgtggggttagaacatatcacattgcaacaccctaaattgtttttaatacattagcaatctattgggtcaactgacatccattgtatatactagtttctttcatgctatttttattttgttttttgcatttttatcaaatgcagggcccctttctgatctcaccatttcaccatgcatcttggaattcagtaagtgcatatcctaacttgcccatattctaaatcatctggttggttttcagcctagaatttgatacgctttttagaaatatgcccagaatagaaaagctatgttggggcacatgtcctgcaaatatggccctagaaacaagtgatatggaatttacttggtgaataagttataaattcccacagaagaaaaatgtgaaagactgggtgctagacaagaaggaagcaggtaaagggatagttgctttgtcatccgtttttaattattttaactgacccttgacaatcttgtcagcaatataggactgttgaacaatcccggtgtgtcaggacccccaaatgtcacttctgcataaagcatgtatgtcatctattttttcttcaataaagagatttaatagccatttcaagaaatcccataaagaacctctctatgtccctttttttaatttaaaaaaaatgactcttgtctaatattcgtctataagggattaattttcagaccctttaataagtgagtgccataagaaagtcaatatatattgtttaaaagatatttcagtctaggaaagattttccttctcttggaatgtgaagatctgtcgattcatctccaatcatatgcattgacatacacagcaaagaagatataggcagtaatatcaacactgctatatcatgtgtaggacatttcttatccattttttctcttttacttgcatagttgctatgtgtttctcattgtaaaaggctgccgctgggtggcagaagccaagagaccttattaactaggctatatttttcttaacttgatctgaaatccacaattagaccacaatgcacctttggttgtatccataaaggatgctagcctgccttgtactaatgttttatatatt

SEQ ID NO: 55201 - DNA, 457 bp, Homo sapiens
cctacgggaacctagtctcactgggagtaggacctgcaggccccaagcctggagtgatctcgcagttggagcgaggggatgagccctgggtcctggatgttcagggcacctctgggaaagagcacctgagagtcaacagcccagctcttgggaccagaactgagtacaaggagttgacttcacaggagacatttggtgaggaagatccccagggatctgagccagtagaagcctgtgaccacatcagtaagtcagaggggagcctggaaaagctagtggagcagagaggccccagggcagtcacactgaccaacggggagagcagcagggagtctgggggaaacctcaggttgctgtcaagacctgttcctgatcagagacctcacaaatgtgatatatgtgagcaaagttttgaacagagatcatatctcaacaaccataagcgtgtacacaggtc

SEQ ID NO: 55202 - DNA, 122 bp, Homo sapiens
cttccacagtgactgtaccattttgcattcctaccacacatgtttttataaataattttagtgctggtcaaacctctcattttatgaatgagcatgctggaggcccagagaggttaagtaac

SEQ ID NO: 55203 - DNA, 416 bp, Homo sapiens
ctctgttctccttatatgtacacatgtatatgtgtttgttatctatttgaatgtacgcatgacatttcacccctaaatacttcaacatgtatctcttaagtacaagaatattctaagtaatcaaatcaatttaatattgaataccatgttatctaatgtataaaccatattctaattttcccaactgtccaaaaaatgctctttatagcttttatctgctaatctaagatccagccaagatcactacttagtttagtttaaagggaagagacatggagaaatctttagccttgtgtaggagggtacgccctgaacactaacgctttttcatttggaaaaggtgcaccgtctagagataagttacatcactcaggacaggacagaggttcttccctaagatccctttcttgctcaat

SEQ ID NO: 55204 - DNA, 604 bp, Homo sapiens
ttttttttcaagtaaaaacttaaaacgtttatttctggtagaaatgataaatactttgcattaaaaatctggaattcaagttttcctcgtacttcatgctccctccctgccccagaaccttacaaaaatatttctgtctagagagggaaagagctggtgcctgctctggaggcaacgtccaggtccgggaaaggcactcgtggtctgtgatctgtctcagtgatgggaggtctccactcgccccacaggcagcctcggggccagagatgagaatatgctgtaatccagtacaggggctgcgtcgtgggtccccaacagctccttctttggggatagtgagccccttgttggggagtaggaagggactgaggggccagctccttccagatgtgtgcatggggaagggagttgtgtctggggaggtgggtgtccaggtatagactccttttagggtctaaacgttcaaggagttcaacagaacaaccagaggccatcatgttttggcagcttgcaagtgaacactccaggggagatgcaggagggaggggtgtagatctggggagcccttctctccctctctgcccgcaaggaaggcacagggtgg

SEQ ID NO: 55205 - DNA, 396 bp, Homo sapiens
atgaaacatcaagatctggttggataactctaaagagctgccagatttgattttcctggggtaaagttatatacatagtgctttaaggctggtgaggctgagaaggtgggcttgtttctcaacctcaccagccataaagtatcagaataagtggagtgtcagcattcatagtcttttatgccaggcaatggggtttgaactttaacctagagatcttgggaaccgtttgtgtcattttgacaagggagtgtcaggacacattttacatgtttagtaagttgacccttgaagtattgcagggaacaggagggacaggagtaagactgagagaccagaaaatctagttaggaggttatactagtaatccatagaagcaatggtcagaggctaaaaaag

SEQ ID NO: 55206 - DNA, 423 bp, Homo sapiens
tttcatcttgtcaacagtagaaattgtctctttgaaaaatcttccgagtgataacatatcatagaagacatgaaaatcaagaacaccaccatcccatcaccaacaaaaaccaaacttagggtttatggtactaggatacagaaaacacatttacagagcagcaggaacagtaatgcatttattatgaaaaacagtaaattgtgtactgattaatggacaagccttgacatgaacatcatgttccactgtggaataaggtagtgctataatatgaaaaatacatcatcatggtggacattctcagtagcatgaggaaatcaagaaacaccaagtttcacatgttcccaacaaaaaaatagttgttagtactttcaaaggattcagttgtttcattagacgaaaaaaaaaaatatatatacttca

SEQ ID NO: 55207 - DNA, 153 bp, Homo sapiens
gaataaataaaataaaaatggataggtggtgacccactgagcctgatcataatacgaagaccagcttctgccactgcctttccagactcttaccactgcctgttgattaaatctaactcttcaacatcctagacaggcccttataatcttgct

SEQ ID NO: 55208 - DNA, 432 bp, Homo sapiens
acgcgtccgtgagaacaagaaagaagaacttctgtctcgaggagactgaagccaaggataccagcagagccaacatttgcttcaagttcctgggcctgctgacagcgtgcaggatgctgttggaacccggcagaggctgctgtgccctggccatcctgctggcaattgtggacatccagtctggtggatgcattaacatcaccagctcagcttcccaggaaggaacgcgactaaacttaatctgtactgtatggcataagaaagaagaggctgaggggtttgtagtgtttttgtgcaaggacaggtctggagactgttctcctgagaccagtttaaaacagctgagacttaaaagggatcctgggatagatggtgttggtgaaatatcatctcagttgatgttcaccataagccaagtcacaccgttgcaca

SEQ ID NO: 55209 - DNA, 1015 bp, Homo sapiens
tttagagcatgagtaaagagaaagagagaaggaagaagtgcactaaggagagcgccgtcccttcttcagcattaagtgacactggatggtctggattcggttcttggctgggacaaactcgggctgaagcttcaatgtggattcataccacaccagtgctttttcaaattcttccattgccacgtagacattgcccagagtgaagtggttcacagcaaagtgtggtgcgatctctactgccatggtggctactatgacggcgtcattccagagcttggcattgtgcaagatgttggccaggctaatcaggggcacatccttcatctggtgtggcgcatagtgcagagcctggcggaggcagtcgattgccttctttccttggcctttcaccctccagtagagggctgccatgctggagaggacccaggacgtctggttcttttccaaaactttggcaattcgggtgccaatctgttcaagcgactgttgtggatattggtctttgccgagattttgtaatacctctgttaactgactctcccctgtgtagtgcaggctggctcgggttggaaaccccatgcaagtggtccagggtatgcatactcgtggggagattgccattgcaaagaggctccattgctggctgctgtataggggtggcaaaatctatgtgttctgtgatgtcaatgttttttgaagaaactgcaagccaggtactcacgatggcagtcagctctacccagcggagtttgaggcattccgtccgggctgggccatccccagacgctggtagtcacgtttttttcctggaaggaaagtatgcccatgaatccacacaattgcaaaggaagagaacccaaagggccttatgccctggtgattacttcacctggattggtgtatttggaggtgctagtcattcctgtagtctttaacatttcccccatctatgatctaattaaaatctcgtcattatgcaatggaactaaagatcatctctgagtaaagataggtg

SEQ ID NO: 55210 - DNA, 411 bp, Homo sapiens
cccagtgccactgccatgatggatgtgagtgaactcgggttagtctgcccgctacctccgccagggctaccaggagatgacgaaggtgcacactatcccatgggacgggaagaagcgagtctgggtgcctgatgaacaggacgcctacgtggaggccgaggtcaagtcggaggctaccgggggcagagtcaccgtggagaccaaagaccagaaggtgctgatggtgcgtgaagccgagctgcagcccatgaacccgcctcgcttcgacttactggaggacatggccatgatgacgcacctgaacgaggcctctgtgctgcacaacctgcgccagcgctatgcccgctggatgatctatacctactcaggcctcttctgtgtcaccatcaacccctacaaatggctcccagt

SEQ ID NO: 55211 - DNA, 691 bp, Homo sapiens
tttttttttttttttcacaaaacaagacaatgttttaattgtaaaactaactcgaggcaggggtgggcgggctggggctgcgctgaccgggcaggaacctggttcttcaggcagtggttctgccagggccaccccgcaggacagggaccatctgtcccccaataagggcaggggctagagtgttataaaatgacaatataaatagacttctagaaaagaggaggctgtccaggtgcagtagtcatttgctgcaggggctggagagggtggggggccctgacctgtctccccatccagccacagaaagggggcgcagggctacgggaaaaggccactcttcggacattcatgatcgacccccacaatggctcagggggagagggggctgggtgtcaggcaaggcgccagacaccccttgcaggctggaggacggggtggctggacctttgcacacacacacatgcacactcacacgcgtgcacacactcatacatgttcacctcttagtgttctctccacccccagcgacccccactgcagacttccagtgatgggagggccgctgcccttcctggagacagaagaacatgggggagggcctgtcccagagggtgggggtcctgggagcctcgcttgctcccacgagtccctgtgtttttctaaaagtcacgagatcaaaactggagttcag

SEQ ID NO: 55212 - DNA, 722 bp, Homo sapiens
cggacgcgtggggcagctactattgaataaatacctatcctggattttaaaaaagaaaaaaatatatataattttattttaaattggcttttatctttaattcttttttttaaagttatcaaatcttcattttctaagagtagccctttatagtgtacaaaatgatattaagtgcattattatcttcgcttttcatggctctgagtcataaaacaagctggtggatctcactgtacctaatttatagacgaggaaattgtcattcaaaaagattgactgttatgcccaggggtcagcactaacctgcagaaccagtattcagtccccaagttcagtgtcttctactgccctctactaatgaaaagtgaaaatttccctgggggtctaattctctcttcagtttgctgtgccgttgtttatctttgagtcttcattctctgaagatggctttctgcctgtttctggtacattagaattctcactatgatatagaaatggcttcagtttcatagcataatcttgcagttagctctgaattgcctcaaaaaccctgaacaacgcgaggttccagatgtgttttacttctttcattcatatttacccccatttgttgtttaaaaagaattatgaacaattattacatcatatgtagaccactttcactgattatatgttgacattttcctcagtaaaacataaagttcttaacaagaaaaaaaaaa

SEQ ID NO: 55213 - DNA, 409 bp, Homo sapiens
gtcacccaattcatgaattgcttcttactcaaatgaactctttaaaattgtattgtgccttagatttttctttaacagtttggtgtcagaagtaggatataaagtagaatctcccccagagatccctaagagcaatgggtgaccaggcataggtacccattaagcccattgtgttcactggtttcttcctgcatttgtgagtcactaggtaagtccctctcagatatcaggcttgcaacttgtgtcctgagctctctgagtttatttgagtaattttatttctcatttgattcagcggttaatctgggtatttgacaagttcatctgtttccaacaggaactatactaggtccagtatagtgtactagtttccagacaaggtctgatttctggattgggatccagaggt

SEQ ID NO: 55214 - DNA, 369 bp, Homo sapiens
cggacgcgtggggtgactccaaccctaccaccatgaatggggtcctgatcccccatacgcccatcgcagtggacttctggagcctgcgccgggctggcaccgcacgtctcttcttcttgtctcacatgcactcggaccacaccgtgggcctgtctagcacctgggcccggcccctctactgctccccaattacagcccacctcttgcatcgtcacctacaggtgattttcgatacacaccatccatgctaaaggagccagccctgacactggggaaacagatccatactttatacctagacaacaccaattgcaatccagccctggttcttccttcccgacaagaagctgccaccagattgtccagctc

SEQ ID NO: 55215 - DNA, 244 bp, Homo sapiens
  misc_feature (1)...(244): n = a,t,c or g
tttagttataaatggagcagtgctttctgtaaaaatgcagatcctgactcatcaggtctaaagtggggcctcagattctgcactaataagctcctaggagataatgctgatgatactggtccctgggccatatttgagtagcaaggtcacagagcatannnnnnnnnnnnnnnnnnnnnnnnnnnnnnnnnnnnnnnnnnnnnnnnnnntacaggcgtgacccacagtgcccgcctggaaatat

SEQ ID NO: 55216 - DNA, 385 bp, Homo sapiens
gaaccagagtgtcagagcaaaacctcctctatctgcacatcctggggacgaaccgggcagccggagagctgcggccggcccagtcccgctccgcctttgaagggtaaaacccaaggcggggccttggttctggcagaagggacgctatgaccgcagaattcctctccctgctttgcctcgggctgtgtctgggctacgaagatgagaaaaagaatgagaaaccgcccaagccctccctccacgcctggcccagctcggtggttgaagctgagagcaatgtgaccctgaagtgtcaggctcattcccagaatgtgacatttgtgctgcgcaaggtgaacgactctgggtacaagcaggaacagagctcggcagaaaacgaagctga

SEQ ID NO: 55217 - DNA, 838 bp, Homo sapiens
ggaagcatacatgttttccttttgtttttgaaacttgtttgtaaacataaataaatatgcccttttattaaataaattcatggcaatgtttttttaaaagacatttcagcttctttactcagttctgcatatacagtgcatcagtctgttctctttgaccacaattggaatacatttcaagatggtaacagccccatgaagtaccgctttaattccttgctggtaatctaatagaatcagattaagaaaattaacacaattttaccatttgacatactcttcattgaatttagtttgtctaaaatagtctcacaggtaaaaaacataacaacaatgaccaccattgtctttgatacatttattttaattcttaagtggccaaataacagattaggtaaaatgagattacatgaaaaggttctaaaatgatatatttagatgcaataattaaccatatgctaggaatgcccacctctaagccaattggattctttagctctctttttctttccttcatctaccttcttctcttttttgcctctgtctttaccctttagaaactggcatgtgttagggcccagatttcaccagatacacaatcctcaggctgacataaagtttacgaggactgctactataactgagagtgctgaccaagcaaagaaacatttagttgatggtgcttgatatttttggtgggtgggggaaatctttttctcaccatcaaatctttgcagtaatcctctgcaggtcttaggaaacacattgggctctgtcagcatttgtaattgtacatttatttcatcagggtatttataggtggaatcatactgttaaa

SEQ ID NO: 55218 - DNA, 371 bp, Homo sapiens
cggacgcgtggggtgaattctatggtggtgactgctacatcatactctacacctatcccagaggacagattatctacacgtggcaaggagcaaatgccacacgagatgagctgacaacatctgcgttcctgactgttcagttggatcggtcccttggaggacaggctgtgcagatccgagtctcccaaggcaaagagcctgttcacctactgagtttgttcaaagacaaaccgctcattatttacaagaatggaacatcaaagaaaggaggtcaggcacctgctccccctacacgcctctttcaagtccggagaaacctggcatctatcaccagaattgtggaggttgatgttgatgcaaattcactgaat

SEQ ID NO: 55219 - DNA, 3086 bp, Homo sapiens
gaaaaaatggaatagaatgatccgagagtaaataattcttgctttattatgaaccaagtcacattttgtctcttccaacagatgcttgagccaaaaaagcaaacataggcagaaatacaattgagaatatcttcatgtttcaacctttaatctgacttgccttttactatcctttccccatttcttctaatctcttttgccttacaatatattaccttctaggtatcacctcatcctatagaatcccttctagtttaatgtcctgccccaaacaatactaacccattgaagataactatgaaacctttaaatggacagtggttccttttaaaagcagccttactgaaaattttatatacacttaaatcaagtaacagttaccgtgagttttctaaacttttgtgttaacagaaatgccagttcagcagtgtgactgttacttttaaatgtctgtcttgccgccctagagtgacagacatcccagttaaacatattaggaataagaaatacataaatccaatgaagactgtagaaaaagaattttagcacttgaaggaacttcagtcatttaacccaacccattcatgttatagattgagaccatagaaataaaagtagcctataggatacaaaagttagcggcagatctgagataaaaatccagctctttggatccccgcgtttttcaccacacttagctgtcgttcccatgtattacgaacaaagaatcaaatataatcaagtgcagcctcacttcacaggcaagaaaacagactagagtttaatatattgcccatgtttatcttaaggtgaaacatttactcttacaaccacagttgatgttaacctagttaataaaatatgaaaggtaattactaggggaattttaaacggcactacataagcaaacatgactcaaattactttttccatttctgcttcccaaattattggagttactgaagcaagctatgctgctttcaattccaatgataggcatattcccaaataaactcatttaaagagctcataaaatgaattatcctatttccaagtcagttgattagcaaattaagatacagctccaagttaccctactgcttaagggttttccggtccaatttgtaaggttttcggatttaaagattcagactgcataccaaaggtggacaaagagcaacgcaagctgatttaggttgtcacgtggcacatactctagtttaaaccctcaactacaagaaaagaaatggtgtattgtcatttttgccaaagcaccccaaaatgaaatactttcttactcaatctaggttcttttttttcattctagtcccttaagctcctaggatttttagatgttgaaaatactccctgcgcccggcattcaatattgtatggttcattaggatctgttgtggctggctttggacattttttgttcactagtgagtatctgtattttttatttctctatgtactaaaaaaagcatttctctacataatgaactatttttttttctaggtggagtaatgtatataacgtaattatattcctaattaattgttatgccttatttttacaggtagaattagaagatcatgtgatgttggagtaggagggtttatcttggtgactttgggatgctggtttcattgtaggtataattatgcaaagcaaagaatccaggaaagaattgccagagaagaaattaaaaagaagatattatatgaaggtacccacctcgatcctgaaagaaaacacaacggcagcagcagcaattgaacaatcttgagcatagaaaagaagtcaatgtaaacgaagttaagatcaaccacataaaacatttcatgtgcaataagctctcaatcaagtaaataaagtttaagttgtagtcatttttttcccacacttgtgtggaatgaaaacttgccagtttattctggccctgtgtctactgccaggatagcattcttacgtgttacatatagtggacttgtcatccttaaaatgtgaacagaatttattggcagtgtggcaaagaattataaaacatagtgtttaatgtacttggagtttccttgtagtagtaagtatagagtttgatgataagtaaacgtcccttaacaaaaacctcaaccttattactatcccattaaaaaacagcaaatacttactgagttcttgtaagagctaatgtcattgtaagatttaaaactaagggcttttatcactttgcaaattattttttaaatgcattcatcatttgacagtgttctctcatttcttaaaatgcgagtcatcttccaaaagagttgtttttaactgccctaaacatttttggggaagtatgcagggtttaaatttttaagtataattagttctgaattaaaatatgcacatggaacttgtctggcagactgatgcaatagtaaaacaactgcagaattactattaatgtaaacaatccatttgaaagtcaatcagctgctcccattaaaatattatttaaaatacaatacccacagcatctaactaaatcctcaggatttattctccgggagaaattatccctttctaggaaaatgaagttatttctggttttaattcatacaatactttaagaaaatctgttaaatataacaaaacacaagctagatgcttaagaaatgcttaaagaaatattggggcgaaggtaacagcagtcaacaggattgtggccattactggtcctattattttgatgtaccatggaaggcacagaaatcgagcaaggaagaaaatattagttattttgatctacatctttttctaaagaaaagtggagcttgcctccagttcaattcacaagagcattttccctcccatgcccaccttttcttgtggctgtcgctaggaaggatgcagaggctgtgtggtttaccaaatgccttaacttagcagtgaatgacaactgtcaaacacatgttgagggaaaatttttactgattcacaaaaaggaagacagtttgccccactcttagtggcacaaatcaaagctgcatgcactacattatccaaattagtcgtaaccaaatagttaaaaaattct

SEQ ID NO: 55220 - DNA, 236 bp, Homo sapiens
gaagcttttcacttcactcctactgtgacaactaactaccttcttgcttattcaatgttttagtctatatcaacacttttatatacatttacttttaaacaaaattttgcatcattacacttaaatttttatttaccttttaaaaaggaaattaaaaattataaaattttacataataaaaataaaataaatgatttatataaaaattaatctgacctgtgaaaaacactgtccag

SEQ ID NO: 55221 - DNA, 251 bp, Homo sapiens
ttttaactcattatttttgcttatttcatgtaatttacttttaacaaggccagcttaattttaaaaagataaaacctcttttcgatcataaaagagatatatgaccaataatttttttatattaaaagagtttcttcttctctatgagagaattaaactttctgatcctaagactccttctagtcagcattccttggatgaatgtaagtatctaacttaggtgaatactgcctcccaactaccagaagttt

SEQ ID NO: 55222 - DNA, 337 bp, Homo sapiens
gagaagtgtggagggggcagtctgatgccattagggattcaggttcctcctctccccacatttttttttgtccccacattttttttttctgccatgtgcctctggcctcatcatcacaatgtggctgcaggagttccagccctcatggccatgcctgctccacgcaccagggaaaagcaaagggggttggaccctgagtcagcctcagccagtgaacaccttctgctcaagttctgttgctcatcactttgctccatggctcacccctagctgcaaggaattctgggaaatgtaaagggattaactttttttcaagttaaagtttttcttaaagctg

SEQ ID NO: 55223 - DNA, 414 bp, Homo sapiens
cttaaacaagtcatctctaattcttacaagacagctataaaatatgcatcacctgctcaccccatcttctattttagagatgagaaaatggagagtaaacagtttgtgaaagtcgctaagctggtggttataatgcagtgccagaaccagaatttaggtctagggaaatctcaaaatcatattactttttacaaaaatctccaacatcaaagctggactctatgccaactgtcagtgaatgacactttgaaagagtcagcaggaactgttggcatgacatggagtgacagtttcctcttcagcccagacccctggtggtgatttctctttctcttgagagatagaacagtctactctgtgaccaagatacacatgatgttataagctgcttttagagagtgatgtaaatgcatg

SEQ ID NO: 55224 - DNA, 109 bp, Homo sapiens
gacgaggactaaatgtgggtgcccgagcttgggacatgggagaggtcttgatgtttttctgtgatgttgatatctatttctcagccgaattccttaacagctgccggtt

SEQ ID NO: 55225 - DNA, 219 bp, Homo sapiens
aatgtttttcctatttataattatgatggtctctaatgtaggaccaaatgaacagttagttaaggctctagttagtattcataactctgcagtactgagtgaaaagtttatattcttaagcttttgcagactttttttttcagatgttattatatatggtatatgtaatttatcaccatgttagataatatattaactgctaaattcatgtttcaaaaa

SEQ ID NO: 55226 - DNA, 409 bp, Homo sapiens
gacattttaaggacctcaggttcattaaaaaggacttagaacttttttcaaatccatttaactttaaacctgaatatgcacctatttcagtgagggtggagctaacaaaacttcaggcaaacactaatctttggaatgaatacagaatcaaagacttggggcagttttatgctggattgtctgctgaatcctacccaattatcaaaggggttgcctgtaaggtggcatccttgtttgatagtaaccaaatctgtgaaaaggctttttcatatttgactcgaaaccaacacactttgagtcagccattaacagatgagcatctccaagccctgtttcgggttgccacaactgaaatggagcccggttgggatgaccttgtgagagaaagaaatgaatctaatccataagg

SEQ ID NO: 55227 - DNA, 395 bp, Homo sapiens
ggccccgtggcttggtgtgaggttttgcctctgactgctggacagtgagtcagtgagcccaggcctgaggccgctcaccctccagccctagctgggcctcagggccagccaccttctcctccagcgtctagagtttgcctcgaggcctccgggtagaaggtgtgcatgtctccaccagtgtcatgtggcacctgcagatggcttctcgctggcacctgtcatgctctgcagacgtgcctggaaaagaagcttatgttgccttaaggtcatctttctcctttgagggagagtacagaagtcgtggcgacacccacagccaagccaggatcgttatctacgcgtgagcatgcagagcgggcgtgagatattcccgctgaatcaagctaaaaataacg

SEQ ID NO: 55228 - DNA, 360 bp, Homo sapiens
gcacccaccactcttgacatgcccagagcaggcatcacccagtacacatggctccgtccagatgaaaaccttcccaggagtggctggataaggcccccaaccccaacacttgacaacctgctgtgcttactggctccccatggccctccgatttcagatttctcagatttctggctttgccagaagactctggcatccctggggcaggtgccttgctcacatctgggaccctgcctcctggctgtgatcaccagtgctcagctctgccaggccaggtacagcacatagtgctcccagggtggcctgacccgggcagagtggagaagggctcttgcctcccctatcctagtttctttcctg

SEQ ID NO: 55229 - DNA, 564 bp, Homo sapiens
  misc_feature (1)...(564): n = a,t,c or g
attcggcacaggcccctcagcctgcctcggctccttcggttcccaccagcgggaacgaccgtccccactttcagcttaaactcatctgtccttctggatccagctcagaggtctctttgtgatgccctcctggaacttcccccctagtaatccttcctttgtattcccgtggctctttgataataatggttggagtcctgaacccgaccctttgtatcggaccgtgtttgtcatctccagtgctttatgaaggccttgaaagcaaggttcagccgtctgtattggtcatcttcccattgccagtgcctacgaagggcttgacccattcattgttagacgctcagtaagtgtgtattgaggcagccctctgtgccactccagggctctttccactaaatcatggagtatgttgggtttaccagatgggaatgagtagcctcttctttgggatatataaacanccgatgggtattgtgggtcactgtgggagggagaatgaaacgtatggggatncctgacctgtgggttactggaaaacagttgacattagagagaggctgaatt

SEQ ID NO: 55230 - DNA, 396 bp, Homo sapiens
  misc_feature (1)...(396): n = a,t,c or g
ttttttttttttttcttacttttactggccttttgtgttgtggtctgggtcagtttctgtaaatgaaggacagttctggtcaaaggttttgccaaccttccttcctggccccacttcaaggtctccgcctgtaagaggatgtaggaaattgacctccagaatgtctcctcctaacttcaggctcacagaaaacgtgcctgccagaatgtgccgctcctcaaaggttcccaaggattctaccttcagtctgtttttttctcccacatactccccacccccgtccaaactactgccaccttccaagacccctgtgatccctttcaccctctgcccacttttctctctccagcctgccccaggggcctntacccaggcagtctgaggggaccattcctt

SEQ ID NO: 55231 - DNA, 609 bp, Homo sapiens
ggaaaagcctttgggtccaaatccactcttgttcgacaccgcagcattcacactggtgataggccttatgagtgcagtgaatgtgagaaatcctttagccgcaaatttatcctgattcaacaccaaagagttcacactggagaaagaccttatgagtgtggccagtgtgggaaatcatttagcctaaagtgtggcctcattcagcaccagttaattcacagtggagctaggccctttgagtgcagtgagtgcggaaaatcctttagccaaagaaccaccctcattcagcaccacaaagttcacactgcagaaaggccttatgtatgtggggaatgtgggaaagcttttatgttcaaatctaaacttgttaggcaccagagaactcacactggagaaaggccttttgagtgcagtgaatgtgggaaattttttagacaaagctataccctcgttgaacaccagaaaattcacactggattaaggccttacgactgtggacagtgcgggaaatcctttatccaaaagtctagcctcattcaacaccaagtggttcacacaggaggaaaggccatatgagtgtggcaaatgtgggaagtcctttccacattt

SEQ ID NO: 55232 - DNA, 355 bp, Homo sapiens
gattttttaaaccctataagtgtgaggacaggatttatctttccaaatatgggacagaggtatgatgttcattaggaggaaaaaagtgattttctttaaaaaggaagaaggaaagtacctaatctcagtatgtgtgtgtgtgcccacacttgcccacaaacatcaatatacattcatgtgtttactcatgggtatgactgcattcaggtgactgcacagaaatgtctacacatgtgttttcacatacatatgtctacccatgcctgtgtggacacttatatatgtatatacatacatgtcaaattaatataatgccttgtagaatattcagcaagttgagaaaaaatatcctatc

SEQ ID NO: 55233 - DNA, 234 bp, Homo sapiens
gacttgactggtgaagcctgtggatttttttgtcctgttggttcacacaacactgatccaacagttggtaaaaatccccctcacctgggtacttggaaaaactggcccaaggcagcctgacttctgacttgttcagttgcagttgggcagaatgattggcaccaatgatgaaaacaattagcagcagattggcagctggttcttttctttttctcttctcttttcttttctcgg

SEQ ID NO: 55234 - DNA, 355 bp, Homo sapiens
gttctctgctgagcaagaggatatcaggattaactagattaatacatgtgaagagcttgttttggacgagcagagagatttgtcttcaataaggtaaatgtgagtgaagtcttaatagtctgtcctggagtttcatctagccctggtaattgggcatcctgatgtaatttcaagctaatcatttcctctctaaatggcaaaagcttttatctgaagagcagatttcatgaattggtgatgcctgaattaaggaaatggtagcaaccgaagtctttgcagtatcctctgcttagctgttttatttatacagacagagctggacacatagtaattctgtaatcccagcactttggga

SEQ ID NO: 55235 - DNA, 465 bp, Homo sapiens
  misc_feature (1)...(465): n = a,t,c or g
ggccatcttgggaaacaactaaagcaatgaaagatctgctctatcttttgcaagggagcttttcacttatttgaagtgagcaaagagtttcattcatcaaacattcatcaaaacgctgctcttcatgtaaagatgaacatggggctacagtgtgattttacagttgtatactacacaactccagggagccccattcacagaaaccatcacttgcacaatcatatgaggctgcaccacataagcactacatagcttttccccttgaggcacatacagattactcagagatcttctgagtcttttgcccagctagaatatcttggctctcttctgtcttagacatgggtttgagtgnaactcaccatttgtcgccttcctgganatggtctcatttctcatggccttctgcatggngggatcttcagccagctgccattcgagtgacttaaactatcatcccaatct

SEQ ID NO: 55236 - DNA, 441 bp, Homo sapiens
  misc_feature (1)...(441): n = a,t,c or g
ttcctggtttctggaccttggatacctgaaaattttgcccagttctggtgataccaatcttttgagcaatgatatttaaaaaatacaatcaagttttattgatagtttaccctagcggtattataagtactcagtctgtaatcattgacttacttccttacacgattacccgttctacagatggagtattcaaagcacaaagaaatgcagtaacttcctaaaggtttcacattgctgatctgtggttgagctggaattccaaccctgtctgaaggactgtggagctctcgggtgattgtagagaaggctccaaaagccagggtgcctgatctggacaagaggaagtacctagtgccctctgaccttactgntggcagtctacttcttaatccggaagagaatcacctgagacctgaggacgccttattcttctttgtcaac

SEQ ID NO: 55237 - DNA, 270 bp, Homo sapiens; identical to SEQ ID NO: 44989

SEQ ID NO: 55238 - DNA, 368 bp, Homo sapiens
ctgtcaccttgcctctcccctttcccccaccttattctatcccacccgccaccgttggccaactcctctcctaaacagtggactctgctttttcccctcctcttatccctaatcctaggagctttctgtctggcttccctcctggcccctcgtgtatgcattctctctagcggtggggattaaggagaaaactcacgtggccagtgggtagagagagtccgggcaggcagctgcctgaagtcagccagagtctgcatgtgcccagctgtcctggcctccagcatctctggaaaaacagagacagaatgagtagcagcaggggaccccatagggcacatctgaaggcctgagaggtgctggatgggatg

SEQ ID NO: 55239 - DNA, 395 bp, Homo sapiens
cggacgcgtgggggaaccatcgcaggatgacagctcccgggtccccaaacctgttcccctctgctactagccactgagaagtgcactttaagaggtgggagctgggcagacccctctacctcctccaggctgggagacagagtcaggctgttgcgctcccacctcagccccaagttccccaggcccagtggggtggccgggcgggccacgcgggaccgactttccattgattcaggggtctgatgacacaggctgactcatggccgggctgactgcccccctgccttgctccccgaggcctgccggtccttccctctcatgacttgcagggcccgttgccccagacttcctcctttcgtgtttctgaaggggaggtcacagcctgagctggcctc

SEQ ID NO: 55240 - DNA, 520 bp, Homo sapiens
caagcatctcagactttacatgaataaaactcaacttccttcccattcaaatctgggttattttcttctgtaagagaaagataccatttgagactccagaatctgcctctaactctcaacaagactctgcaattactcaagtatcctttccatcctcattgccctgctgttattacataggccctggttcaagtccttgttacttgttcccattattgcaataacttctaattccaatgccgttgtgtgatcccattttaaacacggccagagcagtcttccaacaacatagctctaatctagtttcatccccacttttacatgcttcagtggctttcccagtgacttggcatggaacacgtcctcagttgccatacattccagctaactcttacccaacctttctttgttcacacagtttccttttccttcctcattgacccatccgcatctctgtttatccaagacttctctgtgatagctgacccttagtctttctctcccctattcctccagacta

SEQ ID NO: 55241 - DNA, 352 bp, Homo sapiens
  misc_feature (1)...(352): n = a,t,c or g
ggggggagaaggcacatcacatagtgaaaagcaggagcaagcgagagagggccaggtgctatacacttttaaatgactagatctcccaagaactcactattgcaacaacaataccaagggtatggttctaagccattcatganaagtccacccctatgatccaatcacctcccaccaggctccacttttaatactggagattacatttcagcatgagatttggtgaggacacagatctaaaccatgtcctgtcatccttgactcctttcttgtctacattcttgactcttcttttctgtatcttaactcctgtcatatcccacttataaggcgtcaacaaattgtgttgact

SEQ ID NO: 55242 - DNA, 271 bp, Homo sapiens
  misc_feature (1)...(271): n = a,t,c or g
gagcgcaccccgacttgtcctcaggaatgtgctgacttttcttaaggtcgcgtcactgtaataaagtattgggggaaagcatgtaactgacaaaggcctcttcaactttaaaatgtgacctgacctgtaagganaggcgtgtcctttgatccagacgagagagactctgatttccctgccannggcccncttcancnctccctggnctcntntnnanccccnccctntncacantgantggtancnnttcattncccnnttgntnattatg

SEQ ID NO: 55243 - DNA, 313 bp, Homo sapiens
ggcttatcaattatgaggatttttggctttcggctctggaaaatatgagaaatatgggcaattactctctgaagaaaggtctgactctattgcccaggctgaagtgcagcggcaccatctcagctcactgcaacctccacctcctcagctcacgtcattttcccacctcagtctccacagtagctggaactacaggcatacaccacgtgtgttaggctaatttttgtattttttttgtaaagatggggttccaccatgtagccccggctggtcttgagctcatgagctcaagcgattcacctgcctcagcctc

SEQ ID NO: 55244 - DNA, 328 bp, Homo sapiens
gtttaccaagtgtacagtagcgttgggtctgagaaaacacagtatatatcttaattttaaaatacgttattactaggaaatgctaacaatctaccttcagcaaatcataatcattttgctgctggagggtcttgctttgatgttgatggctgctgactgattagggtggtggttgctgaaggttgaggtggctgtggcagtttcttaaaataagacacaaatgaagtctgctgtacccgtggactcttccttttacacaatatttctctgttgcacatgatggtgtttaagagcatttttcacccacagtaaaacatcttttttattt

SEQ ID NO: 55245 - DNA, 413 bp, Homo sapiens
gctccatctcaaaaaaagcaaaacaaacaaaaaaagaattggccagcctgggaagtccattcctttggagtctgtgttaccattctcaataaacctaatgagggctggcagaggggaactggccagtctctccttgggctttcaccgtacctcatgccatgtcacctgtaacagtgttgtagttacctgcttatgtctttgtccttgagggcaaggcccatatttatttttatttccagtgcttggcatatattaataaagaggtgcttaagatgtttgtacaaatgagttaaggtggagggaggagagttgaggcacaggtcagctggctttggcttctgtcttcttagtaaggcgaacagtgagtcatccacacagattataatggtagcagagctggagtctacagctct

SEQ ID NO: 55246 - DNA, 794 bp, Homo sapiens
gcagtacacaagtgctagccctagcagctcgcgatgtgcttcagcagagcagacgctgcggataactacccttttggaacatgtcaacagaggaaactttttcctcacttccatcccccgaatttgattgggaacaagtttgtccctcttaggggatcaccccacagagggcctgggtgttatttttcagatggatatggcttggcatacgacttatctaagatcccaaccagtataaaaggatatactttgggagccagaacagctgtgaggtttaagccaatacagaaggaaatgacacctcatgcaggcaggtaccagaaagtaagtcctcagcaggaaaaacacaaacaaaattttgctccatttaatgtcttggtgcctcgatttaagaactacccaaaggacacttactatcccagccctggtgcatacaacccagagaagaagccaccgccaaaaattgcctggccaatgaaatttggatctccagactgggctcaggttccatgtctacagaaaagaaccctaaaagctgagctgtccacagacaaagactttagaaagcatcggaaccgtgtggcctacctaagcctgtattataattgagcggctgtaactaccttcacgtgctcctcttatacacagactctccaggactgaggacagagctgctcttcttcttctacgttactgtggccctcttgtctggcagcctggagcccagggagggacaggggcttatagctgctgtatgagaacataaagactagtgcacagtgctatctccatct

SEQ ID NO: 55247 - DNA, 434 bp, Homo sapiens
cgggaacaggaatttcttcacatggctcctggagaagtgaccatcacagttcgcctcatccgttcctttgaacatcgcaatttcaaacctgtagtgtatcacggagtgaatttggaccaaactgtaaaggaatttatcgtatttctaaagcaagatgcactaaagattattcatcaagcacataaatcaaagacaaatgaacttgtgttgagtttggaagatgacgaaagactcctgctgaaagaagacagcactctgaaagcagctggaatcgaggaggaggatgagaatgatgtgcattccgatctttggctgaggacagtaggtgtctgctctccaaatatgcagaatgcaaatggctgttttcagaagccagtgaaactgaaattgcattcttctgtgaagaagattataggaactacaaagctaatccc

SEQ ID NO: 55248 - DNA, 272 bp, Homo sapiens
gtatgtaggcttttaaaaacctcctcctgagtttgaattgtttcctaagaatacgttctcaagaatggaactgtagaacttaaggataagagcttgctcttattttttataggtctctcaaaagttgctgtttctgtgtttataccaaataaacaagttttggctgctttataaataaaacaaatccatctctctatcatttttaaaattgtataaaactaaaatagaaaaaaatgtataaatagtctacgcggccgcgaattccagatcta

SEQ ID NO: 55249 - DNA, 903 bp, Homo sapiens
gcagctgagctgagaagcacagcctccctcctggccactcaagaatctgacgtgatggttgggcctttcaagctgaggtccaggaaacagcggactttgtccatgattgaggaagagatccgagcagctcaggaaagggaagaggagctgaagaggcagagacaagtcttgcagagtacgcagagccccaggacaaagaatgccccatcactgccctccagaacatgctacaaaactgctccaggtcctcgaggccacacgggttaatcgaagaaagagcgcactggctttgcgctgggaagcagggatctatgccaaccaggaggaagaagacaacgaataaacttccttcaacccaggaagcgtctttggtgcttgggagaccaagaaaccaagaaattaacaactgaaagcattttaatggactatttattaaagtgcaaacaaactcagcaatccttatgtagaccagaagctgcaatatacaatgatgaaaatgaaacgaaaaggaagtccccccatcagactctggacacccaggaatcaaaagagaaaggacttttttggtgactcaatcccagtgtctggtttggggccaatctacaatggatccaaaaggacaaaacatgttacaagcaaatcaacatagttgctgcaggcggaacttgagaccagcctctctgggcgatgaaggacaatggtggtagggccacttagagagcagtagggcccaggctggtgcagcctacatggcacaggatatttccctgcaccagtttcccacctgtcacttgcagcatcagagggtgttgcattaactccattttctccggcagccataaaatgaatggcgtttctctccatatttgcccagaagaggcagttatgattccacttctcccg

SEQ ID NO: 55250 - DNA, 535 bp, Homo sapiens
gtgatttggaagttcaacctcatgttgttaatatctattggagatacccccttacacctggcatgctacaatggcaaatttgaagttgccaaggaaatcatccaaatatcaggaacagaaagtctgactaaggaaaacatcttcagtgaaacagcttttcatagtgcttgtacctatggcaagagcattgacctagtcaaatttcttcttgatcagaatgtcataaacatcaaccaccaaggaagggatgggcacactggattacactctgcttgctaccacggtcacattcgcctggttcagttcttactggataatggagctgatatgaatctagtggcttgtgatcccagcaggtctagtggtgaaaaagatgagcagacatgtttgatgtgggcttatgaaaaagggcatgatgccattgtcacactcctgaagcattataagagaccacaagatgaattgccctgtaatgaatattctcagcctggaggagatggctcctatgtgtctgttccatcacccttggggaaga

SEQ ID NO: 55251 - DNA, 361 bp, Homo sapiens
gtttattagcctgccatggtttaaaatgcgtttacaccataacatgtcgatgaaggctaatgatgggcttactacagaccagaaactgttctgggcacataggttctgtctcattttagctcaccgtctcacaaatagccacaggcagatgcagtaggctaggggatgccggggactgcatgtaggctgcctaaatttacatccgggtccctcaacctgtgcagcctgggccaagtcacttaatctcgtagtgtctcggttttctccactgggaaacagggacaatgatgttgtctttttgttagggttgttaagaagcctggacatcatagacagtgtatacatatttgatagcctcatt

SEQ ID NO: 55252 - DNA, 404 bp, Homo sapiens
tgccgccctgccactatgtcccgccgctctatgctgcttgcctgggctctccccagcctccttcgactcggagcggctcaggagacagaagacccggcctgctgcagccccatagtgccccggaacgagtggaaggccctggcatcagagtgcgcccagcacctgagcctgcccttacgctatgtggtggtatcgcacacggcgggcagcagctgcaacacccccgcctcgtgccagcagcaggcccggaatgtgcagcactaccacatgaagacactgggctggtgcgacgtgggctacaacttcctgattggagaagacgggctcgtatacgagggccgtggctggaacttacgggtgccactcaggtcacttatggaaccccatgtccattggcatcactt

SEQ ID NO: 55253 - DNA, 393 bp, Homo sapiens
cgactcacctggaaaacagagcacctacctccttcaaatgagaagagaagtaaaggagtataaggccatcagaacagtacctggcccaagggaggctatggaagtgcttgttgaataaaaaaatggcttcatctctggcctagccccaaaggtttgagttcctgccattgccacccagacagccctgggtggaggccctgctgacattgaagagtgcctgccctcctcccctcaatgcggtagacactttccaaaacttacgtcatcctcactctcactccagtgggataatgggaggcttggtgtacctcattcccaagatgagggaacaggctctgagaggaccacatcgccagcaagtgacaggctgggaccaaggccaggcctgtctgc

SEQ ID NO: 55254 - DNA, 318 bp, Homo sapiens
gctcacagggtgaccatgaggaccagtcacagtgatgtgtgaaagggctcgctggtcacagaaacgtgtacaaatcatgctattttagagatcagccctcaatttgtaaggcatgtgaacagggcacgcggtgggctggtggtttcatagccgacacacagcgcctaccatgtgcagctgcctgtccgaccccatcttacagacgagaaaaccagcacacaggcaccaaggaactgtccggaactaacagcaggggccggcgatgggagtcaaacccaggcacgcggcctggcctgcatgctgagccacatggtgctg

SEQ ID NO: 55255 - DNA, 320 bp, Homo sapiens; identical to SEQ ID NO: 39809

SEQ ID NO: 55256 - DNA, 573 bp, Homo sapiens
  misc_feature (1)...(573): n = a,t,c or g
ttttttttttttttactttttaaaaagcatttattaagctcctctaaatgaaaaggatactgtggagaaatggaaaactgctgggaaaaaactactagaaaaaaggttgctgccacccagtgccttgctatcaacggaagtcggactcaggagggctgcaggagtttgggaaagcagcgaagttgtaactgagaccatctgccacataagctggccaggtgctaacccctggctttaggagctctgcccttgctggaaagggagagaagctggagcaaacgttcctcatccttccatgagtcactgctcagattactgtgtggaacttcccagtagcaccaggttaacagtgggactgttattccggaggaactggattcctttgcaatagggcaggtgccactcagtggtggagtcttgttacctaaaaccggcacaccctgacataccacactctgcccagcacagggcctggcacaccgacgctcggtgcgtaggtgtggaactagcgagggatttcttgctggattgtcactccctgatgttttccatgtggactggangtcatcccaa

SEQ ID NO: 55257 - DNA, 525 bp, Homo sapiens
ctgctaacccccccgtgctttctctgattgctgtttagtgtggatccttcacctgtgggtgagtctaagcaccgcccaggtcagtcttcagctcctgctcctccacctcgtcttaacccctccgcctcctcgccaaacttttttaagtacctaaaacataattccagtggagaacaaagtgggaatgctgtgccaaagagcatctcctaccgtaatgccctgcggaaaaaacttcattcttcttcctctgtgccaaattttctaaaatttctggctcctgtagatgaaaataacacctctgattttatgaacacaaaaagggactttgaatccaaagcaaaccatcttggtgattctggtgggactcctgtgaagacccggaggcattcctggaggcagcagatattcctccgagtagccaccccgcagaaggcgtgcgattcttccagcagatatgaagattattcagagctgggagagcttcccccacgatctcctttagaaccagtttgtgaagatgggccc

SEQ ID NO: 55258 - DNA, 327 bp, Homo sapiens; identical to SEQ ID NO: 44116

SEQ ID NO: 55259 - DNA, 343 bp, Homo sapiens
gtttctttgaggtaactgctttccactttttgtagaggaggaatttgaattgagagagagtaagtgacttgctgaaaaagggttaatcaacagcagagctgggatttgaacccataactctgtcaaagcctccactcctaactcctgttcatgctcctgtggagaaaatgcttgtagtaacatattttaaatgtactaacaagaccagtcatgggaaaatgtttctgagacaaatctctagtttatgatttaaaacagtacgttttcttacgtgacgaaaacaaaaagtgtgttaatttgttcccagtggttgaagttatttgccaacaattttactgtttct

SEQ ID NO: 55260 - DNA, 470 bp, Homo sapiens
  misc_feature (1)...(470): n = a,t,c or g
gagttganaccttatgacangattacgaatttaatacgactcactatagggaatttggccctcgaggccaagaattcggcacgagaactggaagaaaaagatcaagctgatgaggttaggatacccaggccctttggacttaaagatcactagtgtctaaattccatcgatggcatttcagtctataggtaaacttcctggaagctggatttggagacagtttatcatctgattattgggctttcgtataggtccttagggagcagcttacctgaaatgcatttagtgtacaccagtctgtaaacttcaacctgtaatgaaagtgtaataaatgtacattgagttgatgtgataatgtgatataataagaaatatatatttgatcttcctatctagttccttgttcagagctcctaaaacccttgtaatttccaaagtgatggagtacatcttttgntctagtatttggc

SEQ ID NO: 55261 - DNA, 1216 bp, Homo sapiens
cactttggagttgttttttagaaagctgcagtttgtgaatttctcttgctttttaaaacagaatatttccaaaacttgggcatcaatgcttggtctttttaggtgggggatagaagactgggccatcttcacagactctcagaccccggctctcggcggccccatttgccagccagacttcctgcttgggggacggctgctcccccggctcggtgcagttttgcagctgctggtcttgcttagtgaggcacagttctatctgaccaattgtctgtacttcctcatcctggcttggtggaaggcactggattttgggtatcactccatatactctggcaagggcatctttaaaatctgcaacttggtagtaattgatggatggttttatccccaattttagaagcacactgttgaggtccagctccctgtagagttccaggcttctgccaaagtacttcttctgggagttgagcgcatccacctgggcggcgcaggtcccatgcttttcccactcatgcttccagaagcggctgcgattgggaaacgagtgaattacgtcaggccagtatgccctcatttctggcaaaagatccttaatctcttctaaattgaagggccacgatctattacatccttcacttttatcgggccatagtccatgtattgtccagtaatccggagggtctctacagtcgttttgaattttctcgcatactgtctcaggccagtgctgaaccataattagttttttccactcatggttgtcacgcaggcgcttgtccgcaccgcccaggcaaagcaacgccaggcagaggcagcccagcagggccccgcgcagggctgcagggcgcatggtgccgacctgcggagagaacgctgcacagctgccgctccggctcccacttcccacctgctgcccgaggaagacttccgggagaaacgctgtctccgagcccccccgccgccgcgctccctcggctgcagcagcggccaccgggtgcgcccggagccctgggacggcctaaaccagtagtctcgcgggccccgcgccgggctccgggaatggccgcagcagccctggagacccgggcccctcggagctccccttcaggatcgtgcaccaagcgcgcacgtcccgggctccgtcgcgacccacagcgaccccagctcctccgcgctgcagccgccgtccgcccacgaccacggtcagtcgccg

SEQ ID NO: 55262 - DNA, 570 bp, Homo sapiens
gggtccggcccaggagaaggaagtcgctgaaggcagtggccatgctggccgtggaaatgggaggcggttgcagggggtctatggggcccggtcctggatactcggcaggaagccgtgtctgcagaggctcctccctgcctcaggtggccccgttcaaccccagccgtgcccatctcctgccaccgcctgtcggtgggggtttaaattcggtgtggctttctggggtgcagctcagcacccccccttatgcagactgggagggggtcgggcagtcccctcagccacgaggaccctggatgggttctagttcacttgggaccgtggggccctggctgcgtactgagtgggtgccccacagtcaaggccaacgggggctccccctgctctgagatgttgggagaaaggcggcttctggaaccttccgtggggacccgtaagtggctgtccagaaaggcgggagggtgggcacggggcacggggggcagctggggtcgtcgttaagggtcacgcatctgtacagttgaatttcctttctcttatcatgtttttacccaccttgtcccctttttt

SEQ ID NO: 55263 - DNA, 540 bp, Homo sapiens
tatagctcggtgaccctttgttcaaccgctgaggtttgatttcttaccctttcttctccccattttcatactcttcccagggattagtgatggaggtgaggtctccctaatcatggtaaagtgttaaccttccacctcctcccttccctcctccttcctcatccttctgtcttcctcaattctccgtctcttttttttcatcactgattgccttgtgtccctccaagtctacttgttactatccatctccaggctctgggccgtgtagacactaaacctcatgccctaaggacaggaggaaagaccctctgtttggagcattattagtagagtgaggatcccaccagttctgcctggcttcctccatccccagaggcactaaaagcagtattttaaggttggtgtcttactccctggaagcctgaaatgggtggaatagcggtaaggcttgagtaaaactaggggacagaggttcttatttgtcgattttattttataatttgaccacagcatctgaactccctctctccctggaataag

SEQ ID NO: 55264 - DNA, 419 bp, Homo sapiens
ttcacattagagagcaagtctatgaatgtagtaagtgtggggaactctagcgcacagtcatctttcattcaacattgtacagttcacagtggagagtaactgattagtctataaattcttcacagttatacattatatgagagtcatactcgtgagaaatgagtcactttatggttttccttttggagattcagctcttaagggatttcactctcccagtgagctgctaactaaaggcaggctgctgaagtatatagcagcaatcccacaatagcacaccttgcttcagattcagaggatgagcccccttcttgagccctgtagatatgtgaaacttaattatttaagatgcatttcatggcaccagaccctaaggtacagttaggtatttcactggagaccacttactttgctttgct

SEQ ID NO: 55265 - DNA, 1368 bp, Homo sapiens
gaatccatctgagtttgcacagtcagtaaaatccttgctggaagcacagaagcagtccattgagtctggctccatagctggtggggagcacctctgttttatgggcagtggcagggaggaagaagacatgtatatgaacatggtcctggcacactttttacagaaaaacaaagaatatgtgagtattgccagtggaggatttatggcactgcagcagcacctggcagacattaatgtggatggaccagaaaatggatatggccattggattgctagtacctcaggctcaaggagcagtatcaattctgttgatggtgaatctcctaatggctcaagtgatagaggaatgaaatcactagtaaataaaatgactgtggctttgaagacaaaatccgttaatgtcagggaaaaagttatcagttttatagagaatacatcaactcctgtggatcggcatgtgagcagcagtgacagagtgggcaagccttaccgtggcgtaaagcctgttttcagcattggggatgaagaagaatacgacacagatgaaattgacagttcttcaatgtcagatgatgatagaaaagaggttgtaaacattcagacttggataaacaaaccagatgtcaaacatcattttccttgtaaagaagtaaaagaaagtggacacatgtttcccagtcatctgttggttactgcaacacatatgtactgtttaagggagattgtttcacggaaaggattggcttatatacagtctcgacaagcgctgaattctgtagttaaaattacatccaaaaaaaaacatcctgaactcattaccttcaagtatggaaatagcagtgcttcaggaatagaaatcttggcaatcgaaaggtatttgattccaaatgcaggggatgcaactaaagccataaaacagcagatcatgaaagttttggatgctttggaaagttaatataaaagaaaattatataaaaagaaattaagacaaccaagagaaacatggacatatacctcctgactgaatactaactggagacctttcatttgctcatggggctgcttaaatagcaggtctaagaaagtgtaaattattataatcaatctgtggacagtaaactttttaaaaatttttcttctgcattttggttttataaaatgatgtattataaaggtcagttattaaattactttgaagtaactgaccctgtgcccttatggactaagtaagggtacagaatgcagttctgttttgaagagctgttttaagggaacatgcatcactttcgggatcaaaaacaactgtacccatacatatctgcagtgtcttcactgaaaattagagatagaattagttgaagagacttc

SEQ ID NO: 55266 - DNA, 338 bp, Homo sapiens; identical to SEQ ID NO: 35604

SEQ ID NO: 55267 - DNA, 366 bp, Homo sapiens
cgctggagcatcccagagctgatcaatccctctggaagcagggacacccctggctccataggattccattttgctgaactactggttcagaaacacaagagcctgacatctatgggaacacagagccagaaaacccaggcacagaccaggacatctccgaggtatttccagcaggtatctgctagacgcgttctctctgccagcccgctgacttgctagctgtggagcaactgcagtacgtgcccgtccctgtcaccaggggctggccatcaacagaagctgctccttccaagccggccacgcgtctactacttcatcatcctctcgggggtgcgtccatggctctccctacaatgggagcaatct

SEQ ID NO: 55268 - DNA, 328 bp, Homo sapiens
ggagtgcagtggcgcgatctcagctcgctgcaagcgattgtcctgcctcagcctcctgagtggctgggattgcaggcatgcgccaccacactcggctaatttttgtatttttagtggggacagcgtttcaccatgttggccaggatggtctcgatctcctgacctcgtgatccgcccgcctcggcttcccaaagtgctgggattacaggcattgagccatcgcgtcagcctttctatgtacttattttgtagaattccttctcatctgcttaaataaccataagtgatgagaaatctaccaagtataatatgacttttcatttgcaag

SEQ ID NO: 55269 - DNA, 295 bp, Homo sapiens
ggtgggtgggaggcaaaagctaaccaaggatctgaggcagtgcctctccaacattaaagtggctatgaatctgctgggcatcttgttaaaatgcaggtgtggattcagtaggtctgggtgaaggccaagattctgacttgtcccaggtgatgctgatactgcaggggcacaggccacgctttgagtagcagggtcaaaggaacagagcacctgtggcatggaaataaggcaatagggaaatacaattcactgccttttaccatttaaggcttgctttagaaaacacacaggtcca

SEQ ID NO: 55270 - DNA, 351 bp, Homo sapiens
ggccttgcgggccatggggagagacattccctggactctgagctgggagccattgcagaggtggcatgatctgagtcagagtttcaaggtcactgcaccaaggacagaggagaagaggcaaaggtggagctgagaggccagcaggccccagatggcagcttgaccacagtgggactggcggaggtgggagcagtgatcagggagagctgagagaggcggcttggccagcccatggttgggcctgagtgacccgtgggaggcaaggccgttggctgccctggggcaaccgtgggaggagaggcttgtggaggaagagctcggttttgcctgtgtccgacacggatgtccttg

SEQ ID NO: 55271 - DNA, 1177 bp, Homo sapiens
gggcacgtgagcgaggccccgaagccgtcgcggcggggaccatgttgcttccgaacatcctgctcaccggtacaccaggggttggaaaaaccacactaggcaaagaacttgcgtcaaaatcaggactgaaatacattaatgtgggtgatttagctcgagaagtctgatcatcggatatcatggagtctggcaagacggcttctcccaagagcatgccgaaagatgcacagatgatggcacaaatcctgaaggatatggggattacagaatatgagccaagagttataaatcagatgttggagtttgccttccgatatgtgaccacaattctagatgatgcaaaaatttattcaagccatgctaagaaagctactgttgatgcagatgatgtgcgattggcaatccagtggccgcgctgatcagtcttttacctctcctcccccaagagattttttattagatattgcaagggcaaagaaatcaaacccctttgccattgatcaagccatattcaggtcctaggttgccacctgatagatactgcttaacagctccaaactataggctgaaatctttacagaaaaaggcatcaacttctgcgggaagaataacagtcccgcggttaagtgttggttcagttactagcagaccaagtactcccacactaggcacaccaaccccacagaccatgtctgtttcaactaaagtagggactcccatgtccctcacaggtcaaaggtttacagtacagatgcctacttctcagtctccagctgtaaaagcttcaattcctgcaacctcagcagttcagaatgttctgattaatccatcattaatcgggtccaaaaacattcttattaccactaatatgatgtcatcacaaaatactgccaatgaatcatcaaatgcattgaaaagaaaacgtgaagatgatgatgatgacgatgatgatgatgatgactatgataatctgtaatctagccttgctgaatgtaacatgtatacttggtcttgaattcattgtactgatattaaacatgcatgctggatgttttcaagttgtgttttagaaaactaataataatgagtaaacacagttaccatacttttcaattgaaatgaaggtttttcatcagccttaaaagtgtaagaaaaataaagttgtcattcattcgat

SEQ ID NO: 55272 - DNA, 1020 bp, Homo sapiens
  misc_feature (1)...(1020): n = a,t,c or g
tgacatgattacgaatttaatacgactcactatagggaatttggccctcgaggccatgaattcggcacgaggagctttgaacaggaccagctggtggctgggggccagctgggcgagctgcacaacgggacacagtatcgtgaggtccgccagttctgctcgggctctggccaccaccttgtgcgcttctacttcctcactcgtgtttactccgagtaccttgaggatgttctggaagagctgacatatggacctgccccggacctggtgatcatcaactcctgcctctgggatctctccagatatggtcgctgctcaatggagagctaccgggagaacctggagcgggtgtttgtgcgcatggaccaagtattgccagactcctgcctgctggtgtggaacatggcgatgcccctcggggaacgtatcactgggggtttcctcctgccagagctccagcccctgnnaggctccctgcggcgggatgtggttgaagggaacttctacagtgctacgctggccggggaccactgctttgatgtcctagacctccactttcacttccggcatgcagtacagcaccgtcatcgggatggtgtccactgggaccagcatgcacaccgccacctctcacacctgcttctgacccatgtggctgacgcctggggcgtggagctgcccaagcgtggctatccccatggtcagcactggggcccagtggtccaccgggggatgccacgctatgttcctaacagcccctaccatgtgcggagaatggggggccctgcaggcagcggctcagacactcagagagactgatccacacatacaaactggacagacgcctcctgccattcggggacatggcctgggtagactggatcttgggctgggactggatgtgccgagantgcttcagggcctgcctggcacctcaggtactgggctagggtgtctgctatgcctggtattgttcttgtccattgctgtcaccaataaaggcatggaagaacagagtga

SEQ ID NO: 55273 - DNA, 162 bp, Homo sapiens
gtgagaccttgtgtcaaaaaaattaaaaaagaatcaagagatcttggtttgggcacccattttgcctcttagtgtctctaaccaactggaaactgcttaattaacctctgtgaatatcaataagatcaggataacatgaagatgaaatgcaattatgtatca

SEQ ID NO: 55274 - DNA, 116 bp, Homo sapiens
tcccgccactactctcttaataacctttgtgaagagagtgtcttcctgctctgtcaacaaagggcgggggagtgggctatacagatgacacatagtaaatcccagtgcaacactcc

SEQ ID NO: 55275 - DNA, 951 bp, Homo sapiens
ctttgaagctcaggaaagaagagaaatccactgagaacagtctgtaaaggtccgtagtgctatctacatccagacggtggaagggagagaaagagaaagaaggtatcctaggaatacctgcctgcttagaccctctataaaagctctgtgcatcctgccactgaggactccgaagaggtagcagtcttctgaaagacttcaactgtgaggacatgtcgttcagatttgggccaacatctcatcaagccctctgtagtgtttctcaaaacagaactgtccttcgctcttgtggaatagggaaacctgtgggtacccagggacatgtccttgtgtgcccgctgcggccagtggagcgcttccatgacctgcgtcctgatgaagtggccgatttgtttcagacgacccagagagtcgggacagtggtggaaaaacatttccatgggacctctctcaccttttccatgcaggatggccccgaagccggacagactgtgaagcacgttcacgtccatgttcttcccaggaaggctggagactttcacaggaatgacagcatctatgaggagctccagaaacatgacaaggaggactttcctgcctcttggagatcagaggaggaaatggcagcagaagccgcagctctgcgggtctactttcagtgacacagatgtttttcagatcctgaattccagcaaaagagctattgccaaccagtttgaagaccgcccccccgcctctccccaagaggaactgaatcagcatgaaaatgcagtttcttcatctcaccatcctgtattcttcaaccagtgatcccccacctcggtcactccaactcccttaaaatacctagacctaaacggctcagacaggcagatttgaggtttccccctgtctccttattcggcagccttatgattaaacttccttctctgctgcaaaaaaaaaaaaaaa

SEQ ID NO: 55276 - DNA, 342 bp, Homo sapiens
gctttgacttgatggtgaacaaaaaaagagcattattttgtataaatcactatggctcatatagatgttaaatttttaggtttattactggccagatatcttctgtattgaaattcaactttgtaacaaaaaaacagtattttttctgtgcacagctaaagctcagagggaaaaaatgtcaaatcttatatagcatagcatagttgaaaaagtattttatatttttattctatttatcatgtctttatcacagcttagtgacatgtggttattgtccacctttttttttcttttgcaagtgaagactaaacctcatttctttgcattgagatagaaaatgac

SEQ ID NO: 55277 - DNA, 1221 bp, Homo sapiens
tttttttttgatatttaaaaataaactttattaaagcagttaaacttagcattaaataacactctttaaatggtacacctatgaagcaagagttaaatataaacccagtctaatcctgtacacttgtgattaattgtgacaatcttaagttgctcacttctttcccatttaccaattcagagaaagcccgtttcctgttttctcctcaccactttgccttggcatcacaccaaccctgcctcgggcttcagctgcagatcctccccagcccctcctcccagctgggctgactccagtcccagccccagtctccaccaactgagcagcgtacgcagggttgtgtctggcttccagcatctaccaccccttcagagcaacttccaacatgggacaggagaggaagctcgcattgcttggtctgaacagatttaaggaggttttatcacaaggacctgaaaacttcctaagcatgctttctccttgcacagctgaggaggggcaatggtgggagcggggcaggggggtggcaggggcggcaggggctctcaactaagggctctgaatcacagaggggacagatgctgccttagtccttcttgcctcccagggccaggcttcttgtgaggagcttccctggggctggagggggtcagtgtggagactgtgggggattccagcttcactctgtctaagagggtcttcttaagggcagctggggagatcttttcttggtcggccatggactgtagctctcgtgttcggatacaggaggcctcaactgcattgatgagcagagagcggaagcccccactctctagaaagtgcagggcgtggatggtggctcccccaggggagcagacattgtccttaagctggcatggatgctgctccgagtccagcagcatcttggcagctcccagcaaagcctgggccccgagttggattgccaggcgccgtggcaaacccatcttcaccccaccatcagccaatgcgtccagagccatgaatgcataggcaggcccgctgccactgagccccgtgacggcatcgatgaggtcctcttccacctcagtgcagaagcccacgctgctcatgagctgctccaggagctgcccatcctccaccagggcatgggtgcccgtggcgtacactgtagcgccttcctgcactaccacaggtgtgttggtcatgcagcgaatcactttgggggctggctggaat

SEQ ID NO: 55278 - DNA, 1607 bp, Homo sapiens
ccttgggatctgctgtgggatagagggtggcaatcccatcccagtggctcagatgggtattaagaaatggagagaaaaataagcagaatccaccttgtttctgaacccagtataactcattttctacaagtatcttgggagaaaacactggaatctggttttgttattacacttactgatggtcattcagcatggactgggacagtttctgaatcagagatttcccaagaagctgatgacatggcaatggaaaaagggaaatatgttggtgaactgagaaaagcattgttgtcaggagcaggaccagctgatgtatacacgtttaatttttctaaagagtcttgttatttcttctttgagaaaaacctgaaagatgtctcattcagacttggttccttcaacctagagaaagttgaaaacccagctgaagtcattagagaacttatttgttattgcttggacaccattgcagaaaatcaagccaaaaatgagcacctgcagaaagaaaatgaaaggcttctgagagattggaatgatgttcaaggacgatttgaaaaatgtgtgagtgctaaggaagctttggagactgatctttataagcggtttattctggtgttgaatgagaagaaaacaaaaatcagaagtttgcataataaattattaaatgcagctcaagaacgagaaaaggacatcaaacaagaaggggaaactgcaatctgttctgaaatgactgctgaccgagatccagtctatgatgagagtactgatgaggaaagtgaaaaccaaactgatctctctgggttggcttcagctgctgtaagtaaagatgattccattatttcaagtcttgatgtcactgatattgcaccaagtagaaaaaggagacagcgaatgcaaagaaatcttgggacagaacctaaaatggctcctcaggagaatcagcttcaagaaaaggaaaattctaggcctgattcttcactacctgagacgtctaaaaaggagcacatctcagctgaaaacatgtctttagaaactctgagaaacagcagcccagaagacctctttgatgagatttaacagtctcaaaaaatactttgatgttcactagactatgttttctattcatttctttaaaatgaaaaaggagaatttcaagtcagcagccgctattaccgtatcttacaatttaattacatacacagtgaattgaaaccattgtgcaaaatggattacacatgtatacaaagatacgatttgatgatgacactggcacattattctaaactattcattcagcatgcctataattacataaattgtatgagactttttgttgcaaaggacacatttatcatattcattcacacatattatatgtgatagctgtccaacatcctgtctgggaagattttgaaaacaggacaaagaaaacatcattttaaaatgtcttcagctttttttgaatagacgtattcaaacatattctgaacattgatgtttgaacattttaatttgtgtgatgatgtagaaaatataattttagtttgtacataaacattgtgaaaatctgataataaaatttttgatacattgaaaaaaaaaaaaaa

SEQ ID NO: 55279 - DNA, 358 bp, Homo sapiens
  misc_feature (1)...(358): n = a,t,c or g
gaaccttcggcctgcctttcttgcctctgcttttcccacattctttacaaataattcccacgtaacagctatccgtcttctaagagcagacattagattgtgccattcccctgcttattaaaaataacaaacaaacaaaactgatgcttgagcacacttagactaaaatccatacttttttcatggccagagcaaggcagtacttgatctggtctctgcttaattcttcaacttcatctcctagtactcgcctttctctcccactgccccttttataatcgggttattctgtcctattcttctagctcgccagtacagcattattctggccacaagactttgtacntgctgttccttt

SEQ ID NO: 55280 - DNA, 3154 bp, Homo sapiens
  misc_feature (1)...(3154): n = a,t,c or g
agcggtcgtgttgccatgggccggaggagagccccggccggtgggtcgctgggacgggcccttatgcgccatcagactcagcggagccgaagccatcgtcacactgactcctggttgcacacaagtgaactcaatgatggctatgattggggtcgtcttaatcttcagtcagtgactgaacagagctcccttgatgacttccttgctactgcagaacttgcaggaacagagtttgtagctgagaaacttaatattaagtttgtgcctgctgaggctagaactggactactgtctttcgaggagagccagagaattaagaagctccatgaagaaaacaaacagttccttgttgtataccgaggagaccaaacctggaaccaaaatactaccccagaagaactcnaacaagcagagaaagataactttctagaatggagacgtcagctttgtccggctagaagaggaacagaagctgatattgactccatttgaacgaaatttggacttttggcgccantctggagagtcattgagagaagtgatattgtggtccagatagtagatgctcgaaacccactcctgtttagatgtgaggatttggaatgttatgtgaaagaaatggatgccaataaggagaacgtcattctgatcaacaaggcagacttgctgactgctgagcagcgngagtgcctgggccatgtacttccgaaaaagaagatgtgaaggttattttctggtcagctttggccggagccattcccctgaatggtgactctgaggaagaggcaaacagagatgatagacaaagcaacacaaccaagtttggacattccagtttcgaccaggctgaaatttcccacagtgaatccgaacatctcccagctagggattctccttcacttagtgaaaatcccacaacggatgaagatgacagtgagtatgaggactgtccataggaggaggaagacgactggcagacgtgctcagaagaagacggtcccaaggaagaggactgcagccaggactggaaggaaagctctactgcagattctgaggctcggagcaggaaaaccccacagaagaggcagatacacaattttagccatctggtatccaagcaggagttactggagctctttaaggagctacacactgggagaaaggtgaaagatgggcaacttacggtcggactggtgggctaccctaatgttggtaagagttcaacaatcaacaccatcatgggcaacaagaaagtatctgtgtctgccacacctggtcacacaaagcactttcagactctctatgtggagcctggcctctgcctgtgtgactgtcctggcttggtgatgccatcttttgtgtctaccaaggcagaaatgacttgcagcggaatcctcccaattgatcagatgagagatcatgttcctcctgtatcactagtttgccagaatattccaagacatgttttagaagctacctatggcattaacatcataacgcctagagaggatgaagatccccaccgacctccaacatcggaagaactgttgacagcttatggatacatgcgaggattcatgacagcgcatggacagccagaccagcctcgatctgcgcgctacatcctgaaggactatgtcagtggtaagctgctgtactgccatcctcctcctggaagagatcctgtaacttttcagcatcaacaccagcgactcctagagaacaaaatgaacagtgatgaaataaaaatgcagctaggcagaaataaaaaagcaaagcagattgaaaatatcgttgacaaaacttttttccatcaagagaatgtgagggctttgaccaaaggagtccaggctgtgatgggttacaagcccgggagtggtgtagtgactgcatccactgcgagctctgagaacggggcggggaagccctggaaaaaacatggcaacagaaataaaaaagaaaaaagtcgtagactctacaagcacctggatatgtgaggttgggctgcaacagaaatgtcatctgcattgtgcagatggaaaagagcagaagctgcctgttgcctgtggaactgtcccaagacactagcactgtagaacgggccctgctcttgcagagcacggctgcacccaacagtctccatgtcaagaccaagggcctcctggaaacaccaactctgacaaaaaggagtcatctgggagcccgagaatcctactcctggccgggcacagtggctcacgcnnnnnnnnnnnnnnnnnnnnnnnnnnnnnnnnnnnnnnnnnnnnnnnnnnnnnnnnnnnnnnnnnnnnnnnnnnnnnnnnnnnnnnnnnnnnnnnnnnnnnnnnnnnnnnnnnnnnnnnnnnnnnnnnnnnnnnnnnnnnnnnnnnnnnnnnnnnnnnnnnnnnnnnnnnnnnnnnnnnnnnnnnnnnnnnnnnnnnnnnnnntttgcaagggatggttcacgagacacatttgggacgaaggtgaaagagaaattccccattctgagtgtcctagttgggttcctccgactctaaacaagggacttgggttcagttagtgtacagcgggggctcacgtccactaaggaacatgtagaatgtaaccaccgggtgacagggaagctgcggtatttactacctagcccccatcttcactggttattccacttatttaaaatgtccagaataagcaaatctccatatagaggaagtagattagtggttgcttcgggatgggaggaatgggaagattgaggtctttcttttgcagtgataaaaatgtcctaaaattgactgtagcgatggtcacacaactctgaatatgcttaagaccattgaattacacactttacgttggtgaattgtatggtatgtaaattatagttcaataacatagttacaaaagataatcaaaagcatgaaagcactgttgatgtggtttggatctgtgtcctcaccgagtctcatgttgaaatgtaagccccctggtgggaggcgatgggattatggggcagagtcctcacaaacggtttagcaccacccgctcagtgctgttctcctgatattgagtcctcatcacatctggttgcttcaaagtgtgtggtgcctcccctctatctccctcctgctctggccatataagatgtgcctgg

SEQ ID NO: 55281 - DNA, 340 bp, Homo sapiens
gccatgggcaaggccgccatgggctcctgcagcaagtggaccatgtactcatctcaaggctatagaggctctgtagcctgcagggccacattaacaacattcacagaagaggctcctggtgactccattccaaagccaggatactttagcttcttgaacttttatgtcataaggtcagaaatttaccaaaggatgcttttccttacttagtgaatcttatggctccttttagaaagcgtgggaacaaccaaggtcagaatatgatgtttgagtgtaaccaaattctcctactgcccctggagcttaaagcatctgggccacatgggaatgtgcactctta

SEQ ID NO: 55282 - DNA, 187 bp, Homo sapiens
cagcttctgggaggcttcagggagagcccacactgcagggggtttaaacttgagtaagagacgagaaggttgttgttgaatgcccttcagatagactttctccacctgccccagctctgcctgaagggccaccaaccacatctgtgcccactgcccaaggcacgagctggggaaatttggggcagac

SEQ ID NO: 55283 - DNA, 647 bp, Homo sapiens
  misc_feature (1)...(647): n = a,t,c or g
ctcctcttccaccagaagacacactcaggggagaagcctttcatctgtagtgaatgtgggcaaggatttatctggaagtcaaatcttgtgaaacaccagcttgcacattctggcaagcagccttttgtatgcaaggagtgtgggcgaggcttcaactggaagggaaatctcctcacacaccagaggacacactcaggggagaagcccttcgtgtgtaatgtgtgtgggcaaggcttcagctggaagagaagtctcaccagacaccactggcggatacactcaaaggagaagccttttgtttgccaggagtgtaagcgaggctataccagtaagtcagacctcactgtgcatgaaagaatacacacaggagagaggccttatgaatgccaagagtgtggacgaaagtttagcaataagtcatactacagtaagcacttcaagagacacttacgtgagaaccgtttttgtncagggagtgtgggtgagncttcatcttgaagttanatctccccatccatcagaggacacactcaggagagtaacttttctttttaccacnctttagctgaggctccataacttgttcgtgtagatataacagaggcagacagaatccagagggcttccagngaaggngcnnnnaaggc

SEQ ID NO: 55284 - DNA, 380 bp, Homo sapiens
  misc_feature (1)...(380): n = a,t,c or g
gtggctttcaactgcaaataagttaaagaatatttttctataggttaaatattcttttttgtcttatttaaacttactgttcttaatttctgtgggtacatagtatgattttaattaccttattttattctttgtgctattcataatttttctcgtttgtttggnnnnnnnnnnnnnnnnnnnnnnnnnnnnnnnnnnnnnnnnnnnnnnnnnnnnnnnnnnnnnnnnnnnnnnnnnnnnnnnnnnnnnnnnnnnnnnnnnnnnnnnnnnnnnnnnnnnnnnnnnnnnnnnnnnnnnnnnncactacttgttcggggtttttttgggagtggagttcgctcttccaccaggtggagacagtgcatatcgggctaagaacc

SEQ ID NO: 55285 - DNA, 419 bp, Homo sapiens
  misc_feature (1)...(419): n = a,t,c or g
gtgctcccatgagaatcacttgaacctgggaggcagaggttgcagggagccaagatcatgccactacactccagcctgggtaacaagagcgaaactctgtcttaaaaaaaaaaagtgttggcaaggatgtggaaaaaatgaaacaactgtattcactgctggtggaaatgtaaaatgatcactgtggaaaatcgtttggtggttcctcaagaaattaaatagaattactatatgatccagcaattccactcctaggaatagacccaaaagaattggaagcagggtactcaaatatttacacatgaatgttcatatcagcactagtccccattannggtngaacacctggtnccaangggtcacccngtntcccaacactttgggagggcnaagtgggaggatgcnnnaccncagggatt

SEQ ID NO: 55286 - DNA, 664 bp, Homo sapiens
ccagaacacggcaactgcatgtgcaccagtatcacattatcgagctgttgaaagtgtggattcaagtgaagaaagtttttctgattcagatgatgatagctgtctttggaaacgcaaacgacagaaatgttttaaccctcctcccaaaccagagccttttcagtttggccagagcagtcagaaaccacctgttgctggaggaaagaagattaacaacatatggggtgctgtgctgcaggaacagaatcaagatgcagtggccactgaacttggtatcttgggaatggagggcactattgacagagcaagactttgtctcaaaaataataatagtaaaatgttacatgtgcatgaagttttaaattactcatttttattaatgaagaaaataaggtagtttagacattccaagagttaactatagtttacaaaaatatattaagcaaaaatatgcttgatatattaagcagaaatgttgtatattaagcaaaaatgtaaaattcagcaattataaactgttccttacagacagtgtacttgaagtcttttggtagttctgagaatgtggtcattgaagttggatctaagaggaaagtggttatcggttgctttttatttataaaggatgcaaaaataaaattagatttttggcaaaaaaaaaaaa

SEQ ID NO: 55287 - DNA, 688 bp, Homo sapiens
aaataaagaaaaacctttccatccaacttgaagaaaaatcagaaagtatttttctccatggaccattattctatttgaacctaacctgaattccctcatagtcaaaacctgccatgatgatgtgaattcatttccgcatagtcggaataatttttgctccaaattcttaaaggagacaatgaattagtagcttgtaaattttgcagatctgggccttcaataacttagtagaagggcaataaaatagaggggaaaaatggggactgtgggattacaactgttcaaatttcatcttaatttcttctatttttctcaaccatatttcttctatttttacaatcattattaaaatatttcccctaaagaaataacaaagggtaaaggtattgaaagtcacatttcctttatcctgaacaagtattaagattgtcccatcatttcaagacaaaggttttcttaacagtgaaaatcacaggaagaaagtaatcagtattttcatagataccaatttatatggtagctgcctgttttttcacaatttcaaaataagtcagtataggataaacaaaagttaacagagaaattcgtcccttttgaagttttaatttttttcaagtattttatacccctttgactacttcatctgttagaatttaagacccctgaggtacataacagaaaagtccaa

SEQ ID NO: 55288 - DNA, 354 bp, Homo sapiens
ggagatttaatgagaggaagtatggtttactacagtgggtctggctgggtgaccttgcctgagtgctgtaacttccctaattcattgtattcttagctgtagaatggagctggtttataggacctacttccagtgttgtggtcgtagccagtagcagttagtacagtgtctagcacataataagcacttcataaatggtagctgttgttaatagtattttgttttgtgttatgctaaagtacttgatacattaggtagttcatcatcattatgtgcccaatatgatgccaagtacgagtacttagtaggtactcagtttatattcattccctctccctttcctcattaattctg

SEQ ID NO: 55289 - DNA, 421 bp, Homo sapiens
  misc_feature (1)...(421): n = a,t,c or g
ggcggctctcgcctgggctgtttcccggcttcatttctcccgactcagnttcccaccctgggctttccgaggtgctttcgccgctgtccccaccactgcagccatgatctccttaacggacacgcagaaaattggaatgggattaacaggatttggagtgtttttcctgttctttggaatgattctcttttttgacaaagcactactggctattggaaatgggcttctttcctgtcgttgttggctttattagaagagtgccagtccttggatccctcctaaatttacctggaattagatcatttgtagataaagttggagaaagcaacaatatggtataacaacaagtgaatttgaagactcatttaaaatattgggtatttataaagncatttgaagaatattcagcacaaaattaaat

SEQ ID NO: 55290 - DNA, 7076 bp, Homo sapiens
  misc_feature (1)...(7076): n = a,t,c or g
tggaatttgatccggaagaattttactacctattggaagcagcagaaggccatgccaaagaaggacagggtattaaaaccgacattcccaggtacatcattagccaactgggactcaataaggatcccttggaagaaatggctcatttgggaaactacgatagtgggacagcagaaacaccagaaacagatgaatcagtgagtagctctaatgcctccctgaaacttcgaaggaaacctcgggaaagtgattttgaaacgattaaattgattagcaatggagcctatggggcagtctactttgttcggcataaagaatcccggcagaggtttgccatgaagaagattaataaacagaacctcatccttcgaaaccagatccagcaggcctttgtggagcgggatatcctgacttttgcagaaaacccctttgttgtcagcatgtattgctcctttgaaacaaggcgccacttgtgcatggtcatggaatatgtggaagggggagactgtgctactttaatgaaaaacatgggtcctctccctgttgatatggccagaatgtactttgctgagacggtcttggccttggaatatttacataattatggaattgtacacagggatttgaaaccagacaacttgttggttacctccatggggcacataaagctgacagattttggattatctaaggtgggactaatgagcatgactaccaacctttacgagggtcatattgagaaggatgctagagagttcctggataaacaggtctgtggcacacctgaatacattgcaccagaagtgattctgaggcagggttatggaaagccggtggactggtgggccatggggattatcctctatgaatttctggttggatgcgtgccattctttggggatactccagaggagctatttggacaagtcatcagtgatgagatcaactggcctgagaaggatgaggcacccccacctgatgcccaggatctgattaccttactcctcaggcagaatcccctggagaggctgggaacaggtggtgcatatgaagtcaaacagcatcgattcttccgttctttagactggaacagtttgctgagacagaaggcagaatttattccccaactggaatctgaggatgacacaagttattttgatactcggtctgagaagtatcatcatatggaaacggaggaagaagatgacacaaatgatgaagactttaatgtggaaataaggcagttttcttcatgttcacacaggttttcaaaagttttcagcagtatagatcgaatcactcagaattcagcagaagagaaggaagactctgtggacaaaaccaaaagcaccaccttgccatccacagaaacactgagctggagttcagaatattctgaaatgcaacagctatcaacatccaactcttcagatactgaaagcaacagacataaactcagttctggcctacttcccaaactggctatttcaacagagggagagcaagatgaagctgcctcctgccctggagacccccatgaggagccaggaaagccagcccttcctcctgaagagtgtgcccaggaggagcctgaggtcaccaccccagccagcaccatcagcagctccaccctgtcagttggcagtttttcagagcacttggatcagataaatggacgaagcgagtgtgtggacagtacagataattcctcaaagccatccagtgaacccgcttctcacatggctcggcagcgattagaaagcacagaaaaaaagaaaatctcggggaaagtcacaaagtccctctctgccagtgctctttccctcatgatcccaggagatatgtttgctgtttcccctctgggaagtccaatgtctccccattccctgtcctcggacccttcttcttcacgagattcctctcccagccgagattcctcagcagcttctgccagtccacatcagccgattgtgatccacagttcggggaagaactacggctttaccatccgagccatccgggtgtatgtgggagacagtgacatctatacagtgcaccatatcgtctggaatgtagaagaaggaagtccggcatgccaggcaggactgaaggctggagatcttatcactcacatcaatggagaaccagtgcatggacttgtccacacagaagttatagaactcctactgaagagtgggaataaggtgtcaatcactactaccccatttgaaaacacatcaatcaaaactggaccagccaggagaaacagctataagagccggatggtgaggcggagcaagaaatccaagaagaaagaaagtctcgaaaggaggagatctcttttcaaaaagctagccaagcagccttctcctttactccacaccagccgaagtttctcctgcttgaacagatccctgtcatcgggtgagagcctcccaggttcccccactcatagcttgtctccccggtctccaacaccaagctaccgctccacccctgacttcccatctggtactaattcctcccagagcagctcccctagttctagtgcccccaattccccagcagggtccgggcacatccggcccagcactctccacggtcttgcacccaaactcggcgggcagcggtaccggtccggaaggcgaaagtccgccggcaacatcccactgtccccgctggcccggacgccctctccaaccccgcaacccacctccccgcagcggtcaccatcccctcttctgggacactcactgggcaattccaagatcgcgcaagcctttcccagcaagatgcactccccgcccaccatcgtcagacacatcgtgaggcccaagagtgcggagccccccaggtccccgctgctcaagcgcgtgcagtccgaggagaagctgtcgccctcttacggcagtgacaagaagcacctgtgctcccgcaagcacagcctggaggtgacccaagaggaggtgcagcgggagcagtcccagcgggaggcgccgctgcagagcctggatgagaacgtgtgcgacgtgccgccgctcagccgcgcccggccagtggagcaaggctgcctgaaacgcccagtctcccggaaggtgggccgccaggagtctgtggacgacctggaccgcgacaagctgaaggccaaggtggtggtgaagaaagcagacggcttcccagagaaacaggaatcccaccagaaatcccatggacccgggagtgatttggaaaactttgctctgtttaagctggaagagagagagaagaaagtctatccgaaggctgtggaaaggtcaagtacttttgaaaacaaagcgtctatgcaggaggcgccaccgctgggcagcctgctgaaggatgctcttcacaagcaggccagcgtgcgcgccagcgagggtgcgatgtcggatggcccggtgcctgcggagcaccgccagggtggcggggacttcagacgggcccccgctcctggcaccctccaggatggtctctgccactccctcgacaggggcatctctgggaagggggaaggcacggagaagtcctcccaggccaaggagcttctccgatgtgaaaagttagacagcaagctggccaacatcgattacctccgaaagaaaatgtcacttgaggacaaagaggacaacctctgccctgtgctgaagcccaagatgacagctggctcccacgaatgcctgccagggaacccagtccgacccacgggtgggcagcaggagcccccgccggcttctgagagccgagcttttgtcagcagcacccatgcagctcagatgagtgccgtctcttttgttcccctcaaggccttaacaggccgggtggacagtggaacggagaagcctggcttggttgctcctgagtcccctgttaggaagagcccctccgagtataagctggaaggtaggtctgtctcatgcctggagccgatcgagggcactctggacattgctctcctgtccggacctcaggcctccaagacagaactgccttccccagagtctgcacagagccccagcccaagtggtgacgtgagggcctctgtgccaccagttctccccagcagcagtgggaaaaagaacgataccaccagtgcaagagagctttctccttccagcttaaagatgaataaatcctacctgctggagccttggttcctgccccccagccgaggtctccagaattcaccagcagtttccctgcctgacccagagttcaagagggacaggaaaggtccccatcctactgccaggagccctggaacagtcatggaaagcaatccccaacagagagagggcagctcccctaaacaccaagaccacaccactgaccccaagcttctgacctgcctggggcagaacctccacagccctgacctggccaggccacgctgcccgctcccacctgaagcttccccctcaagggagaagccaggcctgagggaatcgtctgaaagaggccctcccacagccagaagcgagcgctctgctgcgagggctgacacatgcagagagccctccatggaactgtgctttccagaaactgcgaaaaccagtgacaactccaaaaatctcctctctgtgggaaggacccacccagatttctatacacagacccaggccatggagaaagcatgggcgccgggtgggaaaacgaaccacaaagatggcccaggtgaggcgaggcccccgcccagagacaactcctctctgcactcagctggaattccctgtgagaaggagctgggcaaggtgaggcgtggcgtggaacccaagcccgaagcgcttcttgccaggcggtctctgcagccacctggaattgagagtgagaagagtgaaaagctctccagtttcccatctttgcagaaagatggtgccaaggaacctgaaaggaaggagcagcctctacaaaggcatcccagcagcatccctccgccccctctgacggccaaagacctgtccagcccggctgccaggcagcattgcagttccccaagccacgcttctggcagagagccgggggccaagcccagcactgcagagcccagctcgagcccccaggaccctcccaagcctgttgctgcgcacagtgaaagcagcagccacaagccccggcctggccctgacccgggccctccaaagactaagcaccccgaccggtccctctcctctcagaaaccaagtgtcggggccacaaagggcaaagagcctgccactcagtccctcggtggctctagcagagaggggaagggccacagtaagagtgggccggatgtgtttcctgctaccccaggctcccagaacaaagccagcgatgggattggccagggagaaggtgggccctctgtcccactgcacactgacagggctcctctagacgccaagccacaacccaccagtggtgggcggcccctggaggtgctggagaagcctgtgcatttgccaaggccgggacacccagggcctagtgagccagcggaccagaaactgtccgctgttggtgaaaagcaaaccctgtctccaaagcaccccaaaccatccactgtgaaagattgccccaccctgtgcaaacagacagacaacagacagacagacaaaagcccgagtcagccggccgccaacaccgacagaagggcggaagggaagaaatgcactgaagcactttatgctccagcagagggcgacaagctcgaggccggcctttcctttgtgcatagcgagaaccggttgaaaggcgcggcgcaagccagccgcgggggtggggaagggcttccctgaggccagagggaaagggcccggtccccagaagccaccgacggaggcagacaagcccaatggcatgaaacggtccccctcagccactgggcagagttctttccgatccacggccctcccggaaaagtctctgagctgctcctccagcttccctgaaaccagggccggagttagagaggcctctgcagccagcagcgacacctcttctgccaaggccgccgggggcatgctggagcttccagcccccagcaacagggaccataggaaggctcagcctgccggggagggccgaacccacatgacaaagagtgactccctgccctccttccgggtctccaccctgcctctggagtcacaccaccccgacccaaacaccatgggcggggccagccaccgggacagggctctctcggtgactgccaccgtaggggaaaccaaagggaaggaccctgccccagcccagcctcccccagctaggaaacagaacgtgggcagagacgtgaccaagccatccccagccccaaacactgaccgccccatctctctttctaatgagaaggactttgtggtacggcagaggcgggggaaagagagtttgcgtagcagccctcacaaaaaggccttgtaacggggagggcccaggggcaggactgtggagacccgtcctgaacgggcgactgtgtcttgactacctttcaaaaccagcactgtgtgggaatgtccgccaggcagagctcggagcctcattgagacaggggagagagaaagacaaagaggggaccttcttccagatgccttcccagttgtaaccggtaaaactgttaccagatagtgtttgnnnnnnnnnnnnnnnnnnnnnnnnnnnnnnnnnnncctttacagttgagggttgttgaggaaaatgattttctttgtaaatatatagcatcgtgtttggtttgggatgtagagtctatacctggctgctgattgcgtcgtttactacagctttttttaaataagatttttgctttaccatttatcataatgtagtaatgaagcaaaatggtcaaaactgggtgtgtgtgaacagagatacacccatattcgtgtatatacacatccacctacatgttttggtctgtggtttaagagactatttcaaggttccatttttataagctaaaacattctaagttaagatggaagaaagccctaaacacagtagattctgagtttttatgtgtattttaaccagagtttctgatagtactgtatctggctacctatatttccagatctaaagcc

SEQ ID NO: 55291 - DNA, 1622 bp, Homo sapiens
tttttttttttttttttttgatttggtaattaaagtttatttgaacacaaaatactttctctgtctataaaattggctgttagcagtagcagcagcatgtcctggccaaggggagtagatttctccagactactaaagccatgtatatagccattcccacttcccatattctgtggatatgtacatgtgcatggtagctagagtccctccaccagagtatctctctcatgatggtttcttcagggagaggaagaggagacctgggtgaagagctgggatggttttgagtggggcaagccattaggctgtaccttgaagcccagtctctctggatagctgtactgcaggtgtcctctgaggcccttctctgtactctgtctgctgagggaatggggtattttgactcccatagaaagcactagcctaagtcaccaaatgactgcttggtccccactgaagcagtgtagctctccatagtatttttggtggttatggattacatgtgtggccagctcatgctttttcttgagcaggggctgtccatgacctgtgctcataccatgctttctaagttctctttggacagggcccaagcggctggcctcagcctgagtttcagagagtgtgtaggagtcctggtaatcttgaagcagtttgaccacctccagatggttgaactgcacagcatcatccatgggagtgttattccacctgtccttggggaaagggtttactttgcaggcttccagcaaaaatttaacaacttcaacatgaccttcagctgcagcaacatggagtgctgttctagaatcatagtcccgctgttccatgtccatagctgacaaagcaaatcttcgaagtgcagacacatctccagtatatgcagcaaacaaaagatttatcactgactttaccctttgatcaccaccttctcttcgaggatcaagtttttttgcaaagtgtctcaaattatcatagttatggaaattacacagagaaacaagatcgtgacaaaagtgaattcccttaacactgttgcccatcttatccagaggaggagaccagcacatcatacccataacattggggacaactaaaagaatgcccccagcaactccagattttgcaggaagaccaacatggaaagcaaactgccctgagaagtcatacatgccacaggaatgcatcaaactcaatgtatttcgaactgcttcagggctcagtactctttcaccagtaattgggcagaaaccaccattagccagtgtcgcagccatcacactggctgattcacaagtcacttcaatggagcacagctggaagtagaagtctaatataccaaccatgtctgtgccttcttggaaaacacttccttttcttttaagtaatatcctattggaaaatttcgatctccactttctctttcagacttgaaacggtggattactgattccaacatattcattaccagccatcttattcaaaaactgcatgacatagtcaaatttttcagcattatttactccttgctttattagtgaagtcacaacaattgctccagcatttaccataggattatgtggtttatcatcttcattcaaaaatagtttgttgaatcttag

SEQ ID NO: 55292 - DNA, 881 bp, Homo sapiens
ttttttttctttactttaaaatgctttattggaattattttgataaaagcaaatacttgtatataagacaaatataggaaatagaagctatctacttgaagtgccccctaattttcaggcatttttcccccaataaggtgacagctgctcacacaggataatacaggaaagttgtaagttcttaggatatgcccagcaccaggcggaagatattgtgtcagcaaattccatagcaaggaaggagaacaggcatggctctccacctctcccagcctgaaggtcaagttgcaggaatcactgtctaaggcatgacagcccatacaaaagcttctctccatggagggggagattcccaaacctttagaccttcactcaggattagtgcagaatctcctgtgaaaggtgcattgtccctggctggggcttccagagttcattccctgtaaattccagcaactttgggaagactgagtcagcaggactgcttgagccccaggaagtagagacccagcctggacaacatggcaaaagcccgcttctttactcaaggataacacggcgatgaacgtcttacaactcagttgttttgagtcagcaggggctgtggggccgctagccgagttccccctgccacgagctaggtcagttccaagcaaagacaccagaaactccagtgtgcaacggtagttcacccaactgcactggggaccgccctctcctaccccagccaggccgcgacgtggccgcccgccgggctgtgcgcaaaggcagcgcaagccgttgggatcccctgctccccctcactcaacagtcgggccattacaactctcatactgccaacccacgagcccacttcgcaaaaaaaaaaaaaaaaagatctt

SEQ ID NO: 55293 - DNA, 408 bp, Homo sapiens
agatcgtgagccaccacgccggccccatttcttaatacacattgagtgtgatgacatcatagatcaatggcaattgcaggtgtgaagaagtggaaatagcactaggcaaaaattgtcctggtgtatgttctagctttgcttggacaacttgctaagttgtaaaatgagaatacttctacgcccttttctctcccggggatgctaaagacaaaataaagattacgaatggaaattctctgagcttccaaaagaatcaggatggagcatgatctaagggagtgttctggtgaatgggaacttaacacgtctttgccgttacatattctttgatgtgcatttgcttggtgagtggaatctagaatgctcaagaaaagactttctaggacctacgccgtctcatggctggat

SEQ ID NO: 55294 - DNA, 1128 bp, Homo sapiens
ggcagaggcgagagacgccggcggggccagggccggcggccccggaggatgctgctgagccccggcactgcctggctgcgagcacatgatggcgatacgggagctcaaagtgtgccttctcggggacactggggttgggaaatcaagcatcgtgtgtcgatttgtccaggatcactttgaccacaacatcagccctactattggggcatcttttatgaccaaaactgtgccttgtggaaatgaacttcacaagttcctcatctgggacactgctggtcaggaacggtttcattcattgggctcccattgtactatcgaggctcagctgcagctgttatcgtgtatgatattaccaagcaggattcattttataccttgaagaaatgggtcaaggagctgaaagaacatggtccagaaaacattgtaatggccatcgctggaaacaagtgcgacctctcagatattagggaggttcccctgaaggatgctaaggaatacgctgaatccataggtgccatcgtggttgagacaagtgcaaaaaatgctattaatatcgaagagctctttcaaggaatcagccgccagatcccacccttggacccccatgaaaatggaaacaatggaacaatcaaagttgagaagccaaccatgcaagccagccgccggtgctgttgacccaagggcccgtggtccacggtacttgaagaagccagagcccacatcctgtgcactgctgaaggaccctacgctcggtggcctggcacctcactttgagaagagtgagcacactggctttgcatcctggaagacctgcagggggcggggcaggaaatgtacctgaaaaggattttagaaaaccctgggaaaacccaccacaccaccacaaaatggcctttagtgtatgaaatgcacatggaggggatgtagttgcatttttgctaaaaaaaaaaaaaaacctttaaaaattgttggatgtgtacaaaagtcttactgccttattatgtgtatgggattctaaagtggcattccacttggatttcctgtgctacctatccaaattccaagtaactacttcagtgtcattgcctttgttacctaaccaaccttcactgaaaggcaaatttagtt

SEQ ID NO: 55295 - DNA, 895 bp, Homo sapiens
gcagggcctcggcttccctcacgatattgcagaaagacacaggtttcctcttcctctccaaaccacctcgaagcaggggcataattggaatatcatttggagaaagtgtcatggaagttctgcgtccacagcttataagaattgatggccggaattacaggaagaatccagtccaagaacagacctatcaacatgaagaagatgaagaggacttctatcaaggctccatggagtgtgctgatgagccctgtgatgcctacgaggtggagcagaccccacaaggattccggtctactttgagggcccccagcttgctctataagcatatagttggaaagagaggggacactaggaagaaaatagaaatggagaccaaaacttctattagcattcctaaacctggacaagacggggaaattgtaatcactggccagcatcgaaatggtgtaatttcagcccgaacacggattgatgttcttttggacacttttcgaagaaagcagcccttcactcacttccttgcctttttcctcaatgaagttgaggttcaggaaggattcctgagattccaggaggaagtactggcgaagtgctccatggatcatggggttgacagcagcattttccagaatcctaaaaagcttcatctaactattgggatgttggtgcttttgagtgaggaagagatccagcagacatgtgagatgctacagcagtgtaaagaggaattcattaagctacaagaattagttgatcgagtgctggaacgttttcaggcatctggactaatagtgaaagagtggaatagtgttgaaactgccatgctacagttatggaatacacttattcagggaaagaccccaatgctggaaggcagggtacaatctctacacag

SEQ ID NO: 55296 - DNA, 414 bp, Homo sapiens
gttaatttttaataattatcacggcaggagatttttttaaaaatcaaacatacgaaactgggtagaacagcataaaataccacagcctggatttccaacaatgtcttatgaaatttaaccatctgccatgggaggtatagacccagcccagatggatggctgaatcctttccccagaacatctgtttggaacactcagaattaagtagtatcaagccgtgcattatggaaatggtgtaagggactattaggagagaggaaaggtcatgggaagggatactccatcatggctaggaactaaatgaagggaacgaagtataccagatgaaatcttagtctttcataccatgtgtgaaaaataaaagtcataagggagagaagcagaacaggaatctcaattttatctggaaaacac

SEQ ID NO: 55297 - DNA, 526 bp, Homo sapiens
  misc_feature (1)...(526): n = a,t,c or g
tttgacaacagctatgacatgattacgaatttaatacgactcactatagggaatttggccctcgaggccaagaattcggcacgagattaaagttataaacttctgtgcatcaaaggacactataaagaatgaaaacaggccaggcacagtggctaacacctgtaatcccatcactttgggaggccgaggtgggcagatcacctgaggtcaagagttcgagaccagcctagccaacatggtgaaaccccatgtctactaaaaatacgaaaactagccgggcatgatggtggatgcctgtaatcccaggtactcggaagactgaggcagaagaatcaactgaacctgggaggctgaggttgcaatgagttgagactgcgccattgcactccaacctgagtgacagaatgagactctgtctcaaaaaaacaaaaaacaaacaaaaaagcctgggcacagtggctcacacctgtaatcccagcaatttgggaggctgaggcaggcggatcacgangtcagatcaagacct

SEQ ID NO: 55298 - DNA, 1512 bp, Homo sapiens
  misc_feature (1)...(1512): n = a,t,c or g
cttgattttaaaattccttctatagctagagcttttctttctttcattctctcttcctgcagtgttttgcatacatcagaagctaggtacataagttaaatgattgagagttggctgtatttagatttatcactttttaatagggtgagcttgagagtnttctttctttctgtttttttttttttttttgactaatttcacatgctctaaaaaccttcaaaggtgattatttttctcctggaaactccaggtccattctgtttaaatccctaagaatgtcagaattaaaataacagggctatcccgtaattggaaatatttcttttttcaggatgctatagtcaatttagtaagtgaccaccaaattgttatttgcactaacaaagctcaaaacacgataagtttactcctccatctcagtaataaaaattaagctgtaatcaaccttctaggtttctcttgtcttaaaatgggtattcaaaaatggggatctgtggtgtatgtatggaaacacatactccttaatttacctgttgttggaaactggagaaatgattgtcgggcaaccgtttattttttattgtattttatttggttgagggatttttttataaacagttttacttgtgtcatattttaaaattactaactgccatcacctgctggggtcctttgttaggtcattttcagtgactaatagggataatccaggtaactttgaagagatgagcagtgagtgaccaggcagtttttctgcctttagctttgacagttcttaattaagatcattgaagaccagctttctcataaatttctctttttgaaaaaaagaaagcatttgtactaagctcctctgtaagacaacatcttaaatcttaaaagtgttgttatcatgactggtgagagaagaaaacattttgtttttattaaatggagcattatttacaaaaagccattgttgagaattagatcccacatcgtataaatatctattaaccattctaaataaagagaactccagtgttgctatgtgcaagatcctctcttggagcttttttgcatagcaattaaaggtgtgctatttgtcagtagccatttttttgcagtgatttgaagaccaaagttgttttacagctgtgttaccgttaaaggtttttttttttatatgtattaaatcaatttatcactgtttaaagctttgaatatctgcaatctttgccaaggtacttttttatttaaaaaaaaacataactttgtaaatattaccctgtaatattatatatacttaataaaacattttaagctattttgttgggctatttctattgctgctacagcagaccacaagcacatttctgaaaaatttaatttattaatgtatttttaagttgcttatattctaggtaacaatgtaaagaatgatttaaaatattaattatgaattttttgagtataatacccaataagcttttaattagagcagagttttaattaaaagttttaaatcagaaa

SEQ ID NO: 55299 - DNA, 317 bp, Homo sapiens
ggacatggtgtgccataggcccagttagtgggcgtaggcacatctcttttctggactggccgtctcctttctggctccatcctctcttgagccttctctgtcaagcttaaagaaatccttgcagaagactggtcaggatctgggtatgggtgggaaggagcaaggagattgctctgggattggcagtcctgttctctatgaatcggtgtcctttggggaggcctggactgaaatactaaccagataactcccctcccacctccatgcggagctgcatgtggattgagagctgtttagggtaggccaaaatgctgtca

SEQ ID NO: 55300 - DNA, 1532 bp, Homo sapiens
gccgccgccgccagggcccggactcggacgcgtggtagcctagagtcctggggagcttctgtccacctgtcctgcagaggagtcgtttccagcccggctgccccaggatgggtgagttcaacgagaagaagacaacatgtggcaccgtttgcctcaagtacctgctgtttacctacaattgctgcttctggctggctggcctggctgtcatggcagtgggcatctggacgctggccctcaagagtgactacatcagcctgctggcctcaggcacctacctgggccacagcctacatcctggtggtggcgggcactgtcgtcatggtgactggggtcttgggctgctgcgccaccttcaaggagcgtcggaacctgctgcgcctgtacttcatcctgctcctcatcatctttctgctggagatcatcgctggtatcctcgcctacgcctactaccagcagctgaacacggagctcaaggagaacctgaaggacaccatgaccaagcgctaccaccagccgggccatgaggttgttgaccagcgctgtggaccagctgcagcaggagtttccactgctgtggcagcaacaactcacaggactggcgagacagtgagtggatccgctcacaggagggccggtggccgtgtggtcccagacagctgctgcaagacggtggtggctctttgtggacagcgagaccatgcctccaacatctacaaggtggagggcggctgcatcaccaagttggagaccttcatccaggagcacctgagggtcattggggctgtggggatcggcattgcctgtgtgcaggtctttggcatgatcttcacgtgctgcctgtacaggagtctcaagctggagcactactgaccctgccttgggccttgctgctgctgcacccaactactgagctgagaccactgagtaccaggggctgggctccctgatgacacccaccctgtgccatcaccataacctctgggggaccccaacctcagaggcagcttcaagtgccttttgctgcgcaccaatgcccagcaggggaggtgaggggggctggcggggcgaagtttggggggtgttttgtggggctccccggacatactctctgcctggtggtcagatgcaggttggaaggggccttgctgagttggcgcaaggccgagcgttcccagcagggggagaaacccttcacaccccaggcccttcaggaactggggccttgccttgcagccacatggccccattcccagttggggaagccaggtgagctctgacccttgggcctgggcctctgcccctcccaacccagccgtcgtctccctcgacagcgcccctgctgtcttccccaccgcagtcaccaccacccgaaatgccacgtggtcactgtgcactgccctgttcatgtgcctctgcggggcagggccttcctggttttgtacactgctgtacccagatgcctacaaccatccctgccacatacaggtgctcaataaacacttgtagagcagaaaaaaaaaaagtcgacg

SEQ ID NO: 55301 - DNA, 384 bp, Homo sapiens
  misc_feature (1)...(384): n = a,t,c or g
ggtcactggtgggtcctggcactggcgggtcgcaacgctgtgggcgttccaggaggtggtcgtggcgaacctggcagctgcgggcatcatggtgggaggcttgaagaggaaacactctgatttggaagaggaggaggagaggtgggagtggagtccatcaggccttcaaagctaccagcaagccctgctccgcatctccctagacaaagtccagcgcagcctgggcccccgagcacccagcctccgcaggcatgtcctcatccataacaccctccaacagctgcaggctgcacttcgcctggtcccgcccctgccctgcccccgagcccctctttctgggcgaggaggatttctccctgtcagccccattgggttttntcttaa

SEQ ID NO: 55302 - DNA, 1101 bp, Homo sapiens
  misc_feature (1)...(1101): n = a,t,c or g
tttttttttttgctggtcaaggcagagtttactgaactgttagtttcctcctgcacacaccgggcatgacaccttcaagtctgtccagcagtgggtccagaaagtaccctgtgtgccttggacgcagaggctacagttctcactgtgtggcatgggagccttcacagtgccctcgggagctgcccctggtctttgtctgcaaaggtgactgggaggatagaaaaagcagcgggctggcattgtttcgggggtggggtggtgggcagtgtgcctgggcagtcgcagggaggctgacttggttctgggctgcaagatctgtgcataggaggcccctgggtttcttccaggctcttcactgaaatgcaaagagtctgaagaggaggcagtgggcatagtgcccctgaatctggttaggtggagtttactgcatttaaaggcccatggtgagtggtgagttctgggatttgggagattcccagaggcctgacaggcctgtcccaccctcctggacttcactacagggagctgaagtcagggcccaggcaggggagcaggccacccaggtagggaacaaatgcctgcccatgcagggcagagggcagaaggcagggctgtcagggccttggttggtctgggcactggggcaggtggaggggaggcaggggtggaggagaggcaggggtggaggaggtggggctctcctgggcgggtggaggagaggcaggggtggaggggaggcaggggtggaggagaggcaggggtggaggaggcggggctctcccaggaggccatcaacttgtcggcgtgctgcagcagcaggtccacttgctctgcgaggttgtccacgtacccatcagccttcacttccggatggtgctcgtcactgggcctgtccccatctcccactgtatgctccttccacagggcgagttgctctctcttctgagcatgcagaatgtgccccccaaccaccccatgccatcaaagctgggggccgctctgccacttcatctgcaggtgccagtgttgacttcgcttcctggagggacaggccaggtttcctgccctcagtggtcccccccacaggcctgacccagngca

SEQ ID NO: 55303 - DNA, 468 bp, Homo sapiens
ctcatttgtttatgctcatgtgtattttctatagtgaatttcagaaacttttaatatcaggtaatttcaatttatgcctataaagcattgattgaaaaataactagaattgtgcatatataacacataatctccaacagaagttactgaatacattcatactaatgtaatgtaatttccctttatttcttgctcttctgtttcaaactgctgctaatgtagtttacatatcccaacctttaaaaatattcctcttattagctttatattcactttatagaagttgagttttaattaaaattcttggcatcctgaagtatgtcacatagcatgtgctccttataaatatgttgatatctcagaagacagcatcccggttttcattttataaagtaccatacttaagaatgctgtaatacttatcttttataacatgtttccttcgctttgcttgtcttttatgcatcag

SEQ ID NO: 55304 - DNA, 2491 bp, Homo sapiens
cttcggcatgagggatccagcgagcgctgcgtcctcgagtccctgcgcccgtgcgtccagtctgcgacccgaggcctccgctgcggctgcgattctgctgcgaaccggagaccatggccaaaccagcacagggtgccaagtaccggggctccatccatgacttcccaggctttgaccccaaccaggatgccgaggctctgtacactgccatgaagggctttggcagtgacaaggaggccatactggacataatcacctcacggagcaacaggcagaggcaggaggtctgccagagctacaagtccctctacggcaaggacctcattgctgatttaaagtatgaattgacgggcaagtttgaacggttgattgtgggcctgatgaggccacctgcctattgtgatgccaaagaaattaaagatgccatctcgggcattggcactgatgagaagtgcctcattgagatcttggcttcccggaccaatgagcagatgcaccagctggtggcagcatacaaagatgcctacgagcgggacctggaggctgacatcatcggcgacacctctggccacttccagaagatgcttgtggtcctgctccagggaaccagggaggaggatgacgtagtgagcgaggacctggtacaacaggatgtccaggacctatacgaggcaggggaactgaaatggggaacagatgaagcccagttcatttacatcttgggaaatcgcagcaagcagcatcttcggttggtgttcgatgagtatctgaagaccacagggaagccgattgaagccagcatccgaggggagctgtctggggactttgagaagctaatgctggccgtagtgaagtgtatccggagcaccccggaatattttgctgaaaggctcttcaaggctatgaagggcctggggactcgggacaacaccctgatccgcatcatggtctcccgtagtgagttggacatgctcgacattcgggagatcttccggaccaagtatgagaagtccctctacagcatgatcaagaatgacacctctggcgagtacaagaagactctgctgaagctgtctgggggagatgatgatgctgctggccagttcttcccggaggcagcgcaggtggcctatcagatgtgggaacttagtgcagtggcccgagtagagctgaagggaactgtgcgcccagccaatgacttcaaccctgacgcagatgccaaagcgctgcggaaagccatgaagggactcgggactgacgaagacacaatcatcgatatcatcacgcaccgcagcaatgtccagcggcagcagatccggcagaccttcaagtctcactttggccgggacttaatgactgacctgaagtctgagatctctggagacctggcaaggctgattctggggctcatgatgccaccggcccattacgatgccaagcagttgaagaaggccatggagggagccggcacagatgaaaaggctcttattgaaatcctggccactcggaccaatgctgaaatccgggccatcaatgaggcctataaggaggactatcacaagtccctggaggatgctctgagctcagacacatctggccacttcaggaggatcctcatttctctggccacggggcatcgtgaggagggaggagaaaacctggaccaggcacgggaagatgcccaggtggctgctgagatcttggaaatagcagacacacccagtggagacaaaacttccttggagacacgtttcatgacgatcctgtgtacccggagctatccgcacctccggagagtcttccaggagttcatcaagatgaccaactatgacgtggagcacaccatcaagaaggagatgtctggggatgtcagggatgcatttgtggccattgttcaaagtgtcaagaacaagcctctcttctttgccgacaaactttacaaatccatgaagggtgctggcacagatgagaagactctgaccaggatcatggtatcccgcagtgagattgacctgctcaacatccggagggaattcattgagaaatatgacaagtctctccaccaagccattgagggtgacacctccggagacttcctgaaggccttgctggctctctgtggtggtgaggactagggccacagctttggcgggcacttctgccaagaaatggttatcagcaccagccgccatggccaagcctgattgttccagctccagagactaaggaaggggcaggggtggggggaggggttgggttgggctcttatcttcagtggagcttaggaaacgctcccactcccacgggccatcgagggcccagcacggctgagcggctgaaaaaccgtagccatagatcctgtccacctccactcccctctgaccctcaggctttcccagcttcctccccttgctacagcctctgccctggtttgggctatgtcagatccaaaaacatcctgaacctctgtctgtaaaaaaaaaaaaaaaaa

SEQ ID NO: 55305 - DNA, 343 bp, Homo sapiens
gagccaccacgcctggcccaaaaattattatttctaaaagaaatcaactcgtgaattcctaaagaactatgctgaatctgcttatgagtatcaccgatctgaagctatagcaaaatttaaaatcctcaaattactcccatgtaccttttctaatcagtgcttttatttcttaaattctattaggcttcatatacattgccagaagttttatgaataagtgtacctacatgttctgatgggaacagagttaatttccagtgaagttaagtgttttttacatgctggagataaatggacagtgagggacgtatgtgatctcaccttgtcacgacagagagattcc

SEQ ID NO: 55306 - DNA, 374 bp, Homo sapiens
caaccactctccagcacattaattcttacagttagcttctaacagcatataaaaatgttttgattgttttatgttaatctgtgtcctgtcccataaaagtttaacctacaagaggaaggatattatctctcttattcaccgctattttcttatatgcttaaaacaatgtctgccccattgtagatactttacaaatatatgctgaataaaatgatgaactgacaaatataaataatatgtatatatgtacatatgtatatgtattaattaaagcttttgaggctccatatgtaccagagtactaattgctctatctttattataccaagaaattatcataggtctatgggccagacaatattattactattttg

SEQ ID NO: 55307 - DNA, 417 bp, Homo sapiens
  misc_feature (1)...(417): n = a,t,c or g
gatactttatccaggaaaccagggcttacaaaattattggaagggccaaagaagaactacagacagggtttccagagtgacaagaagattgtaaggacannnnnnnnnnnnnnnnnnnnnnnnnnnnnnnnnnnnnnnnnnnnnnngaattttgttgttcttaatgtccttactcagcacaatgaaaagtcagcaaccccatgttgatcactaacttttttttttttacatttnattgatcattaaaatntaaaagtntaggatttactgntttaatctaacctgttcttgattttatcaaggaggaaacttcagnccttcatatatcatattcatgattngccatatctatatatcanctatnccattatatgcatactatttttctttaaatcactcacctttctttancttaaa

SEQ ID NO: 55308 - DNA, 332 bp, Homo sapiens; identical to SEQ ID NO: 40872
  misc_feature (1)...(332): n = a,t,c or g

SEQ ID NO: 55309 - DNA, 619 bp, Homo sapiens
taaaactctaaaaatatgtgatcaatgtttaatattctgaggaataagtaacaaaatcaagacagattttttacttagctgggttaatttcctctgaattcttctaagagttaaaaatgaactatcacattgattgatttagaaccatcagattttacttctggaaaatctattacctttcaaaaagttataattttaatgttagcacgaaaattacttcctaacatttcattaaaattttgcagccaaagattcctatttttgaattacagtactgcaaggcacatacagaactcacctccttcaaaaccacagaagatatactccctgaaatagaattttaaaatccttgaacaattagaaatactataaagttagcattttttaggtaaaaatgttgctcctacaggatcatgcaactttcttaaaatcaattcagcacatatgtataaagaatcctttttaaaaacatttgtacttgaaatacagacacagtgatgctgaagacactaaacaaaaactgaaaagtactatatcttgataaattttgttattgccttctttagagactttataatctctagttgattttcaaggacttgaatttaataatggggta

SEQ ID NO: 55310 - DNA, 725 bp, Homo sapiens
tttgtcgatccctcatgaactaaagctttattatgattttttttttctgatccctttgcaaccctgcacctaagccaaaagcattataatcttgtcatacttcagataagtccacgggagatgttccgagtgaactatagatgacattccactagggaattctatgttcagtgtaaatggtatcttgtataagttttagttttttgtttaccctttgtttcctgggctgagcttgtccagaaatcttgtcttcttcaggctacagcagcttagagcttgtttgtgtgtgtgtttgtttgtttgtcttaaaggtataggcaaaattttagtcttaacacctgtaaaccagtactggtgttgttctgtcctagaaattttagcactgctctgatacaataaagccttctttctctccaactggttcaacttcagcataggcaggatgtccagagcctcttctaaacttcatcgcaggccatctgcttgggcgtctctcaataaagaagatgctggctgctgatgttgggtggtgatacatatagactgtcacaagaatggctgtggctacaatgaggaccaggatgaggattccaatgatgaggccagcgtggagggttccccctttcttctcagctgcactgtcatctgtagaagctccattatcttttagatgtagtgctatcttggtatcatcttctgtagggaggctggtgggaaactgagaa

SEQ ID NO: 55311 - DNA, 1566 bp, Homo sapiens
tggcggcgtccaagcggaggttgagggctctgaggaggcgttgagaggtttccgtacagcccgaccgtgcggctttggggatcccatcgctctgtgtttcctgctccaggtttcgcgtctcgcatcttcccagaccctcgggcgcgatgtggaggagctgcctccggctgcgggacgggggacgccgtctcctgaatcggccggcgggtggccccagcgcttctatgagtccggggccaaccatcccgtctccagcccgggcttacgccccgccgacagaaaggaagaggttttattcagaatgtcagcatcacacagggtgaaggtggcttttgagataaacctgggaccacaggaagctgaaaattccccaagccaagctctttaccgtccccagcgaggccctggccattgcagtggctactgagtgggattcccagcaggataccatcaagtactacaccatgcacctgaccacattgtgcaacacatcattggacaacccaacccagagaaacaagggatcagctgatcccgggcagccgtgaagtttctggacaccgacaccatctgctacagggtggaggagcccgagacattagtggaacttcaaaggaatgagtgggatccaatcatcgaatgggctgagaaaagatacggcgtggagatcagctcctccaccagcataatgggacccagcatccctgccaaaactcgggaggtgctcgtcagccacctggcatcttacaacacatgggctttacaagggattgagtttgtagctgcccagctcaagtccatggtgctaaccttgggcctgattgacctgcgcctgacagtggagcaggccgtgctgctgtcacgcctggaggaggagtaccagatccagaagtggggcaacattgagtgggcccatgactatgagctgcaggagctgcgggcccgcaccgccgccggcaccctcttcatccatctctgctccgagagcaccacagtcaagcacaagctcctgaaggagtgaggcctgggcagagcacactcagcaggatagaggcagtgcagccacagctcccccggccttcagggctccccagcctgtggggctggcttccttggcttttggggactcggcctcagcgtcaccctgagattccccccgagacacagtgcgctagtacggctgtccggagtcagcctgatttcaacccaggtgcccctggcctggccagcagtgaatgtaggagatgaattgtgcaagtgactttctctcgactctgattttattaaatatttctccaccctggaaatgtgctgagccctgttttcacgtatgcctctgcacttctccattcttcctgttttgtctaggttccagagggttaaacagcttatctcccatggcgtgtttggatatctgctgcctgtggtcaggaaccttgcactggggaaacaatcatgtaatccacagacaactctatttgtgttcttcagccgtcacctgaaggcttttttttggctggcttttaatcaaacaatcttttgaaacaattgtggtctaaaaaaaaa

SEQ ID NO: 55312 - DNA, 401 bp, Homo sapiens
aaaaatgaagaaacccaaagatattataataaattcccatggtaaaaattaagacagtacagaaatgtatgtggaaagtgaaaactactctgtaatcccacccagagataaccattgataaatgtttggtttatagtgacccagacatttttctgtgcacataaactaacattgaggtatttttatttaaaaaatcatatcttgctatgctactgttgcacagcttgcctttatcatgtaacagtatgtattggacatctttccatacttccctttattattttttggatttcttattattttaatttgccacatggtatttgtgtagttactgtagtttatttaaccagctttttattgatagctatttgggttgttgtctagtttattatattgtacat

SEQ ID NO: 55313 - DNA, 575 bp, Homo sapiens
cgctctcaatccttttcggaagctgaaccccagctgcccccagctccggtccgagggggaagcagccgggacgttagcagaggggactgaattcgtggcagcagcagcagcagcagcagcagcagcctcgcccacctccacgccagcaggaaagagcccacttggagagtcttgtagccagcaggcccagccctcagccattggcagagacccccatccccagtctccctgagttcccgcgagcagcctcccagcaggagattgaacagtccatcgaaacactcaatatgctgatgctggacctggagccagcctccgctgctgccccactacacaagtcccagagtgtccccggggcctggccaggggcttctccactctcctcccagcccctctctggatcctcccgtcagtcccatccactgacccagtccagatctggctatatccccagtgggcattcgttgggaacccctgagccagccccacgggcctctctggagtctgtccctcctggcaggtcttactcaccttatgactatcagccatgtttggctgggcctaaccaggatttc

SEQ ID NO: 55314 - DNA, 384 bp, Homo sapiens
  misc_feature (1)...(384): n = a,t,c or g
attggattcacatattctaaaaatgctcgtcatttgtggctaattttatcaagtctagtttaatctcatatttacagagtttagttaattctaattagctttgttggaggtcataaaccacattattaaccttgaaccgactctgtgtttacttgagttcctctgcataatagcatgtcaccaccatcataaacatgttggtattgcattatgcttctagaggagacatccaccaatatttgaaaatctnnnnnnnnnnnnnnnnnnnnnnnnnnnnnnnnnnnnnnnnnnnnnnnnnnnngactttgtttcttctccagtcctgctgcttcacttgactagccttttaaaaaaaagaaagaaaatagagaaaatcttaactta

SEQ ID NO: 55315 - DNA, 304 bp, Homo sapiens
atttaaaaaggcatctatttctttatagaaagaaacattcacagtgaggtcttagtttgtgaacctcaaaatccagatattaatccactttagttattactttgtaattgcttctcagtcattggctgataatgcaatggtgtgataaatttgacttatctccacatacaaaagtcgatcagaagggatagttctcttcctttttttcccctcctactggctcttactgttttctaatctccagtgtaaatggaatgaacacatctatagttaaggtaaatgccaccaatcagaagattgagtg

SEQ ID NO: 55316 - DNA, 1493 bp, Homo sapiens
ctgcaggcaggcatatagttttcatccagagtttggatctaaccagcaaaactctgtcttacacaggatgacttggaattagagtccttatagcagaaagagcagcagggctgtccttgggtatccgttgctcagccaagtcatcaaataaaaaggatgattgcacaagtggactatgtaccaatctgtgggtttctgcatggccaagagccagaccctccctctgggctctgcatggcccaacccaccaagggatgctttatttaaacagttccaagtaggggagaccagctgcccctgaaccccagaacaaccagctggatcagttctcacaggagctacagcgcggagactgggtaagtcaacgatcccccagagctgggacagaaggggcagcaatggggcagcaactgagggagaagagagctgacgttagtgcttaggagacgttgcacactttgcagacaggaagtaaaggaaatgggaccccagagtggccgcagaggggcctgtgggttgagacactacagtgtgtgtcataaccaagacccgatcagggagtagttacttctcttcttttcttacaggaaacatggttccaaaactgttcacttcccaaatttgtctgcttcttctgttggggcttctggctgtggagggctcactccatgtcaaacctccacagtttacctgggctcaatggtttgaaacccagcacatcaatatgacctcccagcaatgcaccaatgcaatgcaggtcattaacaattatcaacggcgatgcaaaaaccaaaatactttccttcttacaacttttgctaacgtagttaatgtttgtgggtaacccaaatatgacctgtcctagtaacaaaactcgcaaaaattgtcaccacagtggaagccaggtgcctttaatccactgtaacctcacaactccaagtccacagaatatttcaaactgcaggtatgcgcagacaccagcaaacatgttctatatagttgcatgtgacaacagagatcaacgacgagaccctccacagtatccggtggttccagttcacctggatagaatcatctaagctcctgtatcagcactcctcatcatcactcatctgccaagctcctcaatcatagccaagatcccatctctccatatactttgggtatcagcatctgtcctcatcagtctccataccccttcagctttcctgagctgaagtgccttgtgaaccctgcaataaactgctttgcaaattcatctggaagtgtctgtgtgtcttcattagccgctctgctgtcatttagtgacaatctgctctagagatttgggtttatcatgaatctctccccctcaatatctgaccaaattccttgattcccccatcatccttcatgtgatacctgattccaggcctgccttaaaaaaaaatccaattgagtcaacttagcattggtctccctagccttaatatctcctctaagcaattttccat

SEQ ID NO: 55317 - DNA, 264 bp, Homo sapiens
ggcgcgtctctagtttcccacagattcataaaggtccatacaaaaatgttataactgttaatagtgtcctgtccttgaatttaacagcaaccaacatattgtttgcatagttcttgcaccatttggaaacagtgacctttaggtgttgcaggtaactattgggaaatccttcaatttgtttaacatttccatattttgatttgcatcttgggagttgcttggaatttgggatcctcttctgtctcttgagttgaaatcagaggc

SEQ ID NO: 55318 - DNA, 715 bp, Homo sapiens
  misc_feature (1)...(715): n = a,t,c or g
tttttttccagtctcaagttgtctttatttgcagtatgagaactaactaactcaggtggtcacatgccaatgatgcctgggcccccagtgatgagtcctcccaccctcccacaatggtgcccacttggacccaaatgactcgaccagacagataagagtagaggggaggcctctttagatcagttttatattacttgttctgcttcacaaggagatcatggtgctgtgactctgggtattttcttaatagcatgacaaagaagacttgctcctccttcctcatgatcttgannnnnnnnnnnnnnnnnnnnnnnnnnnnnnnnnnnnnnnnnnnnnnnnnnnnnnnnnnnnnnnnnnnctnnnnnnnnnnnnnnnnnnnnnnnnnnnnnnnnnnnnnnnnnnnnnnnnnnnnnnnncatgttgagggcaggacctggtgggaggtgatcagatcatgggggtggtttccctcatgcggttctcgtgatagtgagggagttctcaatgagatctgatggtttaaaagtggnnnnnnnnnnnnnnnnnnnnnnnnnnnnnnnnnnnnnnnnnnnnnnnnnnnnnnnnnnnnnnnnnnnntacctctggaaggtcacggacatcggtgactacgacgacgacttcccagacgtggcccccgcttagccagcatcgtcagccctagcctgacctctacgttcgtgcccagccagagcgc

SEQ ID NO: 55319 - DNA, 705 bp, Homo sapiens
tatcaacagacaaaaaaagtttattgaatacaaaactcaaaggcatcaacagtcctgggcccaagagatccatggcaggaagtcaagagttctgcttcagggtcggtctgggcagccctggaagaagtcattgcacatgacagtgatgagtgccaggaaaacagcatactcctggaagtccacctgctggtcactgttctcatccaggctgcccatcagcttcttcagcccctcctcatccactttctcccccacaaagctgggcagctccttgtgcagaagttccttcatttcccccttactcagcttgaacttgtcgccctcttggcaggagtacttgtggaaggtagtgaccagcacagccagcgcctgctccagagaactgcacatcatggatctgtggcagaccaggtggcagagacagacccaggaaggagagcaaggcagccaggctcccagggtgaggatttatatgtgggccccactggcccccaacttggcattttaaggaaaccaaacctgcctcaacctgatcccaccaaaccctggcctcttgccattcccactcattccctcccagccccctccctcccagagagtgccagctccaccaccagctgggggagggctctaggccaggtcaagggcagcccctgagcccacccaggccacagtgggaagtgggaggtgtcgtggggactgggc

SEQ ID NO: 55320 - DNA, 395 bp, Homo sapiens
cccacgcgtccgaatagtttatgtttctaccagctccagaggggttcacagtgttgatcttgactttcagatgggcctttctgagctgagggaggggttgctggatgggagaggagcttcccaggagaaaaccatgggtgaataatctcaaaacggttgttgcagctacactcgcatttggaggttaatttataaaaagaaaagcaagattggacatcggaatggggactgcagggactgggccgagctaattatttcaaactggcctttcaggccatcctagacacagattggccctggatgggcctcggtctctggtctcttgaaagcccttgcctggtaggaagaagccgctctgccaggcagcggaagggagaggcaagcagtgtgagcct

SEQ ID NO: 55321 - DNA, 435 bp, Homo sapiens
ccccgcgtccggataattcaaaatttttaatttttatccatgatgacaaaataattatgggcagaggaagatattccacacttactaaatgaagcagaagataaattgaaacaaatagtagcattccaatattggtgaaattgaccatcagcaaaatctcagacaatgagtcttcagggtttgatgttctggagaggttttcttggactcaagaattaatgagtgaacaatatattcctaaggaaaaggtgaaaaatgacactcaacaggaaggaattcatccacaatgttttattttcctaaaagaacatgtatcagaattctttcatcttttgtaaaatttgtgcactagtatttacttgatatagtttgtaaatggacaaatgctgaaggcaggcatttatgcaaaggaaattagataatgtaggaatgaga

SEQ ID NO: 55322 - DNA, 377 bp, Homo sapiens
  misc_feature (1)...(377): n = a,t,c or g
cgcactgggtgatgaaaatattctaaaactgcttgtgctgatggctgcacaactctgcgaaaaaaaaccgctgaattgtnnnnnnnnnnnnnnnnnnnnnnnnnnnnnnnnnnnnnnnnnnnnnnnacccatgttacctttaaaagttaccattttcatcaaccccaaaatgtcagtggcctttcttattacatcaccctcacagtaaagggctaaagctgagaactggtgtttacattttaattgtgttacatctttaagttaaaacatatattttcccggggcatgatttcctccaggcctgggaaggttaaaggccatcaggaaatgcagcctagggtagagacccctcaccctgaaaccatggttttcacagg

SEQ ID NO: 55323 - DNA, 426 bp, Homo sapiens
ctagagtgtctcccaagggttgtaatgcacattgtttccttggttcccttaaagaactccttcacatattcggagtctgactgactgttcaaatgccacttttgcaaacttactggcaatgtgattcggggcagttcatgtagtgctcagtttcctcatctgtaaaaaggggagaacataccttcctcctaagtatattttaacgagtcataaaaaatgtaaaccatttagcacagcatgtatcccagagcacaggctcagtacctacatgtgcatatgtggtcccctgcggaaccaggctaacactgctgatagtaacatgttgagtccagccatgtctcccaggaacacactgggtggtatgtattttttaaatactttgcatctgtgccattctcaaaatgccatcaagctcctctgcatttt

SEQ ID NO: 55324 - DNA, 406 bp, Homo sapiens
ggaaaaagtgaatgggtactcaagtcagggaagcgtaagccatacgacactcaggcgtatgaaggcatcaggtgacagcactgctgccctcagggtctcctagtgaaagactacagatgaagccctgtggggttctacaagagtgagaatggtgaggcatatcagagaaagaaggcggcagccactggccttccagagggtcctgctgtccctgtgccttctcgagggaatctggcacagcccggcggcagcagctggaggaggatcgcactgctcatcttggccatcactatacacaacgttccagagggtctcgctgttggagttggatttggggctatagaaaagacggcatctgctacctttgagagtgccaggaattttggccattggaatcgggatccaa

SEQ ID NO: 55325 - DNA, 366 bp, Homo sapiens
gggaagctcgagaacaggttttgctgaggattccccccaagaaaagtgctccccgggaggccgttcctggcaccaagactggcggagccaccacacccgttaaagggatccacctggacagcgatcaggccgagctgaaatttaccataatccggctgatgtttagactgcacccatcgttttttccattcatctatgagtaaaggagaaaaaaagaacgtaaagacaaaatgcagctaatactgaccaagacttacaggaacggtaaaggtatgtcaagggatgactctgatattcctgaaattcctttcattgtccaattgtctgaatcccactatttgtgtattatcatgtggagtggcttga

SEQ ID NO: 55326 - DNA, 319 bp, Homo sapiens
ggggacaggcttttgctccagtatttaggcttgttcttatcagtaaatctaaatagaaagttcctaagtaaagaagcttccgtatttaaatagctcaaaatacgacagccttatttttttaatagcggcattgtttctctttcccaaagcaaccataactgagacaggattagatgcaaaaaccacttgctgatacagtttagaattgcaaaattctaaattccaacagattcatattatacacaagtataaacagagtgtagccagttttcctcaaagagataacatgggttctccacagtatttttgacccaacaag

SEQ ID NO: 55327 - DNA, 378 bp, Homo sapiens
gcggggcagaggagggaggcagcgggtgagagttcagagttcagcagcagcagcccgagcccatgattcccatatgccctgtagtttctttcacctatgtgcccagccggctgggggaagatgccaaaatggcgaccggcaactactttggattcacccacagcggggcggcggcggcggcggctgcggcccaatatagccagcagccagcttcgggtgtagcctattctcatccaactacagttgctagctacactgtccatcaggctccagtagctgctcacacagttactgctgcctatgcaccagcagccgccacagttgcagttgccaggcctgctccagtagctgttgcagctgctgcaacagctgctgctt

SEQ ID NO: 55328 - DNA, 293 bp, Homo sapiens
taatcactgcagaatcagagttgcagcaatatgattgcaagcaagtctgaatgcatagttttactttaattcggcttgacaatttgaataggtaaccccctcgggactgactgaatcgttatgcatgtgtcaatcaatgggaggtgtgcattctctagaagtagttttaggctgtttggtttggttttggttttgttttttaaatgcagcctgttgaggcactgtcatgtggtgtgaaagatttaaatgtagcaacgctaaagagtaataatttggggataagaagtggggac

SEQ ID NO: 55329 - DNA, 404 bp, Homo sapiens
cggacgcgtgggcggacgcgtgggactagcaactgctccaaggatagatgatgaaatcccccctccacttcctgtacggacacctgaatcatttattgtggttgaggaagctgctgtgaaggtaaaaattggaacatcactggaatggggtggaacatctgaaccaaagaaatttgatgactctgtgatacttagaccaagcaagagtgtaaaactccgaagtcctaaatcagaactacatcaagatcgttcttctcccccacctcctctcccagaaagaactctagagtccttctttcttgccgatgaagattgtatgcaggcccaatctatagaaacatattctactagctatcctgacaccatggaaaattcaacatcttcaaaacagacactgaagactc

SEQ ID NO: 55330 - DNA, 560 bp, Homo sapiens
atcgaacattcttttttaaagtaagctctgccctgactcccccagccatgcagagaggcttgcagagctgcctaggcctagtttggccctttccctggcacccaggccctgtgttcagacccctggctctcatcacagaaacaccctttgttgagcagttgtttattctggccctcacagccttggctagtccacaaaggccctggggatgggcaacaggctacaggaacccacctgtcttcctggtcagggcccctggcccctagcagcaggccaatcctggtggggcacagggttctgtgccctttggctgcctacctctgaatatcctggccagcaagccatgccttccccgcccctggggccctgggagcccttcagctcctgtccccataatgggtcctgggcctaggatgaggggaaggtcccagtttcttgtagggtgttatctgggggtcctggtgtgggttgagctggagggctgtggggcccaagacccctgtgccattggggtgctccaccctctcaaacaggatgagcatctcacagtgcggggtctg

SEQ ID NO: 55331 - DNA, 1712 bp, Homo sapiens
ctttgtataaggctcagctaaaagggaaattgagtgggtcaggtaccacggatactatacactctattgcatgattctcctgcctacatcagaagatgtttataagcctattttaaaggataccagttggaatctctcttttattaatcaccaagagaaccatgaacaagctgtttatcatttgactcatcatttaatcttgatttccagcttctcacacttgaaagaagacataatacatttctcacaggattctgggactattaactgaacttatgtgtgtaaaaggaattcatacaatgaaagcactagaaataattattatacttataaccattgtatttttacatgtttaaaatatagccataattagcctactcaaatccaagtgtaaaagtaaaatgatttgctttcgttttgttttccttgcttaggggatcatggacattgaagcatatcttgaaagaattggctataagaagtctaggaacaaattggacttggaaacattaactgacattcttcaacaccagatccgagctgttccctttgagaaccttaacatccattgtggggatgccatggacttaggcttagaggccatttttgatcaagttgtgagaagaaatcggggtggatggtgtctccaggtcaatcatcttctgtactgggctctgaccactattggttttgagaccacgatgttgggagggtatgtttacagcactccagccaaaaaatacagcactggcatgattcaccttctcctgcaggtgaccattgatggcaggaactacattgtcgatgctgggtttggacgctcataccagatgtggcagcctctggagttaatttctgggaaggatcagcctcaggtgccttgtgtcttccgtttgacggaagagaatggattctggtatctagaccaaatcagaagggaacagtacattccaaatgaagaatttcttcattctgatctcctagaagacagcaaataccgaaaaatctactcctttactcttaagcctcgaacaattgaagattttgagtctatgaatacatacctgcagacatctccatcatctgtgtttactagtaaatcattttgttccttgcagaccccagatggggttcactgtttggtgggcttcaccctcacccataggagattcaattataaggacaatacagatctaatagagttcaagactctgagtgaggaagaaatagaaaaagtgctgaaaaatatatttaatatttccttgcagagaaagcttgtgcccaaacatggtgatagattttttactatttagaataaggagtaaaacaatcttgtctatttgtcatccagctcaccagttatcaactgacgacctatcatgtatcttctgtacccttaccttattttgaagaaaatcctagacatcaaatcatttcacctataaaaatgtcatcatatataattaaacagctttttaaagaaacataaccacaaaccttttcaaataataataataataataataaaaaatgtattttaaagatggcctgtggttatcttggaaattggtgatttatgctagaaagcttttaatgttggtttattgttgaattcctagaaaagttttatgggtagatgagtaaataaaatattgtaaaaaaacttattgtctataaagtatattaaaacattgttggctaataaaaaaaaa

SEQ ID NO: 55332 - DNA, 267 bp, Homo sapiens
gctcacctcgacctttgtagcatgaaagcagccacagatagcaggtaaacgaatatgattgtgtttcaataaaaccttatttgtggacactgaaaatagaatttcatactgttttcaccagttatgaaatatacatttgattttttttccccaaccattaaaaaatcattcttggctggatgcagtggctcacacctataattccagcgctttggaaggctgaggcaaaggatctcttgaggccaggagtttgggaccagcctgggc

SEQ ID NO: 55333 - DNA, 340 bp, Homo sapiens; identical to SEQ ID NO: 41782

SEQ ID NO: 55334 - DNA, 402 bp, Homo sapiens
ggagagggcagtctgggatgtggcattggctatgggtatctacaccggatcccaactcagccccccagctaccacaagaagccacctgggaccccaccaccttctgctctaccacttggtgccccaccacctgatgctctaccacctggacccacccccgaggactctccttccctggagacaggttccaggcagagtgactacatggaggccctgctgcaggcacctggctcctccatggaggatccccttcctgggcctgggagtcccagccacagtgctccagaccctgatggacttccccatttcatggagactcctcttcagcccccacctccagtgcagcgagttatggacccaggcttcctggacgtgtcgggaatttctctcttggacaacagc

SEQ ID NO: 55335 - DNA, 507 bp, Homo sapiens
tttttttatatatgtttaaattttaatactcaagaaaacaaacctaagttaaaattggatacaaatactgctggcataagaaaatatacacaaatttggattcaaatggggttattatgtgaacctggatgtaagactacatcctaacaacctgttgttgaagccttttaataaagtaacagattttaaatcagatagatataaaaagactgaagaaaaacagtaacttttccttaagttcttttatccataaagaatgacaaactccatatggacagtaaagttagaggtcatccaatttaccaaggcattttgaacacataaaccttaaatacctactttaagcccaaacaaggtaaaaataatcggcatttcattgtgctccggaagtttaattttacatatcatgttaacaaattatagaaaataaaataaaagcattttccatttttttgaaagtacacatcattacttctcccaggtacttcagtaatttaagcttaatac

SEQ ID NO: 55336 - DNA, 2125 bp, Homo sapiens
gtaaaggacagtaatgaattaggctttcagttttaggacatcaaccctccgagaaaaggcagaaacccgagggaccatttatttcccttcgaaactgtatagcccagggaatggattgagatgctttctccagaccctgtataggtcaaccttgcagaggtaaaggaggaggggcaggtggatgaataaaataggataatgctcagcttggcagtggacttgccttagtgtgatgacaggtctaacatgggcaagacaattagaatggggaccaatatgccagggcatgggcttttatctccctagtagatcccaagctagtaggcttggattctgccaaatggccagccctcctgtcttctccccgtaccttgtagttagaccgaggtgagaatcctgctgaccccagtcccatcccctctcatttcaggaaaacccttttgtgattcaggtagggggagaggaggagttaagggctccgtttactcccaagtcatggatttttaatattccatttttatcactaatatacctctcttcctagaagctactggagtattgagtgttgtgggaaaaggctaactgtgaattaagttaatgtttttcttataagaaatggaagtttatttttttattgatattactatgtgatgaactgagtatgcatatactgaaatggaaggaaattttaaaactattattctagaagaaatgggcagttttgtaatttggtggtggctgagaccccatagaagttttactatgtaaataatttggagagtgaataaggagattgtgctatgaaatcctgacagcgctctttaggaggcagacttgacagtcctaggaaggttgacataaaaataccaaccttcagtaaagctctagtacaaaaaagggtaaatgtcatcattcttatttttaggcctctttcttgagagaggtgggagtgggaggtagtgttataactggcactttaatttgtttttggaactagaatttaggggcagttggatgaaattgcaaatttagaaggggaataagaattttctagtgctatataaagaaatgatgatggagacaaaagccttgctttcctctttttagaatttattttcgatttttagcatactgtggggcttttagagctaatatgatctaaattcagaaaatttaattttcatagtaggccaggtgtgaattacttatgtttgctatagaatgcttatttagactaacaataaatttactttgctttctaaggccagtcagcgaatgtggggatgaggcaggatgttttaaatgagccagagatgatccacaaagtgaacagtcgacacagaggtctttgagttggatggttgcaaatatattgacattagagtgaaaactccttcctttgggtaaactaaagaaagataaagtatactaaaaaattttaagatggtgttatacaaaaaaaagtttgggtctaacgtgtccacaaagactgtcaagtgaagaatggtggagattcttggtgtttgagcagccaacctggatgagtgacttcagggacagagcagaggaaagcaaaatgaatttcctttatttacccaaaacttgttgactgaatttttgtataggtccgggaaaataagcctaaacaaatagttgtagccttagaaaaactgttttcccatttctttctgagttagaatcagcatagcctccctgtcgccttaaatgtaaaaatcctattttgattaataccccagcctaagagttatagcaatacgagagactgaatctatttttgtttcgggtctttacctcatagtatgaaattagtaagacactgcatagattttgccctgaatactggtgtgcccaggtatgccgtgctctctctctgtttccagtggtggtaattttaaggcctaaagaaagctggggttaatcctgaagctaaaagtaaatgtttcttgaattgattttgttctgtggtacaaataacatctatgaatatcatatctgtatatatctgaaccaagttgtgtgcagagaggttgatataactatatttacagaaaatgatttttacaattaaagttcacattttaacaaaaaaaaaaaaaaaaaaaaa

SEQ ID NO: 55337 - DNA, 755 bp, Homo sapiens
  misc_feature (1)...(755): n = a,t,c or g
ttttttttttttttctggcccaaattgagtttaataaagagcttgagtgatgctcagattagggagggagtgaccgggaatgctggggtctggaactgggggcccagctgagctctgaatcagagagcagtgagacctaagggtccctgatctcagagggtccctcctgtctcagggtgaggacctgaagggtgtgggtcccggggagggtgaggaggccattgtaggagatttactgagatggtatcgggatgccccaagcaccacgtagggggattacatctgggtttctgggaacgaagagctgagttaggggagagaacccgaaagatctcagtggggaaaggactaggggtgcagggtgtttcacagaaacaatcaaggggcctcgatttcacagaaatcatcaagagggctccttgtgggtagaagaggggtatcacagcaccccaaatattggggcctgttcacccctctgcagccattctggggttttaatgtaaaacccaatggcagggatattccncatacattatcatgggtttgcaacnttagcaacgctggctgtcccgcaggacggtggggactggaaaatcagtccagggtctgggtttgagtcctaagaggacgagnctggcggcgccacacggctcctcttcaacagctgccggagctgtagacaaggcaaaggagggagagaagtctgtcaggttggaaggagaggtggggaaggcacgccatgcagagggaggggc

SEQ ID NO: 55338 - DNA, 627 bp, Homo sapiens
cagacggctgcgaggcgctgggcacaggtgtcctgatggcaaatttcaagggccacgcgcttccagggagtttcttcctgatcattgggctgtgttggtcagtgaagtacccgctgaagtactttagccacacgcggaagaacagcccactacattactatcagcgtctcgagatcgtcgaagccgcaattaggactttgttttccgtcactgggatcctggcagagcagtttgttccggatgggccccacctgcacctctaccatgagaaccactggataaagttaatgaattggcagcacagcaccatgtacctattctttgcagtctcaggaattgttgacatgctcacctatctggtcagccacgttcccttgggggtggacagactggttatgggctgtggcagtattcatggaaggtttcctcttctactaccacgtccacaaccggcctccgctggaccagcacatccactcactcctgctgtatgctctgttcggagggtgtgttagtatctccctaagaggtgatcttccgggaccacattgtgctggaacttttccgaaccagtctcatcattcttcagggaacctggttctgggcagattgggtttgtgctgttcc

SEQ ID NO: 55339 - DNA, 847 bp, Homo sapiens
accccattgtagaagaggaataatttatttctatatgattttaataatgttccctaagtaattagtaatcaagattttcttcaaattcaaattaacaaatatgtttgttaatctaaataatatacatatttatgtatttatatatgtatatattttaatctttctgtaattcagtctttaactgtgaacttttacatgatggaagcagtgaaggactcaatgtcatagtacattttgatagtatttgataggctttttcaggtcaattaatttagttgcttgcaaatataaatcaagcttgctccagttccacaaggactccaccacagtctttaggatggagaaaaatcactggttttccatgtgctcctattttggacctcttcacttagactgcggatcttcttttttttcaaatccatcacagctgcattaatattatccacctcgatgcagatgtgatgcattcctccagccttgtttttctgcagaaaacctgcaattggactgtcacgtcccaatggatgaagcagttccatcttggtatttcccaggttgacaaaaacaacagatactccatgttcaggaagagggaccgcttcacttacctgggcccccagaatattcttataaaatgctgcagccttttccaaatctggcactgctatggctacatggttgagtcgacccaggttccacacagaacctgtcacttgatccaagggctgtgatgtggaagaagctcttactgttggaatgggagcttgaagtctggaaaaaagccctacggcattcgcggctgcagccttcagcacccgcgccattttggaaagcaacccgccacgtc

SEQ ID NO: 55340 - DNA, 389 bp, Homo sapiens
gagaaaaaattaaaaagaagagaagcacagtctttgggactctgcacgttgcacacagctcctccctagatgaggtagaccacaaaattctggaagcaaagaaagctctctctgagttgacaacttgtttacgagaacgactttttcgctggcaacaaattgagaagatctgtggctttcagatagcccataactcaggactccccagcctgacctcttccctttattctgatcacagctgggtggtgatgcccagagtctccattccaccctatccaattgctggaggagttgatgacttagatgaagacacacccccaatagtgtcacaatttcccgggaccatggctaaacctcctggatcattagccagaagcagcagcctgtgg

SEQ ID NO: 55341 - DNA, 1511 bp, Homo sapiens
ttttttttcaaatgttaaagcaatggaatcaataaatttattaatgttacattaacacgaactacaaagagacctttcgtatgtctgataccaaagacataactgaaaagtcatttttccaaaccttgagcttgcattcacctacctggtctaaccctcacatgtgctaattaacctgcaaatgccatttcctgggcttcacacacattccgtggctttcccttttcctgatgtgacttccctcccttaccccacacctccctgcactgtcccctgctgtgcccttggctggaatgccctgcagcctgcttcagcccagcaaagtattcatcttaccagtccatgccctgactcctgatgtcacccttccctgcatcacccttccctgtgtatttggtggataaggcttgattgaggctcaggtactgagtccctgctggcacattgagaaccagctgccaccccgatgataaggaagacagacccgggacttccatatgaattggatatgatcatctgacatgcaccctactaactgatggatcctgctgttaccccaaagctccagaaccacactggccagacacaggcatttcctgtcccctgaagagccactgaacccagcacaaaagagatctagagctctccaaacctatggaatggcaaccaaaaccatgcccaggttttgagttaagcctcattaggtctcccttttcccttgacagtgtagaactgtgcagcgtagcactaaatgaatgagagcagaagcctcaggacagaactgaacccaccaggttgagctgacaacactgccaggggttctatccacagatggaatattcgctttgatcactgagttaggaggcatgggtgagggatgcagagcgccgctcgtcatgagacatcaagctatccaagtcaatatcctattagtagggatggcatgttataaaaggcgtaaagatctcacctgccccagctggaagcagtgattccattgccccagattcggaattgtgatttaaactaggcctctcttcaggcatcagaaccaaattagagtgctttatacgtgcaaggaactaatgcagaaagacattatgggtaagtcaagggagatgccccagccattgggcaaattcctctgactcctccctgatggaactaattctttttcttctgtgcccggatcctagaatcaagattcttaaggtctgagtacaagttccgcttcaggatggcgctgctgcacagcagggcaccttgcagggccccgaccagtccacaggtgaagatatcctggcctgtcagatagaggttggggatggggctctgggccctcaaggaggccatcacacaagggtgcaggcggcccaggtcatggtcagccccgtagcaggcaccttaccagtccatgccctgactcctgatgtcacccttccctgcatcacccttccctgtgtatttggtggataaggcttgattgaggctcaggtactgggtccctgctg

SEQ ID NO: 55342 - DNA, 352 bp, Homo sapiens; identical to SEQ ID NO: 41775

SEQ ID NO: 55343 - DNA, 525 bp, Homo sapiens
  misc_feature (1)...(525): n = a,t,c or g
tgaccactgcatcaatagtggctgctggaattacagataagcttaggagagctagcctaaagacttttattactttcctccataaattaactggctctgactctgtgttgttcattatgggacagtgaggtatgatgtaatggaagggcatcaggctagaaaactacatggtcttaaggtcattggataatctcttggggcattgttttccttggtgtgtgatgaagctaatataatgaggtacttgtccagcctacctcacagggatgttgtgaggataaaatgagataatagatatgaaactggcttggaaaaaaaagaaaagcattatacacatgcaaggttaccacctttttattttcactgttgcctcatgggcacttatgttcatggctctaaaaattttagagtccttgcatattagaaatgnaaaaatggcctgcccagcaaaggtttcaanaattcatcttgcctacaggctgaccacagacagacattataatcctccgtctttcttattggcct

SEQ ID NO: 55344 - DNA, 404 bp, Homo sapiens
  misc_feature (1)...(404): n = a,t,c or g
ggcacgagcagattgtcaaaaattttaaaatttgataataggcaatcatgtagacagtttaggacagtggacactgttgagcattattgactggaatatatagtacttatataacctttttagagggccatttgacaatgtctgtgaaaatcatgttctttatgacacggtaaattattctgcaaagaatgtgtcccatagatatattcatagaagtaggcatatatacacacatgcttatagtattaaataatagctgtgcatttattaaaaagaatacagtctggggcactnnnnnnnnnnnnnnnnnnnnnnnnnnnnnnnnnnnnnnnnnnnnnnnnnnnnnnnnnnnnnnnnnnnnnnnnnnnnnnnnnnnnnnnnnnnnnnnnnnnnnnttgtgtcag

SEQ ID NO: 55345 - DNA, 206 bp, Homo sapiens
  misc_feature (1)...(206): n = a,t,c or g
gaccctctgtcccagttttatgaatcccaacagtctaacctgactgccttctgcttaaatcctcttgatgctattctatcttcaaatttacttttatttctgcagacacttcagttggagggagttcgaataccctgaaagcaacttacacatttatttcttgtagtctactgatcgtgggtgtgaaattncatttgaaatgctgt

SEQ ID NO: 55346 - DNA, 355 bp, Homo sapiens
  misc_feature (1)...(355): n = a,t,c or g
gctttgacagtacaatactttcttaggtaattaagattgatatttctacaatacttcattgggtaattaagactgatattcctgacatcttcaggaccttttgcacttcttgttttctgtgtttagttcacttgtccttcattgttcatcccttaccttcttgggtctttacccacatgtcacttgagtgaggccttccctgaccttaccttaccttattagtagaactcaaggccaggcatggttannnnnnnnnnnnnnnnnnnnnnnnnnnnnnnnnnnnnnnnnnnnnnnnnnnnnnnnnnnnnnnnnnnnnnnnnnnnnnnnnnnnnnnnnnnnnnnnnnnnnnnnctaa

SEQ ID NO: 55347 - DNA, 300 bp, Homo sapiens
taataattaacctcttacttgccccatgtaaagacaagcattattcctaaaataatgaattatgcaattccttctacagattgatagacataatccatgtaaagacaagcattattcccaaaataatgagttacgcaattccttctatagattaatagatacaatctctgttctctggtagagtggattacccaatttcttatcatttacctttgaacatgtacctgttgctaatttttggactcttacaaagtaaagatgttacttctcaaacagcattcatagaaattctaatatatt

SEQ ID NO: 55348 - DNA, 239 bp, Homo sapiens
cctagaactagagaggagatggttctgtcaccaaagtagccaaacagatatgctctcagagaaaacagaatcaaaagcaggatgactgtaaagcaggtgttcttccacatgggtggaggcagtagaggtgtgcagctcagaggaaacaggccacctgcaaacattggcacgggagaggcgtggcactggtaagtggaggtcataaggggaagttctggctcgagctatgaaggggcttt

SEQ ID NO: 55349 - DNA, 1083 bp, Homo sapiens
gctgacgggccggatcgccttcgccgccgcccgcccgcaaaccttcgtgcccggcccgtcctcgcccccgcctccgccaccgcctcggcccgcagagcttgctcccctccccacccgcagacatgtccgagtccaagagcggccccgagtatgcttcgtttttcgccgtcatgggcgcctcggccgccattggtcttcagcgccctgggcgctgcctatggcacagccaagagcggtaccggcattgcggccatgtctgtcatgcggccggagcagatcatgaagtccatcatcccagtggtcatggctggcatcatcgccatgttacggcctggtggtggcagtcctcatcgccaactccctgaatgacgacatcagcctctacaagagcttcctccagctgggcgcccggcctgagcgtgggcctgagcggcctggcagccggctttgccatcggcatcgtgggggacgctggcgtgcggggcaccgcccagcagccccgactattcgtgggcatgatcctgattctcatcttcgccgaggtgctcggcctctacggtctcatcgtcgccctcatcctctccacaaagtagaccctctccgagcccaccagccacagaatattatgtaaagaccacccctcctcattccagaacgaacagcctgacacatacgcacggggccgccgccccccagtaagttggtcttgtacatgcgcagtgtcctagtgcccatcgtctgtttccccggccttgcccccgcccgccccgtgccgtggacatctggggcccactcatcgcccctccaggcccccggcgccccaccccctagagtgctctgtgtatgcgggatgatttagaattgtcatttctctttactggatgtttatttataaagatctggcctgttcctgcgtctgcggagcggcgccttgtctcccagctatctataaccttagctagagtgtcgccttgtgggttcctgttgctgagacttcctggatggagccgccctcaccgccggggccccgtggccctgcgcggagctgtgtccaataaagttcttggatgtgaaaaaaaaaaa

SEQ ID NO: 55350 - DNA, 660 bp, Homo sapiens
  misc_feature (1)...(660): n = a,t,c or g
gggaaaaatttaanttttaaatttgnaataacacctgggaatgccaaacctttaacctcaattacccatttttaaacccccatgtttaaaaaagttttaaaaaatttgggtagaggcagaaagaggaggttgagttggagatgctggggggtagtcagcagctcagtcatcggtgcttgtgggctttgtttgatccgtgccttgactctctctggaatgggaggcttcgacgtcaagagggagctgctgccacccgtagttctgagcttgaagttgctaggacttctttcaaacttgtgtgctgaagagactcagatgttggtctcagctcctaggctgaattcagcagatcggcccatgaaaacttctgtattgagacaaaggaagggatctgtcagaaagcaacacttgttatcttgggcttggcagcaaggaagaggacaggtagtggagatcctgcaatctgaaaagcagactgaaaggtgacaaagaagctgaagatgggtggtggagagaggtataacattccagcccctcaatctagaaatgttagtaagaaccaacaacagcttaacagacagaagaccaaggaacagaattcccagatgaagattgttcataagaaaaaagaaagaggacatggttataactcatcagcag

SEQ ID NO: 55351 - DNA, 399 bp, Homo sapiens
atttgataggtggtgtagaatgatgtttacacctgccttatggatgatttatgttggaactgctaggcctacgtgtcagaatatctacttaccagaaaatcatagaaaaatatgcaagtttatatcactcacactgtggagaaaaccagtcagtaacaaactgttaagtcttaacagtgattataatattgaaaagaacaatatcaacagtagaacaaccatatcaagacagtggatcatgaagcaatgactataggattccctcctaaatttcgttcattgtaacacccacactgtgttctgtctctgtgcacagcacaacaaactcacttcaaagccaaatgaggacttggcatactcaggaaattctagtaatgagatgctcttagttttactgtt

SEQ ID NO: 55352 - DNA, 2099 bp, Homo sapiens
tttttcatgttaaaccaaaaacatgctttaatgccaggcaagagctacacagtcaactgatttacgggccactccataggctatgatttataaattatatattattaaatccaccgtgggcatacagatgggatgggacagcacccccagctccctcccactctgaatgatgtatgaacagttgagcactctgtagaatccttcaggtcgtaagccactttattccagtcccttgaacatcacaggctggttttatttgggacagaacaggttttatttccaaaggtccctgaacacagcaatgacaatgaacagccccagcagaggagtgacataaaccttgaggcatgcagtcttctgggtgctgtggagtcccttggccaaacttgagtgcactggattcgacatacaaagaccttccctgggaaggagaaggagaaaaacaacctccgagaaaatacagacagggtcagtggcaggccaggacagggactatttctatacattctggaagtgtcggcattcatcagcctgcatgtggctcacttttctttctggaatagccggagacctctactcctcactccagctctaggttccaaggaacagagtgggtctggctcagcgagatgtcatgactaagggcagagccccaggcaggtttctcaaaacattaactgattccacctaccaaaggagaatcaaaggaaggaactaggacttcgattcagagcagggaaaagtgggatgcagctcctgagcactgccaatagggcatgctaggtctcctcacccagtctgccttctgtgtcttaggttaattcgctattttccaaacacagattttaacacttggccatggaggaatttggcaagttttggtacagaaccactgtgaggaactgacccctggaggaagactaggattatttttacagagtctaggtctcaaaatttcaccctatggatttggttctttttggtctaccatacaaatttggatttctgctgccaattacagcagactcaagtcatatataaaaacctggaggttagcatgtctagtcacatttttctcctggtcatgatgtctctctttctgtggttcctcttctttggcaagtggcttggcagcaaatatacccactagggacctctctgccttctcttagtggcaagttccccatcaacaaccttgagaatttgggcctccctttgctaactacttgcaagagtatgactcgcctgtaaccagcaaatttttactcttagctttcaattcaaattagtgtgtctgaggtcaccagaccaaacagcaactcagacttgtgctgtcacttctggaaatagaagtctgcattcaaagagcacgggcaatggaaaatacttttggattctccataggggggccttggaaaccacagacacacttgcccatgtctttatgatgaatttgatgactgcccaacctctgattctttaacaggggcagggaaactgaatattccagacctggctccctaaccatgcacatagattaaaccactgggaagttccaagaatgtatgtgatgttttttcgagtctgcagagtattgatctgctcagaaaagcaccatgccgccagtctaatgctgtcaatgggctgctgggcctgagagggaaacccaccctactggtcccctgtcatacatgttaacattcctgtgctccaattgtcctgtcccactaccacctgctctgcatctgccctctaggcatggcccactctggaaatgcattcaaaattaaagttgggccctagtcagggttactttgtatttttatggaatatataaaatatacttgtcgattggtacatttgtgcaaagacagatatgacttccaaacaagacagacattcattatagttgtcttacttcacaataagctactaaaaacagtcttctggaataagattgtattagtgctcactaaacatgcatttcatttaaacaaggcaaaacacttaatttggtctgcattacccaatatgttatatacagccgtctttttattttatcacaataggcaacaagatgggtctggttttggaatatg

SEQ ID NO: 55353 - DNA, 333 bp, Homo sapiens; identical to SEQ ID NO: 42432

SEQ ID NO: 55354 - DNA, 498 bp, Homo sapiens
  misc_feature (1)...(498): n = a,t,c or g
tacgaatttaatacgactcactatagggaatttggccctcgaggccaagaattcggcacgaggttcgattagttgtgacatttacatgaggccttgggggaaaggctggttgccctaccctaatcttattatgcaaatgaattatctttggccagcaccatcttgtctgctcgtgtgactggcagataagggatgatggagctgccatcttgaacatgtctagcccctagttcctgccagcattcactcttgcaggctcccagcttgcttgtctgtgtctgcagcgcgactttacaggctgctcttcgttagagaatggtttggggctgcttttcattaaaaagaaaagccttactgaggattcccataccctcactatctgcctaagtgatttctttntaactcctatatcactgctgctaggacccattctgacatgaccttttctggagccacctcataaacttagcagtttaacaactgatatgatatttatac

SEQ ID NO: 55355 - DNA, 258 bp, Homo sapiens
ttattttatgcacatagtttggaaatgtgaaaggtaactaacagttttaatctacaactgttttgagacttttgaaatccataaaatagctaatgttatgtgctctaaaaatcctaatatttaaaatcgtcataaccctctgcatgccacaatgacatatacctaaggccaacttaaaaagagaaataatgcactcattaaataacagcaacaatgtaatgatacatgaaatgggctatacaatgacgtttcatgaag

SEQ ID NO: 55356 - DNA, 946 bp, Homo sapiens
tttccagaggggaattatatttattcacacaaccaaaacatcagacagactcagcagcagtggggagggagggtgggcagggctgaaggtccattcacagcccgtaaacccctcagtctcagggatcgggggtgctggtagtgggactgggagaatagtcttaatctctcaggtgcccacccaccttcccttcttactgggaggaagggtagagctgtctctcaggttataacctctcaggtggaggcctgagccctcagaccctactgcctagtagcttgacaactggtggtgtccccacaagttagggaaaagactcccagccactccttgagatgggtgcctgggatcccccttactgcctcaagctcccatggacctgtgggcggggagttaaatccctgttccatctcgcctgttcccagagtttgaggactttcaccctgtccagttcccagggaaggtgatgtgggagatgaatattgagatttgtgccgtgtctttcagtctctggtacccctgccaagcaagagttgagggcatgcaatgggctgcccagctttgagaccagtggcaaggaagggctggttggggctcaagtctcagcaggtgtgtgtggggggccgggacctttgctcctccattcgacccccaccctgaactctcagcagcaactccaggagctcttgcccccctggagggaggggaggctctgaccgctgggcttccatccgctggcactggtgactgaggatagtgctgtaaagctgttctctgtcctcgagaggacggagtggggcaggggctaggcttgaggggttttggggggtgtagaaggtggccctctgctcctccaggcggcgggactgggcttcagccaccaggtccagaaggagttcagtctgcagggagagcagggaggccgagcggggtcccagggctgtgt

SEQ ID NO: 55357 - DNA, 357 bp, Homo sapiens
tcctcaggtgagcagctttagtcaatgttgtgaattttagattttaattagacatgcaacagttttcactacctttcaggatttttgtcctgtaacagaggctcttgctttttgacagagaggtaggcaggtggagaggttatcctgctgctgcaggttctcaagttgttaagtttcctctggaaggctaacccttgttgggaactaacagtttcaataccagcaagtctaggcctgctccaagttggtcagctgaagaatgaacatcagaagacacagctgctgaaagttgtcctttgatgagacagtgatagtgatttggtaaaatgtcttattttttaaatgtcagttatcttt

SEQ ID NO: 55358 - DNA, 412 bp, Homo sapiens
caagaggtcaattgtgtgtatgtgcatctgacggctctcaccttctcacatcctctcactcagcgtgaaggggccagagctcattaacatgtatgtgggccaaagtgaggagaatgtgcgggaaggtgagtgagcagggaggggcagggcgtcccatgcttcccaaaccccgatggcccccaagccaccccctactcccaggctactcatgatcattcctaatcctcctttctacaagtcaggttcctgcccagctgggtctagtacctgggatgccagtgctgtattgtcaggccccagtttccctccctgctctcacctaacttcaaccccccacaagccgagctttgcctcctgtgggcccctctctctcttcagtgtttgcagggccagggctgcagctccatgcatt

SEQ ID NO: 55359 - DNA, 241 bp, Homo sapiens
gccagttctcatcacactgaatgttaaaaattacagttacagcagtgattgcaaattcaaagctctggtgcggataccaacagtgaccataaagttttctaggtgattccactagtttcttatttcttggatgtgtatgtgtagcatctggactaggcactgtagatggatgaatgggggaaattttatttagcttgaaaattgagatagttttggacctcatggttaggtctttctggga

SEQ ID NO: 55360 - DNA, 312 bp, Homo sapiens
  misc_feature (1)...(312): n = a,t,c or g
gccatcatgttatacagttacacaaaggtgtggggcagggcagggaactggcttgattcaaggcaacctggagcactgccctgtacatgtgcttattatttgaatgtgtatctgttagcattctgttttttttttttncntttaccnncttttnnngnnttnaannnaanttctttgaaaataggnttaactngtttttnntnattaangtatgaaaaantcagnnntntnanggnttttgncngnncccngnnaacccctttttnncgntananataccctttccnttgctgactngnatgtggnaanaaa

SEQ ID NO: 55361 - DNA, 394 bp, Homo sapiens
gggccgtgtagaccagtgaggtggtgtttagtcagctgcatccgccttgctgtgcgaaatgctggtgaaagctcagtgacttggagcaacaccaaaattcaatttttgcattttaataatagcttaattttgtgattatgcttaacaattctatacatccctaaataaaagaaagtataggccattctaagcagtcagaacttcagctttttctaccatataatggagggttttgctaaatttaaaaatgtgtccttgaagctgaaaggccacctctgaggcactctggggagagtgttcgctttccaacagtcgggaagcaagcaaatggcacacaccctagaccagtgagagaaaggcacttgcaggcctgttaggcattttgttggctaaa

SEQ ID NO: 55362 - DNA, 3011 bp, Homo sapiens
agtctacagtaaataaatggactttgaaaggaattcataattttagagcctctggagattatgacaatgactgtacaaatcctataacacctctttgtacacaacctgaccaggttattaaagggggtgctagtattattcagtgccacattcttaatgataagagacatatattaaccaaagataccaataataatgtggcatattgggatgtattgaaggcatgtaaagttgaagatctgggcaaagtggattttgaagatgaaattaagaaaagatttaaaatggtgtatgtgccaaattggttctcagtagacttaaaaacagggatgttaactattactttggatgaaagtgattgttttgctgcctgggtttctgcaaaagatgctggtttcagcagccctgatgggtcagatccaaaattgaatttaggaggacttttactccaagcactcctggaatattggcctagaacacatgtgaatccaatggatgaagaggaaaatgaagtaaaccatgtaaatggggagcaggagaaccgagtgcagaagggaaatggatattttcaagtgcccccacatacacccgtgatctttggtgaagctggaggtcgcacactgttcaggctgctctgccgagattccgggggtgagactgagtctatgcttcttaatgaaacagtgccacaatgggtaattgacatcactgtggataaaaatatgcccaaattcaacaaaattcctttctacctccaacctcatgcatcttcaggagcaaaaaccttaaaaaaagatagactctctgctagtgacatgctccaagtccgaaaagttatggaacatgtttatgaaaaaattatcaacttggataatgagtctcaaaccactagctcttctaataatgaaaaaccaggagaacaggaaaaagaagaagatattgctgtgttggcagaggagaaaattgaacttttgtgccaggaccaggttttggatccaaatatggaccttcgaacagtgaaacacttcatatggaagagcggtggagacctcaccctccattaccgtcagaagtccacgtgaaggctgggctaatgctcctggatattcatttacgaccttcctctatggccccaagagtagtcctaggaagcccactgatccccaacgggagcaagacttctaacggctgattggtatggaccgagattatctttcaattgaagtgactaatcgagatgtaatatagaaaccagtctccatgtgtagattaagctgtccccagggaagcagagtgcaagagcagaagagccccaagcagactatgtctttcaagatgtacagaagactgacaacaggccagtgcagactttgcttcctccttttgtttcaaaggaccttatctacccattaacacttgttagagacacctcagtcgggccacaactgtctctgtttcaactttaagcccacacactctgtagcttttctaaaacagtacattccattcatgcagtagatatgaaggctttttccaagtttgtcatataaagtaatcaaattgttttcaccgtttaagacagttatttttaatgggaatttgctgttgcacaatttgagaaccagcccatttcataataaaagattaatgttgggcttgttgttaatattgcatctcagatgtgttcttgtaggaagatctgttgaaattccaggtgctggatcatagcacttggactgttgggccggagtttgtgcagcccatgcctagcgatgctgcacctcccatgatgtcctggctttgtggcaaccccagggaggtgcagcagtttcactccttcctccactgtgtccagttttatttacacaaagcgagctgagaccacaggttcttgctctggatgagcagcatgacaccatcaaaatttaagaccatgatgaaatttcagtttcattcaaatgttacctaaaatttatggtgtcagaataaagggagatcatagtgagttaatttgatattcatatcctggaagtatacatatttgtttttccaaagttttatatgcaggtttttgttgtacctgtatccagatcttcttttcactgttctaacaatctaacactttcatagaatcatttggatcttgtatagagtgtaacttattggggataaacacttcaacttttggcagaaaatactttggattctccccaaggtcatttgtattcagagtaaatcagtggtccacccccataaaactgtaagacaagcctcctgtatgaagccagaagcacaagtgccttcagagggcagttgattccagtccagttgcctccctagcttgtgtgtggcctgcctccaccatagcagggactagggagggaggcagggaacgttttttcttttctacatcttcacaggttcggctgggggcagctgataggcctaaggccataccttactatttaagatactctgatcgcacaactgcagagacagggttccctcactgctagtcagcttcttttggaaactggacaggccattgccacctgcactttgaagaagtgagcaaagacgtggccacatttctaataagttgaaatggtctttctcccttcctcagagagcaaccagcttcttttttttttaaaagtcctttctatctgttggatacaacagtgtgcttttggtgcacattttttagcaatagttgtgaattaatggcaaagaaaaaaaaaattatttaccagccctcagttgtgtttcgccgaggggcctttgagcaaagaaatgggttttgctgggtcattttgccctgtgtgctaagccttgggtggctgcattcccctcctgtcatagatctgacccccagcatgattgtatttctttcccctccagtcaaaccgtaatacagtttccagaaaattcgacagtctgcaatgccaaaagggtaaaaatctgtatttcacagttgtatagaataaaggctttagttaaaatatttcaaa

SEQ ID NO: 55363 - DNA, 312 bp, Homo sapiens
aaagtatcttaaaaatattctctgacctggaaaataggtttacagtagctacaagattccattttaggttttcttatgtcaataaatgtcaatattttacacttccagcaaaagtacccgttaaagctaaatctaaatattattcctcatagcacagtttctggtctccttaaattaaggatcctactcatcaggattgaataaaaagggggaaattcctaaaattggtatattgtataatattgtgggttaagtaaaatttaggggggcattatggaaatgtacctattttaaagggcaggggcaattacc

SEQ ID NO: 55364 - DNA, 208 bp, Homo sapiens
aaggacttgggagtgtaggcccctctgcagctctgttctccctgtaaattaacacctaggcccttggttttttccctgcagggcctgatcactgctcatatgagatgctcaccactccagggagagtgggctgacacagctggtttctgagacttcagagctgcatttctttctttattttattttttactttttcttttttcctcta

SEQ ID NO: 55365 - DNA, 722 bp, Homo sapiens
  misc_feature (1)...(722): n = a,t,c or g
ctggcttacccagcccaaaggaccccactcccgggggtctggggacctgaaggctcttgtctgacccctctccccacctgtatttcctggctggccttgcgtgcctctgtgtttagaagaaccgacgagtttattagagaaggaaagactgcactgtgtgaccttgaataagacagttcgcccgtgcctcagtttccctgactttcacgcaaggatcaccacggtttcctctgtcaagttcctgagatggcaggggggatttttgttctcccagcacctgcggctgttgagaccagagaagctggtggtcgaccacagcctggggtattagtttcaccccttagcttctccccagcgagaccccagggcccttgggcacaggggattaagcctctatctgcttacgtgcaagcggaagaaataggcccagagagcaacagtggcgggtctgcagtcacacagcccaacttgcgcttgtggcagtggcaaggttggaagctggttcagtggggctgtcgaccacaggtaccaaccctgccctcccctacagagtatgtgacgtagcacagccaatgactgcatcccagtgcttcgaccagtcacagggtcannnnnnnnnnnnnnnnnnnnnnnnnnnnnnnnnnnnnnnnnnnnnnnnnnnnnnnnnnnnnnnnnnnnnnnnnnnnnnnnncagncctgggtgaaaccccatctctaataat

SEQ ID NO: 55366 - DNA, 59 bp, Homo sapiens
cttggctgtaagcaagacaacagctcttcccctaagcccagctccgtgttcagaaatgg

SEQ ID NO: 55367 - DNA, 401 bp, Homo sapiens
  misc_feature (1)...(401): n = a,t,c or g
gaggaacatgggcaaagccagaggagccctaaggcaggacctaatgtcacaggctggagaactccaagggtaaggaccctcagccttttgcattgacccgtggctgtctctctctaacacagtgatctctagagctacagtttagcgagcgtgattttaaannnnnnnnnnnnnnnnnnnnnnnnnnnnnnnnnnnnnnnnngctgccgccaccgctgctgctgcagctacttctgcttcttctgctgctgcttctccctcttcttcctcctcctcttcttcttcctcctcttcttccttcttctccttccttccttctttcttcgtatttcttctttcttcttcnnnnnnnnnnnnnnnnnnnnnnnnnnnnnnnnnnnnnatttcagtttactgcagct

SEQ ID NO: 55368 - DNA, 606 bp, Homo sapiens
ctgcgttggagatgatgtctcaggccatgattaggggcatgatggatgaggaagggaaccagtttgtggcctatttcctgcctgtagaagagacgttgaagaaacgaaagcgggaccaggaggaggagatggactatgcaccagatgatgtgtatgactacaaaattgctcgggagtacaactggaacgtgaagaacaaagctagcaagggctatgaggaaaactacttcttcatcttccgagagggtgacggggtttactacaatgagttggaaaccagggtccgccttagtaagcgccgggccaaggctggggttcagtcaggcaccaacgccctgcttgtggtcaaacatcgggacatgaatgagaaggaactggaagctcaggaggcacggaaggcccagctagaaaaccacgaaccggaggaggaagaggaagaggagatggagacagaagagaaagaagctgggggctcagatgaggagcaggagaagggcagcagcagtgagaaggagggcagtgaagatgagcactcgggcagcgagagtgaacgggaggaaggtgacagggacgaggccactgccactcttgtcactgggtcgacgc

SEQ ID NO: 55369 - DNA, 435 bp, Homo sapiens
ggatcccaacctccagtgtatcagaagagcaggaatcttcagagggacaagattcaggagacatttgctcagaagagaatcaaatagtttcctcttatgcttctaaagtctgttttgagatcgaagaagattataaaaatcgtcagtttctggggcctgaaggaaatgtggatgttgagttgattgataagagcacaaacagatacagccgtttggttccccactgctggctggtatctgtggtcagccacaggcctcggcttcctggtaagggatgaggtcacagtgacgattgcgtttggttcctggagtcagcacctggccctggacctgcagcaccatgaacagtggctggtgggcggccccttgtttgatgtcactgcagagccagaaggaagtgtcgccgaaatccacctcccccacttcatctccttc

SEQ ID NO: 55370 - DNA, 2891 bp, Homo sapiens
ttttttcccagaaaaccacactgctcttttattcaatggaacatccccgctttagcgcagtgttgaatctaacaccgaaaaaagcccagagaaatttctgcagataaaccagtgaagagaacgcgcagtatacattattgtcaacagaatcacttcatggagagggaagcgggaggaaaaaggaaggagaatgaacaaggggctcaaacccctacacactgcaaaacattcagacatttgggattaaaacaaaacataaaaggaagccttccaggaaggagaggaccaaatggaatctgaggcagctcaggtgatcaaggagcacaggaagaactcccaggctggcaggcgagcccgagggagctcaggctgcccacccactgctggcaggattcgccaggacggatgggaatcccgaaacctggagatgaacctaccctcggcaactttacaagactcccttgacaagggtggcagagattaaaaaaccccacgctttaaacaaacatatttgggggtggctatggcaccttgaaaaacccacaaccagcttgacatgaatggccaaagcccttgccccaaaaccatttgctcccctctccttggtaagggaaggagaactggagagaagggaaaggaatctaaattgcagcagaagaccggggagagcatctcccttggacggagtctgaagaaaggaaaagataaagaagtaacaaaggaaaaaaaaaaaaattaataaaaatttcacgatatggagccagcgtgttccgattccgtccacaaaaataactcaggctgctttgccgaaccatcctgtccaccaggggcgttgctgaggctgtctgcctggaagggtcaccaatgggcgcggaaagtcctcactctcatggctcgggccatcgccgccgcggggagggatctttgctgccatggcaagggggtactggaagccatactgctgctgggcggagggggtggcggaggctgctgctgctgttgttgccatgggggaagaggaccagagggagggggtgggggctgcccactgggaggcggcggcggcggcggcatcatgcccataggtggtggcggcatcataccttttccttgatgcaggcgatagaccccagagcccacaggcgtacttcccaggtactgatttacccattggaggagggccatggtgcccaggagggtgggggccctggttcatcggtggtggtggtggctgcatccaagggggtgggggtccattggggttgtgctgcatgggatgtccaccatgcccacctgtcaggctgggtaatgggtgtgggaagctgtgggggccacctccgggcccaccaggaccacctccatgcatgccgtggtagggccgactctctgaagggccagaattcatccagggtgggcggctctgggtggtagacatgagagacggtggaggtgggttgttggcgggacgagcaggacgaggtgcgctggccaggggtgtggtggcaggcccagaggtggagcccacagatgctgggacaggtgcttcacccagttcagccatgagggacaaatattctttatccatccgtgctttatcctgagctgactgaggatcaccaggcctttggaatttacagtctgaagcaatgtggccagcccctccacacttggtacacactgtggtgttggtaatgctgcgggtctctgagctctgccagggtcttaagatcctgttatcgtcttcccgaagggtcccatttaagcgagccaactcccgaagctgcatcttccgtagatcattctggtcctctggagtctcgataccctgcttcaggatgtttcttatctgttccactgcctttttgacgttctccattgtattggcagtaaccagggcatgaagtggctcatcttctcctggcaacatctggccatctttgcgcccaaccttcccttctttcacagaccctttcccccggatcataatcttggcattgcactccttctctatgttcttcagggtgttccctctgggcccgatgagcagccccacaaagttgatttctgggtactcatcttgtggaatcatgactttatcactcacacgtgttgctggaggtttgtaatctgcaggtggcttgaaatccggattgagtgcaaccatctctgtgatgaggttgtgccgctcctcttccagctttttgcgggtgcggaactctcgggtgttaagccgcttcccctcgctattgtagatgggctcaggggaaggggacctgtcctcagggttaggggggatgcccaggtctcctgtgcgcagtttacgagtcaggtcttctatctgcagttgcactatataagctctttcttgttctcgagtaagtccagggggaataactgtaggcattcctggaatcactgtcttctgttccattgtgtcttggttccagcggctcctcttccgcttcttacttgggaagtccaacggcgtggcgttcgctccggtcgccatggcgcccccggggacaggcaccggcacctgcttttcctctgcggcggcttctccttcgcaagcctcccggggggaggggacccgaatgcgctgccggagcgcgcggagcccgtcctctcacgcggcgggcggcggcggcgcgagacgcacaaagagggaggagagagggcaccgcgggggcgggccgggggcggcggggccggggcctggattgggccgggccgaggcgaagggtcgaaatcggcggcctccgattggcggagcctcagtccttcttgatgcgcgctgggattggccgaaccgttaggccaagcgaggaaatggcggcggagttcggtgggctgggaggtgtcgcagcgcgcacttcatttcgacagcaacg

SEQ ID NO: 55371 - DNA, 336 bp, Homo sapiens
  misc_feature (1)...(336): n = a,t,c or g
acgcctcccagggcaatgcagatggcgctgtgaacctcctttaaggagcacgggaaagacaccacgtgagggtgacgatgtgacagcaatcacaaatgcctgctcacgggacggacgagaacccagctgtgcagcgctttgcgaggggggcctgaggccctcagtgactgcagccttcgacttagaaacggctaagcctgaaatgatgggnnnnnnnnnnnnnnnnnnnnnnnnnnnnnnnnnnnnnnnnnnnnnnnnnnnnnnnnnnnnnnnnnnnnnnnnnnnnnnnnnnnnnnnnnnnnnntnnnnnnnnnnnnnnnnnaaaaaaaaaaaaaa

SEQ ID NO: 55372 - DNA, 514 bp, Homo sapiens
  misc_feature (1)...(514): n = a,t,c or g
ttgaangcnattagctatgacatgattacgaatttaatacgactcantatagggaatttggccctcgaggccaagaattcggcacgaggactcaatactcgggtataaagcctggtgacctcgatgccaaaatttcctccaagcacctaacaactctcaagtctacctacttaaagcttcgttttctcattgacattggagtcaagtttgtgggtcatggcctgcagaaggacttccgggtcatcaacctgatggtgcccaaggaccaagtccttgacactgtctacctgttccatatgccccgaaaacgaatgatttccctgcgattccttgcttggtactttctggacctgaagattcaaggggaaacccatgacagtattgaggatgcccgcacagcccttcagctgtaccgaaagtatctggagctaagcaaaaatggcactgagcctgagtctttccacaaggtgctcaagggtctttatgagaagggcagaaagatggactggaaggt

SEQ ID NO: 55373 - DNA, 1791 bp, Homo sapiens
  misc_feature (1)...(1791): n = a,t,c or g
cacgcacagggcggcagcctggtggctcacatcaaagttggagagacctaccaccagcgcaaggagggcgttactcaccagcagtggtatctgttcaatgactttcttattgaacctattgataagcatgaagctgtgcagtttgacatgaattggaaagtacctgcaatcctttattatgtcaaacggaatctcaattccagatacaacctgaacatcaagaaccctattgaggcaagtgtcttgctggctgaagcctcgctggcacggaagcagcggaaaacacatactacctttattccactgatgctgaatgagatgccacagattggggacctggtgggtctggatgctgagtttgtcacccttaatgaggaggaagcagagttacgcagtgatggtaccaagtctaccattaaaccaagccagatgtcagtagccaggattacctgtgttcggggccagggacccaatgagggtatccccttcattgatgactacatctctacccaggagcaggtggtggattacttgactcaatactcgggtataaagcctggtgacctcgatgccaaaatttcctccaagcacctaacaactctcaagtctacctacttaaagcttcgttttctcattgacattggagtcaagtttgtgggtcatggcctgcagaaggacttccgggtcatcaacctgatggtgcccaaggaccaagtccttgacactgtctacctgttccatatgccccgaaaacgaatgatttccctgcgattccttgcttggtactttctggacctgaagattcaaggggaaacccatgacagtattgaggatgcccgcacagcccttcagctgtaccgaaagtatctggagctaagcaaaaatggcactgagcctgagtctttccacaaggtgctcaagggtctttatgagaagggcagaaagatggactggaaggtgcctgagcctgagggccaaacaagtcccaagaatgcagctgtcttctcctcagtgctggcgctctgactacccttcccaaagaaccacggccctctccctttactggtctatagccccagaactgggaagatggcttcctaagttggctataccttgtccacttccagtactggacgtgctcagggtctagggtcacagatggtgctattaattgaactggaacacagcagaattgttgcaaaggttctaggagccagattcattccttcttcattctttgcaaaacagtggtacagacatggagtctagaattgacccagatggaaagtaattggtattcttaatatcctgggtgactaatatccaggcagagaagctcctggaaccataactgtaagttcctagctggctagggattgaagtcctggacagtgacagaggataccacagtagttcaagacttagcacaagtcaccaactgcttcagggatacctggaggggccagcaagtagagtgttggtggcccaagcaaaccagtgttgccaataccattgccaaaagggcctttggatcctggacaaagcttggctgccggcttcatttattcctgctgatggctgagaagcatctgtcttccatcccacttgcctgtcccaagttttgttccattttttaaaaatttgttgtaaactgcatgttttataaaataaaaataaaatatcgtttgttatttatcctcgtgccgaattcttggcctcgagggccaaattccctatagtgagtcgtattaaattcgtaatcatgtcataacngttntccaannnnttcaa

SEQ ID NO: 55374 - DNA, 260 bp, Homo sapiens
gctaaaagtaaactctggcaaaccttcttaagacatttgtctgttcttaggcatatttgtaatctaattatattattcttccgcttaattttgcgttaaaaataggaatgcctttcacaaaatattttttcccatccaacctccatttcttttcttttgctgtccctttggccaggaatgctgcagtgctagaactatgcagtggtaaaccattgctgcccatttttgcaccttttaaaggagctaatcagtgtctaagc

SEQ ID NO: 55375 - DNA, 486 bp, Homo sapiens
cccagcaccaactacgacgccaagcgttacactggaaactactttttaaagcaacaaaagagtctaaaacaaaatacaacatttcttaaatacactgtttccagaaagagctattttaacagaagcaactcaaagatatcccttcgacagaagtggaagtgctgaaaaatgctcatctctcacacagacttttgatggacaggagtttctaagtatcatgcctaccaacaagctgtaaaatgatcaccctgaacaatcaagatcaacctgtcccttttaacagctcacatccagatgaatacaaaattgcagcccttgtcttctatagctgtatcttcataattggattatttgttaacatcactgcattatgggttttcagttgtaccaccaagaagagaaccacggtaaccatctatatgatgaatgtggcattagtggacttgatatttataatgactttaccctttcgaatgttttattatg

SEQ ID NO: 55376 - DNA, 321 bp, Homo sapiens; identical to SEQ ID NO: 38850

SEQ ID NO: 55377 - DNA, 397 bp, Homo sapiens
cttttatagtacaaccccttgtgaaactggagctcaggcaggcagtagtgccattggccccgaaggtttgaaagatagcagggaagaacaggttaaacaggaatcaatgcaaggaaagaaaagttcaagtcttgtggatatcagagaagaagaaacagagggaggcagtcgaagactctccctccctggattgttgtcacaagtttcccccaggctcttaagaaaggctgcacgggtgaaaacgaggacagtggttctgacccccacatacagtggagaagcagatgcgctcctgccttctctgagaacagaagtgtggacctgggggaaagggaaggaagggcagctggggcacggcgatgttctgcctaggcttcaaccgttgtgtgtaaaatgc

SEQ ID NO: 55378 - DNA, 1135 bp, Homo sapiens
tttttttttttttaatataaaatgtttttaattgtttttgaaaacatttaaaaaacaatttttgagcactttaataaaaaaagagaactgaaatgctaccgcaatattcaactactgtagtttcagcaggtacaacagacaacaaaacactggggaaatctgactttttgcactaaatgaaacatgaaacagggcttgtttttgtcatttatcgtgtagtaaagcacattatagtacaagactattatatgaacctcagaagcactgcacaaaaaaacactttccttcttttcagttcaaaagtcagtgcttattgcaattatatgcaaaattatttacttcatgaagttttatgataaacagtatgcaaaatgttttaaacatcaaaacaataaaaataatctggaacagaacatattcaacaataactaagcagaattagtaaacataaagtaaataacctgtgaataactatgcttgcctggttaacactgaaccagtttcaatacagcgaagaaaaaaaagagtggttacaggaatcctagtactgtacaagataagtcaataacactcatgcacattttgtgatcatgtattaacatggtgaagcaaactaaacttaattcttcctgctgtaatattctcatgtaagagaataatagaaatatctcattgagatcaatgcacattgctacataagacaattttatctgtcactttgatgacattttgtcttttcataatgaaacacatttaaaaagtttaatctgtggactgtattggttgcatttatcctaagagatgtgcctaccacaggttcaacaaatttagtgcaatatatgaaccccagaaagtttgctggacgaattcaaccaaatttaaagagtttgctgcaatactgtacaaggggttaaaaatcctccagtcttaatatttttatcaaaaaagatttccattatttttatattagtaggaagctaataatgtaaacaagggattagaatggcctcaaaatctccttttcagagtatctcataaagaaaggctcccatcatttgtcaggagaaatcacacagtttcctttgggtattgcatactttggtgtgcagtagtgctgtgtctcaatgtacagtga

SEQ ID NO: 55379 - DNA, 329 bp, Homo sapiens
tgattcgaatttaatacgactactatagggaatttggccctcgaggccaagaattcggcacgagggagcggcagaaggacgagccgccgtgcaaccaccacaacaccaaagcctgcccagacaagcctcggcagcccagcccccagccatgcctaccacgggggcgtcctgtagctatgccagcggggctgggcaggccagccgggcatcctgaccgatgggcaccctctcccagggcaggcggcttcccgctcccaccagggcccggtgggtcctgggttttctgcaaacatggaggaccactttctgataggacatttccttctact

SEQ ID NO: 55380 - DNA, 362 bp, Homo sapiens
cttatctccaaataagaaagaaatcctcttggtcatagatatgatttctttacaccaagtttgttcgtggatgccagtcacaaggggtttgtccctagggtaatatagtttgctttgatcatttccaagagtaagttgtactacaggatagcagaagagatgcgcttaaaaagtatggcaaaatgcatattgagacaatagcatgttggccagacacagaggctcacgcctgtaatcccaacactttggaaggccgaggcaggtcacttgaggtcaggagttcgagaccagcctggccaacatggtgaaaccccatctctaccaaaaatacaaaaattagctgagtttggtggcacgtgcct

SEQ ID NO: 55381 - DNA, 435 bp, Homo sapiens
ctttatttttcacacaactcatccaagtgggttctgataaaatcagtccagcacttttagaacccactgataacagacttattcctggagacagcatttgaggaggaattgaagatttttctaatgaaaagaaaaagggtcacatgaacagatgttgcagtgtacctgtgccagggatttcatgtgtacactttataggagaataagcaagagcttaggtaagttatagtccttaccattgggtctaaggcagtttccaggaaagcatggcaactcgttcagctatgtaagttgaactctgtaccacttgggagggaacattcccctagatgacaatgtcagtggcactcgaagttgtgcagtgcacattcttatctaccaacatatacagcagtccttctgggaaggaaatttgggcaggaaagggaactcaca

SEQ ID NO: 55382 - DNA, 337 bp, Homo sapiens
  misc_feature (1)...(337): n = a,t,c or g
gggaaaaagattaccctgacacctgggtttgctccatgaaccctgatcctgaacaggaccggtgtgaggcttctgaacaaaagcagaaggttcccctgggaacattcagaaaggacatgaagacgcaggaagagaagcagaaataactgacagagaaaattcgccagcagcaggagaagctggaggcccttcagaaaaccacacccatccgctccctagcagacctgaagaaattgcccttggaagtgaccaccagaccttttactgaggaacctgtgcgtagaccttacgtcctnngncgcccntttcctgtgtgatcaagaacngcccccagtag

SEQ ID NO: 55383 - DNA, 417 bp, Homo sapiens
gcgacgagaacgaggagtcgagcgttgtggattacgtggaggtgacggtcggggaggaggatgcgatctcagatagatcagatagctggagtcaggctgcggcagaaggtgtgtcggaactggctgaatcagactccgactgcgtccctgcagaggctggccaggcctagacagggaagtctgttagaactgctgtgctgatcaacgggacgctccgtctttgaagaaagaagagatggtctctccccagccatgggccacccttgccagtgactccaagtggaactacttagctcgcgtgtgcctggagggtgcgggaagtccagcgactctcagacgcacctcccagaggaccggtgggaattgttcatagtgccaaagtcctactactgcgttttcagtgggtccttgtacata

SEQ ID NO: 55384 - DNA, 401 bp, Homo sapiens
gcacaatgctgcaaaatgactggctcataaaccactaagctgccttggcagccacttgttattgttaccagtaggtaatatgctgttttcttctgcttggcacataagcagtaggcatgaaataattgcttaatggataagtaagttgttaaattataaaactctgatggattgcttagtcctttaacaatttacacccccctcccacttatccaattcttttgtgacagattttgcactagcaaagtgcactgtttcagacaatcaaggaaataaaacatttcttgatgaaatcctacctcgcctcaacaggaaactgaattggagtcctcaattctcagtacatcagaactagtgtgtgaaaggatcaggagaggaccatagtattggagaataaaaca

SEQ ID NO: 55385 - DNA, 397 bp, Homo sapiens
ctccaattggccattagcacctacgccgcctacatcgggggctacgtccactacggggactggctgaagcggtgctggggagctgtaccgccggaaacctcgcagccgctccctgcagtccaccggccaggtgttcctgggtatctacctcatctgtgtggcctactcactgcagcacagcaaggaggaccggctggcgtatctgaaccatctcccaggaggggagctgatgatccagctgttcttcgtgctgtatggcatcctggccctggctttctgtcaggctactacgtgaccctcgctgccagatctggctgtactgctgcccctgtatgctgtcattgatggcaatgttgcttactgcacaacacgcggcgtgttgagttctggaaccaaa

SEQ ID NO: 55386 - DNA, 1602 bp, Homo sapiens
gcttcacgtggggttgttggcattttcttcctctctgctgtcccccttatgtgtctggagctccggcgtgggatcccggatataggtaagtgtgactttttcccttcgacagtcacagctgggtaattttcacaggaatgttgcatagaacgaccgcctcttcggctgcgtggcttcggagcagctttgactacaactcccagactgcatcgcccctgcccccccacttccggagctgacttcacttcgaggaaccttttccctccaggaatcaaggattttcttttgctttgtggccggattttgctactgcttgctcttcttactttaattatttctgtgactacctcatggcttaactcatttaaatctccccaagtttatctgaaggaagaagaagaaaagaatgagaaaagacaaaaacttgtgagaaaaaaacaacaagaagcacaaggagagaaggccagcagatacatagagaatgttttaaaacctcaccaggaaatgaaattgagaaaactggaggagcgcttttatcaaatgacgggtgaagcctggaaattaagcagtggtcacaaacttgggggtgatgaaggtacaagtcagacatcttttgaaacatcaaacagagaagcagcaaagagccagaacttgcctaaacctttaactgaatttccgtctcctgctgaacagcccacatgcaaggagattcctgatttacctgaagaaccttctcaaacagcagaagaagtagttactgttgctctccgatgtcccagtgggaatgtcctgaggagaaggtttttgaagtcctacagctcacaggtcttatttgactggatgacgagaattgggtaccacatatctctatacagcctttctacttcctttcccagcacggcctctggcagtggagggaggccagtcgctggaggacataggaataactgtggacactgtactcatcctggaggagaaggagcagaccaactaggaaagaagggagagctccctgtttgcatgaagtcagttatgctatgaccttctggcacaataaaggcttcactttcaaatcacaccataccttgattgagctcatggcagtaaactttgaacattgatatccatgggaataggattagaaaaggattgctttctatatataataatctgtggactgtgccattttacagtgtaccaaatgagaatgaggttgaaatgtatgcagtaaggtactcagtaattaattggtattttttcccagctgacatgatttctcagtgttagaaaacaaacccttagaactttcctttctgcctcttcaatccatcttaccacacaatatttcatgattcaaattcttcaaagtcttatacgcaggaatgtttattctgctgtatttctgtgaaattaaaaacttggaagaagcttcaaagctcttggaggctttaaagttctttctgttgggtgtgcattacagtttacttaactgatgtttgcgatttatataattttgccttgtattaaatgttacaaagttccaaatgaatcagtattttaaaaaataaaactatgaaagcattaaaatataggtgaattttt

SEQ ID NO: 55387 - DNA, 585 bp, Homo sapiens
  misc_feature (1)...(585): n = a,t,c or g
tattttcttcccacttccccatggatggtctagtcatgcctctcattttggaaagtactgtttctgaaacattaggcaatatattcccaacctggctagtttacagcaatcacctgtggatgctaattaaaacgcaaatcccactgtcacatgcattactccatttgatcataatggaaagtatgttctgtcccatttgccatagtcctcacctatccctgttgtattttatcgggtccaactcaaccatttaaggtatttgccagctcttgtatgcatttaggttttgtttctttgttttttagctcatgaaattaggtacaaagtcagagaggggtctggcatataaaacctcagcagaaataaagaggttttgttgtttggtaagaacataccttgggttggttgggcacggtggctcgtgcctgnnnnnnnnnnnnnnnnnnnnnnnnnnnnnnnnnnnnnnnnnnnnnnnnnnnnnnnnnnnnnnnnnnnnnnnnnnnnnnnnnnnnnnnnnnnnnnnnnnnnnnnnnnnnnnnnccaggcaggtggtgtgtgcngtagtccaggatcnctgaaccngga

SEQ ID NO: 55388 - DNA, 469 bp, Homo sapiens
  misc_feature (1)...(469): n = a,t,c or g
tttggggnnnnnnnnnnnnnnnnnnnnnnnnnnnnnnnnnnnnnnnnnnnnnnnnnnnnnnnnnnnnntctcgaggatccgaattccnnnnnnnnnnnnnnnnnnnnnnnnnnnnnnnnnnnnnnnnnnnnnnnnnnnnnnnnnnnnnnnnnnnnnnnnnnnnnnnnnnnnnnnnnnnnnnnnnnnnnnnnnnnnnnnnnnnnnnnnnnnnnnnnnnnnnnnnnnnnnnnnnnnnnnnnnnnnnnnnnnnnnnnnnnnnnnnnnnnnnnnnnnnnnnnnnnnnnnnnnnnnnnnnnnnnnnnnnnnnnnnnnnnnnnnnnnnnnnnnnnnnnnnnnnnnnnnnnnnnncccaanaggtggngnnnnnanngncnnnnatgcngatacctgccctcaacgcctacatgaanagcctgctcannctgccggnctgggtgctgatggatgangacgtcggatcttcttttac

SEQ ID NO: 55389 - DNA, 422 bp, Homo sapiens
  misc_feature (1)...(422): n = a,t,c or g
aaatgctatatctattcaggggctctcaagaacaatggaatatcatcctgatttagaaaatttggatgaagatggatatactcaattacacttcgactctcaaagcaataccaggatagctgttgtttcagagaaaggatcgtgtgctgcatctcctccttggcgcctcattgctgtaattttgggaatcctatgcttggtaatactggtgatagctgtggcctgggtaccatggctatttggagatccaattcaggaagcaacacattggagaatggctactttctatcaagaaataaagagaaccacagtcaacccacacaatcatctttagaagacagtgtgactcctaccaaagctgtcanaaccacaggggttctttccagcccttgtcctcctaattggattatatatgagaagag

SEQ ID NO: 55390 - DNA, 592 bp, Homo sapiens
  misc_feature (1)...(592): n = a,t,c or g
gccacgcgtacgcccacgcgtgcgcaaatgactactttatgaattgttccacaaatttgccagctattattcacgagctacatattttatccaactgaagtgtttattctgtgacccttattttcatataactctctataaccattttgcttctaccatacttactctcacattccttccctagcttgccttggcctccaaaacaaaaaagcttccaccatgaaattactaattgatattctgccttataaactttgccttgaaagattcctttgaaaaattaatttcatttcctcgatctagccaatgataaaataatgatgacagcaaacagaagtagaaacagcataattttttaaaaaaggaaacatcaaattttgtattgaaaatttacatcagcatttcactagtgaacagacatttcctctgagaaagagtgataattaccatttgcacctcatgtaaggattttcctgaggcctaagaaagctataaataatatagtttcttttgaaataaaggaaaaaaatttaattttctttcatcacactaacaagangtaaataggttgcaataatggtgtagtaaatgg

SEQ ID NO: 55391 - DNA, 148 bp, Homo sapiens
gaaaatattaatattttaaggaatgtggttggagagctgcctttacacttactttggaagatttctttaggtttggttatatttttctgaaaaacagtgaatgctatactaaaactgctattagtgatttaaaaaaatgctaatttga

SEQ ID NO: 55392 - DNA, 237 bp, Homo sapiens
gttgtacacagcatatatacataatttttatttgtgaattatacctttataaaactgggggaagagtaaaaaagagagtatggaggaaaatgtgaaattcaaagctagctaaggggttatcctctgtgtttgggattggttccctagagaactacataactaggaaaagagtgaactgaaaatagaccaatagcctggctattacagggccttatgtccccttaaaaatcatctcac

SEQ ID NO: 55393 - DNA, 438 bp, Homo sapiens
atctaataccgactcactatagggaatttggccctcgaggccaagaattcggcacgaggtgcattctccagtccttgcaagaaggatcagtcctttctgtgccagcctcgatcgccttgtgctttggtctctttttctcccccccgcctggatcctgcctcgcgcgggccgtcctgttgctgagactcggggtaccgttctgctgacccagctccctttagtcacgtttgcttggctctggtaccaaatagttgggattaccgaagagttcccttccttgcgtgtcagcacggatgctgtgactgccacctgcgtcctcatcaagtgcccgagctcgccgccgtgtgtgctgcgctgagtgagttatgaggtgcctttcccggaaccctcctctcgcctggacccaagagaggcgacagctgtggctggggctcttgg

SEQ ID NO: 55394 - DNA, 830 bp, Homo sapiens
tttttttttttcatgcaaaagtgttgttttttattttctttcttgggccagctgcagcttccaaccaagaaaacctcaaagcattagggaaggagcaggtgtggggctggggtggggagaatcccctaagctccagggcccagggtctaacctgagaggtcggggctgcaggaagctgggggaggctcccggggctgggggaagaggagcctgcccccagcagaaacagcaggtctcagcggctacatgtgctttagagcttggctgggggacaaaagtgggagagagagagaaaccggcctcatgactcagctggtcaggagatagggggccagatgctgaccccaaatccccggcagcacccctagcaaataggtctgtatcaaagattctgtacagctggttttgggggtgaagggcacctatgggggcttaaataaatggacagggggcaagggatgtagcgagaacagagggtgactgtccggccagcagcctgggcctctggcgcccctgcatgctgacccccggtgccacctgcccactgtggcccgcgggactccccagatgggaaaggagggaagctctccagcaagtctcggccccacctctctctgagcagatgggacaggaagacgggcactggggggctgggtggggcttagcgcaggtcctcctcatcgccctggatggtcttcttgatgcgcagcagcatggtggtgagccactggtccagccgggagatggagtcgtattccttcaccgactcggtgtagctgtccacattctgctcctcgtgggcctctagcaattttttcatcaacttgcat

SEQ ID NO: 55395 - DNA, 307 bp, Homo sapiens
gcggcacgaggataattgctggtagatattttaatatttctaagttactacagaacagaatgtattttaccagaagaccacttggtaagcatttattacatgtttttcttttaaggcaacagtggaagttaacttacaaacatgctgtgaatatttttctagcttcatgtaccaatatgtagaattgtgcttttatttctaattaattttttcctaacactattattataattagctaatatgcagtattgtaaatactacttaaatgcataacttcccaaatctagagcctggtttccttttcaga

SEQ ID NO: 55396 - DNA, 395 bp, Homo sapiens
gtcttatgcagaagactaagaaagatgagagcgaaaataagacaaggatatggagatattgtttttgaaacttgaaaaactatagtttgtttttctaatgtttaattgttcctattcagattggggaaattaaaagctcttactagttcaaagttttacccgatgaacattacacctacccctttcagagatctcaatgaatgagtctgtctgtgatttttttcagcactgtgatccaaaagatatccaaacataacatccccctcctaccccagccccctcagtgcatgtgtgtttggtaaacgttaatgtgcctggggtctttggtattgggaagttaacattcatttttttggctggaaatgcaaatagttcatcaaaatgtaatgcttttg

SEQ ID NO: 55397 - DNA, 759 bp, Homo sapiens
actgtgaagcttgtgtataccttgatgataaattctattttgtaaagaaccagtgaattccttttaaatctcttaaacccattacagaaattgtcgtcatatatatcctacagatgtccaaaccaatagggcaatgttctaacaccaactatggaagatggcttttactgattatctagacccataagatttgcagtaaaacatcaatactgcagtgttacctacaggttagcctatgttgctttaaatgatatgtgtttctcctgaattgattagaggtgttacagttcaaagccacagcacacacaggcagaatggaccttaatacgcatgtaggcagtgcagttagaaagggatgtctgttccttttattccagtaccttcatataataaagttaacaaaaataataaaatattaaaaaaaagagccagctggcactgccaaccaattcctatagtagtcttagaaatcctaatcctgtagaatttcctcttgtagtcaataagcaccaccatcttcaggagtatttcagtgtattgttatctacgccaagcaagcctggtgatgcagctacctgagttctcttggttatgggtgaatgttatcttcattcataacttcccagctttcatgtaggtggggatagagccacgttgagtcaacccttcaaaccttttataggtataattgagaaaaacccagtctttggatttgtagtccggttctgtggtatttggcactggttgtaaaatatcaga

SEQ ID NO: 55398 - DNA, 364 bp, Homo sapiens
  misc_feature (1)...(364): n = a,t,c or g
gctgtctcaaaggaaaaagaaaactacaaatctttgcatgccataggtattctgtaatggatgttatgcttgtgaaacaaccggaggtaagcctttaggggatgtgtttttgttttgttttgtttttaatttcccactgatttccactgacaattctagcatccctaaacacttgtntttctctcactttccgcctaaccagcagcatcattagttatttnacatctttttattgaagctgtcatggactcccagatgccttcctttttggcaagtagaaagaacactgcactctaaaggatttaattcactttctcctcccgagtctcctgatgaagctttaggcaaatngcctaaccttatc

SEQ ID NO: 55399 - DNA, 432 bp, Homo sapiens
attacaacattcacagacacagcattaaaggaatgaatatgccaaagttaaaaaagtttttgtgctatttatctcaagcaggctttcgagtaagccgaactcattttgacccaatgggtgtacgcacagatgcacctctgatgcagtttaaatctatccttttaaagtacagcacccccacctacactggaggacagtcagaaagccatgtccagtcagcatctgaagatacagtaactgaaagagttgaaatgtcagtgaatgacaaagcagaagcaagtggctgcagaagatggtaaacgtagagaagaattggttctcaggtgtctgtatagatggcctaatagttctctataccaactgtagttctttttctgttctttcaattcagtagagtaaaaataaaaaacagtgtcattttcattcaaaaaa

SEQ ID NO: 55400 - DNA, 431 bp, Homo sapiens
aaccgttatgacatgattacgaatttaatacgactcactatagggaatttggccctcgaggccaagaattcggcacgaggtggattccaactccaacgcggacagtgagaaatgggtggcaggagatggtttggaagagcaggaattttctatcaaggaggcaaacttcacagagggaagtctgaagctaaagattcagaccacaaagcgggctaagaaacccccaaagaatttggagaactatatatgtccacctgagatcaagatcaccatcaagcagtctggggaccagaaggtgtcccgtgctggaaaaaatagcaaagccacgaaggaggaagaaagaagccactccaaaaagaaggtaggaagccctgtcttatggttgtttttgtttgtttctctgtttttgccattttatcctcaacttctta

SEQ ID NO: 55401 - DNA, 1096 bp, Homo sapiens
caccatgagccctctgctccgccgcctgctgctcgccgcactcctgcagctggcccccgcccaggcccctgtctcccagcctgatgcccctggccaccagaggaaagtggtgtcatggatagatgtgtatactcgcgctacctgccagccccgggaggtggtggtgcccttgactgtggagctcatgggcaccgtggccaaacagctggtgcccagctgcgtgactgtgcagcgctgtggtggctgctgccctgacgatggcctggagtgtgtgcccactgggcagcaccaagtccggatgcagatcctcatgatccggtacccgagcagtcagctgggggagatgtccctggaagaacacagccagtgtgaatgcagacctaaaaaaaaggacagtgctgtgaagccagacagggctgccactccccaccaccggtccccagccccgttctgttccgggctgggactctgcccccggagcaccctccccagctgacatcacccatcccactccagccccaggcccctctgcccacgctgcacccagcaccaccagcgccctgacccccggacctgccgctgccgctgccgacgccgcagcttcctccgttgccaagggcggggcttagagctcaacccagacacctgcaggtgccggaagctgcgaaggtgacacatggcttttcagactcagcagggtgacttgcctcagaggctatatcccagtgggggaacaaagaggagcctggtaaaaaacagccaagcccccaagacctcagcccaggcagaagctgctctaggacctgggcctctcagagggctcttctgccatcccttgtctccctgaggccatcatcaaacaggacagagttggaagaggagactgggaggcagcaagaggggtcacataccagctcaggggagaatggagtactgtctcagtttctaaccactctgtgcaagtaagcatcttacaactggctcttcctcccctcactaagaagacccaaacctctgcataatgggatttgggctttggtacaagaactgtgacccccaaccctgataaaagagatggaaggaaaaaaaaaaaaaa

SEQ ID NO: 55402 - DNA, 239 bp, Homo sapiens
ggatgattgatctctgctgctgtcaggctggatattcagcagcagcagttgctagatcagcactggtgaatgaaaacccttttattgggcccatgcacagccaacatccggtaatttttccatgcactcataggccaaaagaaataccaaacagtagtgtttattaagtagttagatccaaataacaagaattcatgtcctaacaaatgagtagacatttgaaaaaataacacataaat

SEQ ID NO: 55403 - DNA, 2550 bp, Homo sapiens
cgcagagcagttcagttcgctcactcctcgccggccgcctctccttcgggctctcctcgcgtcactggagccatggcgttcgccgagacctacccggcggcatcctccctgcccaacggcgattgcggccgccccagggcgcggcccggaggaaaccgggtgacggtggtgctcggtgcgcagtggggcgacgaaggcaaagggaaggtggtggacctgctggcgcaggacgccgacatcgtgtgccgctgccagggaggaaataatgctggccatacagttgttgtggattctgtggaatatgattttcatctcttacccagtggaataattaatccaaatgtcactgcattcattggaaatggtgtggtaattcatctacctggattgtttgaagaagcagagaaaaatgttcaaaaaggaaaaggactagaaggctgggaaaaaaggcttattatatctgacagagctcatattgtatttgattttcatcaagcagctgatggtatccaggaacaacagagacaagaacaagcaggaaaaaatttgggtacaacaaaaaagggcattggcccagtttattcgtccaaagctgctcggagtggactcaggatgtgcgaccttgtttctgactttgatggcttctctgagaggtttaaagttctagctaaccaatacaaatctatataccccactttggaaatagacattgaaggtgaattacaaaaactcaagggttatatggaaaagattaaaccaatggtgagagatggagtttattttctatatgaggccctacatggaccaccaaagaaaatcttggtagaaggtgcaaatgcagcactattagatattgattttgggacttacccttttgtaacctcttcaaattgtactgttggaggtgtttgtactggtttgggtatgccacctcaaaatgttggagaagtgtatggagttgtgaaagcttatacaactagagttggtattggtgcctttcctacagagcaagacaatgaaattggagaattattacaaacaaggggtagagagtttggtgtaactactggaaggaaaagaagatgtggctggttggacctcgttttgctcaaatatgctcatatgatcaatggatttactgcgttggcacttaccaagttggatattttggacatgtttacggaaatcaaagttggagttgcttacaagttagatggtgaaatcatacctcatatcccagcaaaccaagaagtcttaaataaagttgaagttcaatataagactctcccaggatggaacacagacatatcaaatgcaagggcgtttaaagaactacctgttaatgcacaaaactatgttcgatttattgaagatgagcttcaaattccagttaagtggattggtgttggtaaatccagagaatctatgattcaactcttttaatgattgccagtaatgcaagaaacactccttgagagggaggggaaaagactttcttaaatatttcatttatgacctgcaaattcaagaataaagacactgaagtaagtttgaagccctacagttgtttccagtcttttcagatggatgcctactgtggagattaactttggcatattccagtgtcagctttctttagctggaattgccaaatcatttgttgctcctgctgctctcatggtgccacgttttttttttcaatgtttagtaatagtataatccatgttgtttgatatcaaaagtagaattacttttaatgtagtttttcttcattattgtcattgcgtgttcttaagttttacccctattagatggtaagaacaattaatgcagttttgcacaaatatttttacattctgatcattcagttctgtcattgtaatctttgttgttagaaacaaatgatgaaaacataggggttctgtaaacttttgtaatgctatgaattctgtttaaattttgggctgtctattttctgctgaaaccatgcaaaattgagctttggtggggctgggagggggttatgtattcatgggacctttaatttgtacagaacacagaacttatttctgtcagttatttaatacattgaaaatttagtgaaatgttcaaagagaatagatgtttcccaaaacaacaatctttatgttaaaaatagtcattaaaagatctgttgtaatatatggtggatatttttctttaatttcaaacattacctctgaaatgtgtatcttttcttttttatcttaccattaattttaaatctagtggattggttttcaacatcgtgcctgccgatatgcctacagaatcatctgtaagtgtcaaaatgaacccacgttgttagccataattttgattatgcctttatttctcctttcttgaaaaaaaaaaggtgttattttgacaattaggcataacattgttttgtagattatcttttaatgaactattttaaatgttaaattaggtgccacttaaatttattttattacaccatgaatagctgattaaaagaaccaaatatttctagtaaaaaaaaaaaaaaaa

SEQ ID NO: 55404 - DNA, 355 bp, Homo sapiens
gagggcacaatttcattcagtacaagagaagtactgtaagcagtacctagaaataatctctaaaattgctatcctgataattttgttgacaggtctaaattacaatgaagttaaggttaggatttccttagttcttaatgtctcagtttttgaattctacctttaagggttttagtcaacatgccatatctcattattgcagagaacactacattactttatgaacacaggtgtctgagctagaattattctcttaaaagacaacataactttttatgtcttttatttactttttggtaatattaacttaccaaatcttctcctatgcatttttaatatgacaaaacaaatttta

SEQ ID NO: 55405 - DNA, 354 bp, Homo sapiens
gctgaggtggaaacattttccttctgaccttttgaagagaacatttgacctaattacccagatttcttggatcttttcttgcctattttttgatttgacaaaataaaatgtattttttaaaattagcaaaggggaaccgttgaagcaagatatttaagaatgccatcttctttcatttttacacaagaaaattttgattagatttgtctggcacgattgctgatcattaaagaaactcctcatcacctaaaatggatgatgttagtaacaggatatggatgttagtaacaggatattaatttaggtacccatagcactgtacttaaacattgtgatagaaacctttccctgttt

SEQ ID NO: 55406 - DNA, 317 bp, Homo sapiens
gggaggcatatcgggtgctgaagcatggtggggaagttatatttcagtgaccgtctatacgagccttgaactgccagaagaaatcaggacacacaaagttttatggggtgagtgtctgggtggtgctttatactggaaggaacttgctgtccttgctcaaaaaattgggttctgccctccacgtttggtcactgccaatctcattacaattcaaaacaaggaactggaaagagttatcggtgactgtcgttttgtttctgcaacatttcgcctcttcaaacactctaagacaggaccaaccaagagatgccaagtta

SEQ ID NO: 55407 - DNA, 392 bp, Homo sapiens
gtttttttttttaacaagtctgtttcttcatgaatattaccataaaaagagatactcatgaattaaggaaagataacatgttccaaatccatacaggaacatcatatattatttaactctatgcaatggaaagatttaaagaaatttaaaactaaaaactctttaaatttaaaaaagttcaaaaccattaaaattgcgatcataaggaagagactgcccccgtttttttattttctcttaaaagcacacagtgttggaaccaacccaaatgcccatcaatgataaactggataaagaaaatgtggcacatatacaccatggaatactatgtagccataaaaaaggatgcgttcatgtcatttgcagggacatagatgaagctggaaaccatc

SEQ ID NO: 55408 - DNA, 397 bp, Homo sapiens
cccaaacactcttagccaggaggagggtgatcagatctgtttgtaccatatccggaaaagttgtagctttcaagataagtgccatagagttcatttccatttgccgtatcgatggcaattcttggatagaggcaaatgggaggatttggacaacatggaacttattgaagaggcatattgcaatcccaaaatagaaaggatcctgtgctctgagtcagccagtacctttcactctcattgtctgaactttaacgccatgacttacggtgctacccaggctcgccgcctctccacggcctcctctgtcaccaaacctccacacttcatcctcaccactgactggatttggtactggagtgatgagtttggttcttggcaggaatatggaagacagggc

SEQ ID NO: 55409 - DNA, 438 bp, Homo sapiens
ggagcgggagccggagcgagagcgcgcgggcgcggcccgacagtgcctgatttgagatggggtcccaggtctcggtggaatcgggagctctgcacgtggtgattgtgggtgggggctttggcgggatcgcagcagccagccagctgcaggccctgaacgtccccttcatgctggtggacatgaaggactccttccaccacaatgtggctgctctccgagcctccgtggagacagggttcgccaaaaagacattcatttcttactcggtgactttcaaggacaacttccggcaggggctagtagtggggatagacctgaagaaccagatggtgctgctgcagggtggcgaggccctgcccttctctcatcttatcctggcacggcagcactggcccttccggcaagtttaatgaggtttccagccagcaggccgctatc

SEQ ID NO: 55410 - DNA, 811 bp, Homo sapiens
gaagagaagaaacataaagaagacaaagatgataggcggcacagagatgacaaaagagattccaagaaagagaaaaaacacagtagaagcagaagcagagaaaggaaacacagaagtaggagtcgaagtagaaatgcagggaaacgaagtagaagtagaagcaaagagaaatcaagtaaacataaaaatgaaagtaaagaaaaatcaaataaacgaagtcgaagtggcagtcaaggaagaactgacagtgttgaaaaatcaaaaaaacgggaacatagtcccagcaaagaaaaatctagaaagcgtagtagaagcaaagaacgttcccacaaacgagatcacagtgatagtaaggaccagtcagacaaacatgatcgtcgaaggagccaaagtatagaacaagagagccaagaaaaacagcataaaaacaaagatgagactgtgtgaaaatattttgtaaaagtggatcacattgaatcctataaatgattaaatctgcttttttcccccacgttgagattgtgcagtagttcgcactcctcaagctctccctgtaggctgcattttcatttcctctttcgtgtagggaagtgcctttgtaattccatttattgcattggtgttttcacccaattgttaagtttgatacatgatgcacagattgttcttgcatttttattgtttgtttttgaaatgtacagtctgtacatatgtcctgaaaatgttttaattcctttggcatggttgccatgttggttaaatttgtataaggcaataaactgccactaatctaaaaaaaaaaaaaaaaaaa

SEQ ID NO: 55411 - DNA, 1168 bp, Homo sapiens
attcggcacagcctgtgcctcttgcctgggagaggggaagcagatctgaggacatctctgtgccaggccagaaaccgcccacctgcagttccttctccgggatggacgtggggcccagctccctgccccaccttgggctgaagctgctgctgctcctgctgctgctgcccctcagggcaaagccaacacaggctgctacgggatcccagggatgcccggcctgcccgggcaccagggaaggatgggtacgacggactgccggggcccaagggggagccaggaatcccagccattcccgggatccgaggacccaaagggcagaagggagaacccggcttacccggccatcctgggaaaaatggccccatgggaccccctggggattgccaggggtgcccgggccccatggcgatccctggagagccagggtgaggagggcagatacaagcagaaattccagtcagtgttcacggtcactcggcagacccaccagccccctgcacccaacagcctgatcagattcaacgcggtcctcaccaacccgcaggaggattatgacacgagcactggcaagttcacctgcaaagtccccggcctctactactttgtctaccacgcgtcgcatacagccaacctgtgcgtgctgctgtaccgcagcggcgtcaaagtggtcaccttctgtggccacacgtccaaaaccaatcaggtcaactcgggcggtgtgctgctgaggttgcaggtgggcgaggaggtgtggctggctgtcaatgactactacgacatggtgggcatccagggctctgacagcgtcttctccggcttcctgctcttccccgactagggcgggcagatgcgctcgagacccacgggccttccacctccctcagcttcctgcatggacccaccttactggccagtctgcatccttgcctagaccattctccccaccagatggacttctcctccagggagcccaccctgacccacccccactgcaccccctccccatgggttctctccttcctctgaacttctttaggagtcactgcttgtgtggttcctgggacacttaaccaatgccttctggtactgccattcttttttttttttttcaagtattggaaggggtggggagatatataaataaatcatgaaatcaatacataaa

SEQ ID NO: 55412 - DNA, 418 bp, Homo sapiens
gactcaccttccacttgctcttggcaaagttcttcttgatctgctcactcaccgactggtggatattcttatctagagctgtatctcctgcaatcctaggatggggttatgtggtgggttgcctatgagggcagaagcagacctgagggccccaaatcccgccccagctcacaggttgtgtgaattctcaccatgggtgctgcaaggcctgctcacaggtgaatcttttctctgggtccttctccatcaagtgccggatgaaatctttggctaaacccccaagacaaaagcaaagataatgacagcatggtactgcctgtgtactccccaagagcatacccactccctcaggtctggcctggcatcaagacaaagaggccaaatcagtccatgccccaccccacccaacctatgctct

SEQ ID NO: 55413 - DNA, 346 bp, Homo sapiens
  misc_feature (1)...(346): n = a,t,c or g
cagcctctgcggtgtaaacagcctctgcggtgtaaacagccgcggcgggcaggccaggactgtcagtgcccgcccctcggggcaggtaatttcatgctcccaaaatgggacataaagtggttgtcttcgacatttctgtcatcagagccttgtgggaaactcgtgtcaagaagcacaaagcttggcagaagaaggaggtggaaaggcttgagaagagcgccttggagaagataaaggaggagtggaactttgtggccgaatgcaggaggaagggcatcccccaggctgtatactgcaagaatggctttataaaccccaccgtgccggtttttggacaanattgaaa

SEQ ID NO: 55414 - DNA, 323 bp, Homo sapiens
gcatcccttcagatgaatggaaatggcatttactgtgtgagtggtgtttattaacatttattaagtgtactcttgctaaacattcttaaatgaattaagcagtattcagcccgcccagcagcactttgaagcacagatattatttaacagataaggcagtggaagctcaggaggtttcatcacttgcccaaggctgcatagctgtgaagggcagagctgggtgtaagcctaggtcaatttggagcccaggaccctattaatctggtccatagctgcccagcctaggacacgactaaaggcattcatcagactgacttgctggg

SEQ ID NO: 55415 - DNA, 583 bp, Homo sapiens
cacaatgacacatctatgagccatggcgccaaatgcttctcttcagatttcatggcctatgacattgcctgtgaccgctggtcagtgcttcccagacctgatctccaccatgatgtcaacagatttggccattcagcagtcttacacaacagcaccatgtatgtgttcggtggtttcaatagtctcctcctcagcgacatcctggtattcacctcggaacagtgtgatgcgcatcggagtgaagccgcttgtttagcagcaggacctggtattcggtgtgtgtggaacacagggtcgtctcagtgtatctcgtgggcgctggcaactgatgaacaaagaagaaaagttaaaatcagaatgtttttccaaaagaactcttgaccatgacagatgtgaccagcacacagattgttacagctgcacagccaacaccaatgactgccactggtgcaatgaccattgtgtccccaggaaccacagctgctcagaaggccagatctccatttttaggtatgagaattgccccaaggataaccccatgtactactgtaacaagaagaccagctgcaggagctgtgcacaa

SEQ ID NO: 55416 - DNA, 408 bp, Homo sapiens
aaacagaccaaaacttacggagaagacagaagtgggtgccagtgaagggcagctgtgaaggtaatttggaatgaccaccatacatcacatatgcactaaatccaaaaatactaaaagagtaactgggcagattagagctctggaatacagggaagagatttcaaaatgcacacaacttaaaggatctggtgtgatttaatgggataagtacaatttaaaaggagaggatggttacagggagatcttccaaactcatagcttctggagaaggaaaaaaagaggcaaagatagaaatgaagaagtgctccttggcaattagatggtgaatgggaaaaggaaaaagtggggagaaatgtaaggttttacaagacagaaaagaactttaaaatcagaagattctcagctccc

SEQ ID NO: 55417 - DNA, 653 bp, Homo sapiens
ttatgaatgcctatgagcccagtgtcagtgacgactttctagcggcggtcttcaacactttctaaatattaagcgatcaaggcccctgccccacttttagttccaacagaatgccgttcacaagatctgggaggcactctctcagccctctcctgggagcccccggaatttctcagcagcccaggccctcccgctgcccgtggcccctcctcccagggtgccagggtggtcttccagcctctccaagggcccacccccctgcctctttcctcccactgcagctgatctaggggtttcttggccacatttcccttgagagagagtgggatttgccctatccacagagagcctcatttccacctgaaggtgtatttgtcagtggctagaccaggttcatgtctgtttccccttggggacttctgaaccttcctgcccggcagtctgtaacacagcagcacaggaccgcgcttcctttagcagtgctgagtaagcaggcagcggcactctgagatcccggggctgggcagtcgccccccacttcccagcagctctgtggtagtggggcgggagcagcagggacgtaccttaagatttctccagtgtctgactcttactttgtttcctgtttggggtcttcttgaggcttgtgcttt

SEQ ID NO: 55418 - DNA, 377 bp, Homo sapiens
gtttggatagaaaaataacatctcgttgtttttctggtcatagttgcccattgtgcatcttcacgacaaatcatctctcattggaagaactgcacacgacatgactgtcctgtttgcctccctttgaaaaatgccagtgacaagcgaaaccaacaaagtaagtgagcacgggggcagagaagcttggagatgagaatagaagttgtttctaaagaaaattcagagagtaggtagggagtgggcaggggttatgagccatggagtgcagggtgaggtagggcggacagcagcccaaggtacagccaagctcagagggcaggcgggctctccgtgtcaggaacggctgtgataatgttggaccctgactcactcactgc

SEQ ID NO: 55419 - DNA, 421 bp, Homo sapiens
atctccccagaaaatcattggcatttatggtgagaagcattcctgttgtatatctggtttgagagaaaaatagctccaaacaacctgttattcattgatcatttttgtttcctggacttgaacttgttaaacatgtagtcttctgccactaagtcttctaggatgcatgggtaaatttagaacttccctcttgaaaacaactttggttgtcaaagatactcccaatttcaagaagtacaagtttactttaccttctaataaattgtgtttatcatctttttactaaaaatcataacagagtagaatttgaaaggactttgaaggtcattttatctccagccctttgttttatatgtgaagaaaccaaggcataggtcagggtcaggggaaatgacttgtcgaagaatatgtgaccagaccg

SEQ ID NO: 55420 - DNA, 360 bp, Homo sapiens
ggaatttcattaacttggtataagttaaataccaataccaaaatgctacagcaaaactaacacctaatgaggaaagtttagatgcattcactttaagatgaagccttaaaggatgtccattttcattgccagtgttaggcagtcctggaaggaaaaggaaatagagttataggtaaagatcaggaggaagtgataaaactgttgttctttgcaggtggtaatgattacctacaaccaagtcagtagcaaacttgtaactaataagaattcagtaaagctattgagtaagaaatcagtttaaaaaatcagtaagtctttttcttcatcagtagtaagcaaccagaacatataaagcaaggt

SEQ ID NO: 55421 - DNA, 351 bp, Homo sapiens
gctggaaaaggatctccctagcagaactcgtggttcaggacaatgctgagagctaaaagagccagcctaatatcagactggagccagaagtagacatctccccacctctaccctatcaggactttcaaaacccccctgggaaggtgatggtgctcagcttcttgacacccccccacccacttcccctaccagggtggaagagtctgactccatgtgttatgcctaggaccaatggcagtgctgggttcacccactcctcccctttttcatctgcacaaagttgagggaaacgggagaatctgtgctgagaagactcagacccaggagcccctttcacaggcccctagttgg

SEQ ID NO: 55422 - DNA, 392 bp, Homo sapiens
  misc_feature (1)...(392): n = a,t,c or g
gcggctaaccaaacagctcatgcttctctgaagacttgcagcaaggcttgctgaggctcacagaagatagccccagtgttttggagtggttttgaatgtgattctgagatcagactgactgagctggaatcctggctttatatcttaccagctacacaaccttggagtcttagaaattttttcttttcaataagcagtcatccttactttccctcaagatgacaaacagttcgttcttctgcccagtttataaagatctggagccattcacgtattttttttatttagttttccttgttggaattattggaagttgttttgcancctgggcttttatacanaanaatacnnatcacaggtgngtgancatntacttaattaatntgcttaca

SEQ ID NO: 55423 - DNA, 337 bp, Homo sapiens; identical to SEQ ID NO: 35995

SEQ ID NO: 55424 - DNA, 315 bp, Homo sapiens
atttgattttgagtggggttggagatgagcatgagaactcaaattgtatctagtttttacattttaaaattgaatttagtcacagtatgtttatggaaatgccagtattgtaccattgaccatagtctagtgggtccatttagagtggataggagtgtagaattagattcacctacttgaaaatcactaatctataaagaagtgaggttttgcaatagaacagtgcctgtggtgttttttcaggttagcatactgatttcagttcatgtaagaaatgaaagcatgtttcacatccttttgctctttgaggtatcc

SEQ ID NO: 55425 - DNA, 1006 bp, Homo sapiens
tttttttttttagaaatatagaatttatttatattcataagacagtttcacattctgtacatggttaccagaacagatacaatactctcagtagtttacaacggcattatattgctgtcaaacattgcttatgctgtgtgagttggggaaaacttatttccccctctaaaaaaaattaaggctcagtttccaaaagataattatatcagtcatttttctgtttaagagactgggaaaattcgggaataaaaagcacaaaggggtggagggtgaggggtagctccacacactctcattcattcatactgaagttactcaatgtgattttttttttttaaggctccttctatctgaaaatgtgtttggttacaaaaacaaacaaatcagtagatgggaggggtactaggtacagatctacagcattcaaacaaggaaaactaagctctttgttaccagttgctggttaaaatgtggtctacgagctgcctacatataaatgcgcacacacattaactttgactcacttttctttggcgaagcttactgaatagtatttctcttccaacacactaatgacactaatttacatttccttttgactttcagagcaggtggccacaaagttgtcccttttcctaaatacaatcctccatttttcctttcaaccttgcagtagaccataaccataatggtcatcttgcactgatgtgtaatctcaccatttaagtgactgaagaaagtggcaaggctaattacagaaagagagtttgggcatttttggagaattaccctatcgatgagttccaaacacacttttcaagcacttttttctatacaaatatttcattcagtccacagtgatgccatcattttacaaaagcagaatctgttttaactcagtaaaccaccttacaatccatggggctaatgttacaacaacaacaaaagccaaaaagggcacctgtaggttctgcctctggcataaagaggtagagacaatcattct

SEQ ID NO: 55426 - DNA, 1055 bp, Homo sapiens
agaacttggcacccctggtccagctctgtcccactctcgaggtcccagccatcccctggacctggggacctcctctcctaacacctctcagatacactggaccccgtaccgggcgtatgtaccagtacaggccccagaacgaagacgagctggagctgcgcgagggggacagggtggatgtcatgcagcagtgtgacgatggctggtttgtgggtgtctcccggaggacccagaaattcggaacgttccctggaaattacgttgccccggtgtgagtggtctccatggcaacttggagccagccaggatggggtggggagcggtggcactcgtgggagggagaggacccccgcccacatcctccttccccagggacctgagctcccagcatctgcagacgacccccgcagcctttccctcggacccccctcgaagccccctgggactgattcccacccacgactcacaggcattcctcccacagccctttcatttcctccccaccccactccccaaatacagaggtctgctttgaagcggagaccatttccaggccttattgagaccagaccccaagtcccccacccccatcctgctccagcgtttcctctaacagggaccagctctccgctttgcccccacggggttcctctaaccagaaccagcttcctagcctcgtagagaccaaaggccgcccccgcctgctggggttcctcccagcaccccagcttgctggctgccctctttgccttctggcctccagctgggtgtgggggggcggagcaaggcgggggacagacgcagcaccttcttagcgatctaggcctggcaagagctctggccccaaggcctcctcttcccaggggctgccaagtcctggccctggccctggcatatcaccccgcactgtggggccaggcaccactagcctggctcaaatattccccagggagactgctgtgtgctgcccgcctgcctgctgctggctctcccccagccccacatcccctctggaagagaatgtaaaataaacctggacacaagggaaaaaaaaa

SEQ ID NO: 55427 - DNA, 64 bp, Homo sapiens
atcacacatcaaaagaaagtttgccaaagattcggggcggcaagccagacgtaaactgtgatca

SEQ ID NO: 55428 - DNA, 332 bp, Homo sapiens; identical to SEQ ID NO: 40929
  misc_feature (1)...(332): n = a,t,c or g

SEQ ID NO: 55429 - DNA, 500 bp, Homo sapiens
  misc_feature (1)...(500): n = a,t,c or g
gtgcagctttggattccanaagccaaggacctgttacaaaggtggttttctgggaagcaaattagagggattanacctggcttcgacatctgacttgactccaacctaccaaaggatctcccagttcacctgggagttaacacaccagggttctagtccttttgctcgctgtgtggctttggacanagcctgcagccaatgccccaggagccctcggttccaaccaactgatgcccctgtgcccactggcccacgccatgcagccccantccgttctgcanagcggctacttccacccactacttcgggcctggcagacagccaccaccaccctcaatgcctccaacctcatctaccccatctttgtcacggatgttcctgatgacatacagctatcaacagcctcccaggagtggccangtatggtgtgaaccggctggaanaatgctgaggcccttggtggaaaanggcctacgctgtgtcttgatcnttggctccca

SEQ ID NO: 55430 - DNA, 2318 bp, Homo sapiens
gatcattagattctgattgtcatgaaagtttctaaagacttactttcatttctcaacttaccttgttgaccagcagggattggtgaaccatgctgtgagtagcattgggctagagagaggggaggcaggaatctagaagagctgttttccagatgtgaccatctcctgaggacagggaccatgtctcatgtgccacccatcaccccccacagacagagcctgcagccaatgccccaggagccctcggttccaaccaactgatgcccctgtgcccactggcccacgccatgcagccccagtccgttctgcacagcggctacttccacccactacttcgggcctggcagacagccaccaccaccctcaatgcctccaacctcatctaccccatctttgtcacggatgttcctgatgacatacagcctatcaccagcctcccaggagtggccaggtacggtgtgaagcggctggaagagatgctgaggcccttggtggaagagggcctacgctgtgtcttgatctttggcgtccccagcagagttcccaaggacgagcggggttccgcagctgactccgaggagtccccagctattgaggcaatccatctgttgaggaagaccttccccaacctcctggtggcctgtgatgtctgcctgtgtccctacacctcccatggtcactgcgggctcctgagtgaaaacggagcattccgggctgaggagagccgccagcggctggctgaggtggcattggcgtatgccaaggcaggatgtcaggtggtagccccgtcggacatgatggatggacgcgtggaagccatcaaagaggccctgatggcacatggacttggcaacagggtatcggtgatgagctacagtgccaaatttgcttcctgtttctatggccctttccgggatgcagctaagtcaagcccagcttttggggaccgccgctgctaccagctgccccctggagcacgaggcctggctctccgagctgtggaccgggatgtacgggaaggagctgacatgctcatggtgaagccgggaatgccctacctggacatcgtgcgggaggtaaaggacaagcaccctgacctccctctcgccgtgtaccacgtctctggagagtttgccatgctgtggcatggagcccaggccggggcatttgatctcaaggctgccgtactggaggccatgactgccttccgcagagcaggtgctgacatcatcatcacctactacacaccgcagctgctgcagtggctgaaggaggaatgatggagacagtgccaggcccaagaactagaactttaaaacgttcccggggcctcagacaagtgaaaaccaaagtaaatgctgcttttagaactgtgccctcatgccctcttcctgctcacatgctagcggggcccagcagccctgggtggttttgccagcatgctaactcttgtaactcgcagctgcatcctatgagctctcccaagcttccccgcccctcccctgggtcagccgtgaggcccacctttgccaccctcagctctttcctctggtgtggcttcagcttgaaagcaacctggagtcgggggcacagcctttggggcctggctgggagagggtcttggagcattaggggaagaagagagcagtgggatcttggggcctgagaagccttggaacgcttctggcagccagagctgggtgtgggaatgaggcctagatcgatatccctgggttagagttgaaatttgctgcaattccactggaaggcatttcccacgaggccagaggttgccaggctgcctgaggtctcctattctactctgaaccataaacccagagaagaattactcattaaccagcataaatactgcctgaggatcaaaactcagaggcaaagagggagttcctgactgctagaggtgccaccaccacaaacactttttattcaggagatactttttgagaatctctgctctgttcctaggttcagtgctgggtcctgggaatacagcaggacagacctcagcttatctcttcatagaaattatacaaagagaattggggagacagctaagaagaaaacaaagaaataaagcagttacaaattgtgataagtgctttgaaggaaagaaggggtctgagacaacaacagggaaggggcctctcttgaaacagtagttgggaaggaggcagacatgcaccagtgatgtggtgacaggtgctctgaaggaggtcaccaggacctgacctctttgaaggatcagaaaatacttccctgaaggactgacatttgagcctagacctgaagggtgagcc

SEQ ID NO: 55431 - DNA, 3683 bp, Homo sapiens
tttttttttttaaacatacttattacacatatttatcaacaaggcatcacaaataagtcacaaaaagtaggcttagtttagttcacaatataaatcccgtgaaaacacatttttcatctctgcagtttataatactctacgtatatgaatttaaagcagttaaacaacatttgagattaaattgggtaaaaaaaaaaattgtaattgaattcagacttcagaaaattgtgaagtaaaaggccatgatggagaaatattaagaatctgtagaattactaaactgtcacagtattattttcctttacaaaagcatctcagtaaaacaaaaactacagaaaacgcaaagtaaaatcagagattttggtttagtactttccctgagtctcttgttttaaaaatcaaagtaaggccagttcaaaattggacccacaggtcttgcctcctccatgctgccatggggagtacatttaagacaagaggctacgcatgttgaggtggtcccagggctttattcaaatgccaatttgcccgtgtcactgccacagggttatctgacccactgctgcatgtgggcttaaagagctgtcaaaattttatcttggccctgcctataatataatatgcgagactatataccaaaggaagacaaacagtttccagttattaataaatattaaatttctaaatggatctggacacctatatacatcaaattatggtaacataacagaaacaaacacttttatgtttaaaaattccttacataaacaaaggtttggggtcaagtcatcttaaacttctaatctcagatgttacaagaaaaaacttcaaaaaagaaatcaaattcattagatcttaatatagtagaaaaaagtgattataagatgatacttggacttggattgtaagttgatactaattccccaaagtggttgtctctttgatccttaaacaaaactggcccctattgtgtctgtacttgatcacttaattgcaataatatttatgtgtatgtgtacatgtatatgtacatctacatgtatatatgtttgcaagtgatcaagcacttcattaaaaaaagcatatgataattaattaaattaaggataaagggattgtttgaatctaaaaatttggtttttatttcaaatgtaccaggttacttgctgagcttatagtatcagggcactaaatactatggatcacattttctagtcaaatgtaggaaaaactttttcacagatttttacaaccctttttaggacatctcaaagagagatggcaaagatctgccaattatgtctccttccatcataatgaaatcttaattaattgtaaactaatttcaaaaagttaacaatcattagctttctgaaagctaacaatcatgagttgtcttaaaatcagaagtgaaatgatggctcaaatcacaaaagtatgacacttattcacattcttattaattatttaataagtatcccattgcacatgtggggaaactgaggcaccagattttttttttttttttttaaagatttgtctacagttagacagggaagccaaggtcataactacagccagaactgtagaggctagacacctatgaggtataatgtattctattcaaactttgtgtgaaatggtatatttaactcacctgtcttgttggcatcacctctccttaaccctaacttcttgcaaaccctttaaagcatggacttgggaaatgtcagtgaccacctgccttctctgaccaggttaaaaaggctagccaatgcttgtgtaaaaaaaagaacaccacatattgttgtattatatgcaattggaaatgttcagttatcgcactttggtatccttttcagaaaaaaaaaaaaatctcaaaacttataaacataagcatggcattttacattgtaccaactgagtaacagtaaatagatgaggtgtgaccactataacttcttgaccaactttctatcttgaaactacacacatccaaccctaccagctaccattctaattctacaggatattttccagtgagacaagctgtacaatgaccactcttttcaaaacattccagaccatttccattttcttggatcataatatcgtgctttttctctttctgttttttaaactttatcccttcttgtacagatgaaaccagtccttctactgacagatacacaacactgtttgctcctagatattctgcaaggtgatcaaattctggtttattggcaatgagctcttcttttgtaggaatgtttattcccatgaagcatggatatttaattggtggtgaagctactcgaatgtgtacctcttttgcaccagattctttgagcagttttattataggtgagatggtattgcctctgacaattgaatcatctacaagaacaattcttttgcctttaaagttgtctgacaatactccaaatttttttgcaacaccaagttgtcttaacctcatgtttggctgaatgaaggttctccctacataccggtttttacacagcacctccacatatggaagtccacactttcctgcgtaagcaagagcagcaggcgtagcagattctggaacagtgctaaccaaatctgcatccacaggtgcttcaatcgctagctgctggccacaacggtatcttactgtataaaccatttggtcttcgaacatactgtctggtcttgcaaaataaacatattcaaagatacaaaaagccactgggtttccttcagaccttgatataatatcaagagtttggacattgtgtctggatatttccacaatttctccaggcaagacttcacggtaatatcttgcaccaatagataagaagctacaagattctgaagacaccacccatccttctgtttctgatgtttttttctctttgtcatttatatcagacactggaataagacgaccaatgcataagggacgatttccataaggatctcgtactgcataaataacatctctgtgcattataagcagggagtatgctgtgggtgcttccttcatcaagtttttaatcctggctacccagtctggggtgtcatcttgttcctgaggaggggtatacgccagtaactgggtaatcatttcactatcagaacttgtagacagaccaataccatgacgcagaagctttttccttaatcgagcagcatttaccaattcgccattatgtgccacagctatcttcccatgaagtgtttcaacaacgaagggctgacaattttctagttcacattttcctgtggtggcatacctggtgtgtccaattccaagatttgaaacatataattttttcaaattgtcttcagtaaagacgtgatttacaagacccattcccttgtgtgatttgaatgttggcaccgaactcccatcactagtcacaataccagcactctcctgaccccggtgctgcagccccacgagtcccagagtgatcacatgcggtacatccagctgcgtgggccactctcctgaggcgatgcacccgaacacgccacattcctctcggatccccaactcctccagctccatgtcgccgccgaaagcacgtggaaggacctgccgctgcggccaaggtgtaagcaccaaccagctgccagctcggcccgtcgagctcagaagctcgcgctcgcgacagactcttccttcccga

SEQ ID NO: 55432 - DNA, 280 bp, Homo sapiens
ggtgaaaatgagatccaccaacatcttttattaagttcagttattagtctgtgaagtgctttactttttgcacaattttaatagcttgctattcagtaatacattatagtgaattcatgatcaaggtttccttaaatttagcattgcatttcagtactgactgtgtaagctaaattgctgatccaaaataaaaacccagactagaatagggttcttaaaatcaagtatcaatacaaaatagaacacaattaaaatcttaattgttggctgggcacagtcg

SEQ ID NO: 55433 - DNA, 29 bp, Homo sapiens
tgataataataataataatagagatacca

SEQ ID NO: 55434 - DNA, 266 bp, Homo sapiens; identical to SEQ ID NO: 41756

SEQ ID NO: 55435 - DNA, 339 bp, Homo sapiens
tgtttattaaaattatttgacctaaaatactgtacaaaattaagtctgtaaatttcttaggtttcctgacaccatccccccaagttagcatatctcccgaataaaagaaaattttcaaagctttccctgatacaatgtaagcaaaaaatcgatttcactataccagatgcattcttcctccagtgttgcacaggtaactattcttggtctcattctgagaaaatccatctatcggaactctatcacatactctttgagtataagcattggagaagttcatacaatgtccatttgcaatacaaatggcatgaccatttgggtaatgcattatattcctcc

SEQ ID NO: 55436 - DNA, 250 bp, Homo sapiens
acctatctcttttgactcaatctaaaagtttctgtcttttaatacaaaaccacaatccatatgcattcattaattcacaactgacatttagtatcttatttctgttatcctatttcatattttatgattccttgtttctgctcttttgatatataaattatgttttatttgcccttatcctttcatgtgtttctaaagtatatagcctacgtgtaattgtcccattagctaactttatgtttttgaaagc

SEQ ID NO: 55437 - DNA, 404 bp, Homo sapiens
aagaaaaagaaaagaaataagatatgatgattgattacttggaccagtgttagaccgacctgtgttagacgaacctgtgttgcctattatattggcagcaccttccattagcaatagctgaaaaattcagagaagaatttagaactttcactttatttttgccattcttcaagaagttgctgtatatttcagtctggttataccttcaattgatcaataacttcaattataggaaaggcatcttctataattttaaattactgtaaaaaaaagataccttttaaagccttggattatacttaaaaattgtaatggaagaaatgcatattaagttatatgcagatattaaacatatctgattctgaagataaaactgaagtatttttcagagcaaatggcattat

SEQ ID NO: 55438 - DNA, 250 bp, Homo sapiens
ggatacagttctcccagtgtacccctccttgtttgagccagtctccatgtttgtctttatgtctttatgctcatttcttcatttcctcctctgcttcccgtcagcctcccaaaaagatatgggattatactcctggagactgctctatccttcctagagaggatagaaaggtaattccgctgtgcctcctccgttggactgtgtgtgctctctagccttggttagtgtgagtgtgttgtgggtttgtttg

SEQ ID NO: 55439 - DNA, 1978 bp, Homo sapiens
ttttttttttacaggtgaaccatagtctcactttatttcgaattttaggactgaacagaaagaaggttcacagatatttcttcagggaaggaaagtgggcaaatagcacaatgaggcaaaccacacaatctagacgtactttcccgggtaaacaaactgggaagcccagagctcacagaggaggagagcagagcttggggtggcagagaggtgttcattgggaaggagtcaggaacacaagagaaatgttcatgagctcatccaggatagagaggactcttggggaaggggacctccttccccatgctgtctctgccccaagcccttaatgaagcaggagagggaagtctgtccagaaactcatctggttagacatttgcatcaggaatagggagggggtggaggcagagccactttggacatgggaaatcacagttgcagtagacagtgagctctagtcactccagaagcttgacataatttgcagggaagagtccaaagtggccatggcaacgtccccgccaccagccctcgttccaccatctcaatgtcagtgattacgtcgtccggatcaaaggaaagctcatcacttccctctccttggtaatcatatagagccacagctgagatccccagagccacagccccagccccagccccagccgggcagcctgatgatccagccagagcagaagaaaaagaagaatcttcaggctcgagcacctcctcatagtccccctctggttcatcctcctgctcatgcctgtccatctcctcaacgtcctcatagtcattctcaggctcgggctcaggctcgggctcaggctcaggctctgcttcgtacactggctcttcctccacctggaggccttccagagtcctagggggcagagctgggggctcctcattgtcctccgggagagtctgcctaatgggcagcaagggcactgggtgttccctgctggttctcacaggctcagactctgatgatggaggagtcccaactggaggccaggcctctgaggagattttcttgggcagtggggccggtactgctggctcttccatagctatcactggctgtggagcctcagggctcctctttgtcacagcctttcgctcctgttgcctcctggccacctgctgtgccttctcctcttcctctcgcttcctcttctcctcagccatggactcaaatttcgccttcagcccacgggcaccactagaagcggcttctatgggcgtcgtcttcttataagctgtggtcggggcctccatttcattgaagccgacagcgctcttatccactcggtccttctggattccatactggccaccaaagcccttggcataatctctctgggactcgtgtttctccgtctctcccttgtagtcatatcccagagctgctttgtcccatttatccttctccaccccgtaccggccaccaaagccacgagagtaatctttctgagatgtgtgcttctccacttctcctttataatcaaagccgactgctgacttgtctgccctgtccctctcaactccgtacttgcccccaaagcctttggagcatccgtctgagaagagtgcttctccacctcggcaacatactcatggcccactgcactcttgtccattcggtctctttctactccaaaccgacctccatagccatgggatgctttgggccctgactccatctctttcttcctgagaacatcatgctcctctgatactttgttcctcagctggtggatgttgatgtgttctgtgcgtccagacccctcgatggtcttggctccccatcgttgctccttttcagagatgtcattcacaaagtcaggatctgtgtcccaatcatcaccctgggtctccacggaaacagacacatcatggcccactacagacttccacatctccacctgtgcaagcctctgttctaagcgcccggctcctcgcgtccacaccgactccc

SEQ ID NO: 55440 - DNA, 640 bp, Homo sapiens
cttttcagaagcctctcttctagagaaacaacaggaagtccactcagcaggaaatataaagaaggagaagagcaacaccattgatggaacagtgaaagatgagacaagccccgtggaggagtgtttttttagtcaaagttcaaactcatatcagtgtcataccatcactggagagcagccctctgggtgtacagcattggggaaatccatcagctttgatacaaaactcgtgaagcatgaaataattaattctgaggaaagacctttcaaatgtgaagaattagtagagccctttaggtgtgactctcaacttattcaacatcaagagaacaacactgaggaaaagccttatcaagtgttcggagtgtggcaaagctttcagcattaatgagaaattaatttggcatcagagacttcacagtggggagaaacccttcaaatgtgtggagtgtgggaaaagcttcagctacagttcccattatatcacacatcagacaatccacggtggggagaagccatctagtgtaagatgtgtgggaaggccttcagtgttaatggaagcctaagtaggcatcagagaatccatacgggagagaagccctatcagtgcaaggaatgtggaaatggcttcagctgtagt

SEQ ID NO: 55441 - DNA, 388 bp, Homo sapiens
ccaggaggggactgagtacctggtgctgccacaaggtgctctgcatgaggccagaggcttgaagtgggagtaggtgattgcaagtggtagctaactggcattctctgaaagtcagattgaatcactagattctgtttattaagagtaggactttcaatacagttttaaaaagctaccccttttcttaatttctcaggaaaatggcagctccttcttttgtcgtcaaaataaatattcagccaagccttaaattaggacttaaccggtgtgttacttctgctggtggattgcagtgaaagggtgtttattcacttaagccgcactcctcctctccccgagaagtagtcagctgttcacatttacttttatttctaaattatcttaaacc

SEQ ID NO: 55442 - DNA, 1686 bp, Homo sapiens
ttttttttttttgtgtataattcagactttattgcttattaattatgtcactccacaaaattttaagtaaacagacattgagaaaatatactgggagtgttaaacagatgacggcaatattgatgaggctgttcaagtgttttacataaggtaataagaggtaccaccatcaccagaacccctacaaatttttacatttcatataaaaagagtaaaaatagttcattggcatgtaactagcatcattctctgtaatctatgagccataataagcctgaacaatttcagtctcttcagagcaaaacaaagtattttattccactagcagatgtttctccaaaaacaaaaaacaaaccaatacaaccacaaatactacccacacacaaccctgaaacataagttgccatattccagtggtcctgaattttaacatgttttgctctacattaattcaagaaataaaatgagaaacagctttgaaaatgagattaactcctttgctgtaattatacttactctataattcaaactatttagctgaagtcagttaacgagtaaaaaccgcggatacagctcaaactgctcttaacttctttaaatgtttactgttctatcaaaactcagacccaagctgcacaggtgtaacttgaggcactaacaatcttcctaccagacgtaatagttttatgtgttcttaaagctgggcgcatatacaaaatcactgtacatcacacataaacatcagaaacttttcttggcacaactagaccaatagtttcctctattattattatttttaaatcaagcatgtgtaacagttcagcatttaaaagactcccatgtatatgattaaaaagatgctcaggttgagaaatacatttgaatacttgaaaagacactccaaaaagaaacaagacttgaaatgtggttttatgttgaaccatttaggagacctcagttatccaacaactaaaagcacacaacagcagataaataggattttattaaaatcaatgtctccaacaatacaaaaactaaatattaaggcatcttttactcccatcctggtatatgcaagagaaatgttttaagaaagggccagcatttcttactaaaatgctttctagtgtatttggcagatttgtttttatattctcctattccacataccactcaaagcactcatgatcaaacatcttgacccaaatcaagagaaaagtataaatagatattaatttattaaaaggaagcagttcatctttcaaaaattaaaagaaactacaaaaagtatcatgtataaagttcaaataccagcatttaaatttctctgaagtaatttacggttcagtaattaagcaaaagaagagatgaagacttaagagaagaagcctattaatatggattgcactatggagtaactgttcactgagtactccgctccactgggatgatagtttgaaaagggcttcatactcctttaagaaaacagcacatccaccaggataagatcatttaaattaacactgattcttattccccatgcctgtccatttataaagctcaaggggcttcataaagtatactaaacagtaacattttcaccttttattaaggcaagtttgtgaaaataatttaatacaacaagatctcttcatgaactttcaacttacaacctttttaatgtaa

SEQ ID NO: 55443 - DNA, 1015 bp, Homo sapiens
ttttttgctctttttaaaaattttatttagaagcctacttgtagaagttagcataattttacagattattagaaaaattcttttctttctgcaaacagttataataggttaggaataatagattagaaatgtactacattacaaaacagtggcctataactatctgtacatttactgtgcaccttaaggaaaagaatttgcacagtgtgctgtacttacactgcaggtaacatatttttattctatcacacaaaactgaccagtggtagtgcttgaatttatgaatgggccattaaacagaacatttaaactcagatgtatatttagcatgctaaaaaggggaaaaaaatttcaactgaagttctgtggctcatcagttcaaatgtttcatggcattttttttctttaagtgaaaaattttgatactgtaaaacagttttacataataaatgcaaaaagataacattttctaaatttttagaaagaatattcacattcattttgtcatgggtttcacgtggctcttctaaatatattaatcatattaataagacactggtcctatacaatttcaacagtccatcttcaattaaaaactaacaaaaataaacagtatgtaaagagtaacaaaaagtaaattaaatatactaaactcacacaacaggtagaataaaatgaaaccaaattacataatggcaggttatacattttaaagaatctctttccacttagtcaaataagatagaaattgaaatgtaaacttactgatttcctgtgggattttccccccactggttcaaattggaaaatttgatataaatcctaatattttatttctgtacatttaatatgattcaatataatctgcagtctcatgtatggcttatcaataatgccatcatcactgtatgtcaaacaacctcactgcttactagaaatgctaaacactggaaaaaatggaattttatacatttgttttcttaaattttgacagatattcttcagaaagttaaaa

SEQ ID NO: 55444 - DNA, 402 bp, Homo sapiens
attaaatagagtaatagagaaaagtcagaggaaatcttaggatatttttcagttgaatattctgttcactgcagattttgtttttgtgttttattttcctctttttatttacccccagatgaaattctggttagatactttcccaagcatctaatctgtaagaaatcctgttttccttagaaaattttcacctagctttctctggagtggaaaaagtctaaatgtctttttttttctcattgagtctaattaaagcatagatttgcacctccaggtaacagtattgcaacaagtgtggggaattcgtctcaacacaattaaggataaattacagccaagtattccagcaatgtctcattctgaattttgcccctgtaaaacttcacagtggagagcactgta

SEQ ID NO: 55445 - DNA, 737 bp, Homo sapiens
gagcaggcatacaaggaggagggatgcagggggcaggcatacaaggagtcagtatacaaggaggaggtatacaaggaggaggtatacagggggcaagcaagcaaggtggaagccagcctagcagttttagtcctgggcagagccaggtcactccacaggatcaggagaaggcagctttgatcatgcaggttcttcaactgactgcagatcagattgccatgctgccccctgagcaaaggcagagtatcctgattttaaaggaacaaatccagaaatccactggagcgtcttgaaaggttttagaaaatatttggctgtagtctcaaattttattctgtagcatggagaatgggtgcaaaaagctgacttctgtatccccacacttggattagggtttccctcctcctagaacctaatcttattttttgttctttttctttctttctgttttcctttttttttaattgagggtggggggaggagggagtgcgtctgttcactttaagttactttaaaataactctgaacatgattatattatgccaaataagattacaaagaataagcagcaatattgaagcatctacagtatgttaactacattttttaaatgtcgagtaaaactttgtgaaaactgctcataaagactaaaagttgacctgttaaaacgttaatgtactaagatagttttaagatttttggttgtataacaaaataaaagtttacccaaaagtaaa

SEQ ID NO: 55446 - DNA, 328 bp, Homo sapiens
  misc_feature (1)...(328): n = a,t,c or g
ttttttttcaaattaacttttctgaactttattgtggtagaatttacataacaatttaccattttgaccatttttaagttcaaaggaacnnnnnnnnnnnnnnnnnnnnnnnnnnnnnnnnnnnnnnnnnnnnnnnnnnnnnnnnnnnnnnnnnnnnnnnnnnnnnnnnnnnnnnnnnnnnnnnngcnnnnnnnnnnnnnnnnnnnnnnnnnnnnnnnnnnnnnnnnnnnnnnnnnnnnnnnnnnnnnnnnnnnnnnnnnnnnnnnnnnnnnnnnnnnnnnnnnnnnnnnnnnnngccatctctactaagaatacaaaaattagctgg

SEQ ID NO: 55447 - DNA, 345 bp, Homo sapiens
  misc_feature (1)...(345): n = a,t,c or g
gctggggcccaaagcaagtcccaaatgcagcagcttttctcttggtttaatcccttaagactttcttacctctgtagttaccaaatgggaccatatatttaatttgctgtctgtgtacataattaatttcctgaaatagcattctaatctagtacatatttcatttgtttttccagaatatagagtgaaatttggccttaaaagtctcctcactgagaaggtttgggcttccttggggctatttgtgagcatgttcagtctgaccaatccatcccctgttctctcagcactacttgggtatacacaacttaataacttagtacattttctantgngggagccctt

SEQ ID NO: 55448 - DNA, 276 bp, Homo sapiens
gaggggttaggttgttcacaaaaggccacattccaagtatttgtaatctagaaagtgttatgtaagtgatgttattagcatcgagattccctccacctgattttcaagctgtcacttgtttccttttctcccctctctgggttgactgcatttctagactctcgccggcccaggcccatcttccaaagcaagaggaaggaatgataatggtgactcaggggaagaagaaacagccctcctctgaaagcctggactgtccggctgtgaactgctgca

SEQ ID NO: 55449 - DNA, 547 bp, Homo sapiens
tacgaatttaatacgactcactatagggaatttggccctcgaggccaagaattcggcacgaggcgcgaccgaccgagcagctccgaggagtccgcccggaaacaaacattccccagggcaatgtcacgacttggtcttcccgaggagccagtcagaaacagtttgctagatgatgctaaggcccgcttaagaaagtatgatattggaggcaaatattctcacttgccatataacaaatactccgtccttttgccattggtggctaaagaaggaaaactccatttgttgttcaccgtccggtcagagaagacagatacattgataactccatttgtgggtttaatagaccacaacttccaggcccagccgaatcctgctgaagttaaggatgtattcctggtgcctctggcctatttcctgcatccacaggtccatgaccagcattacgtcacacgtcttggtcaccgttttattaatcatatctttgagtacacaaaccctgaagacggtgtcacttaccagatcaagggaatgacggcaaaccctt

SEQ ID NO: 55450 - DNA, 439 bp, Homo sapiens
gctgagtttgttcttcgggcattctgtggctcacactctatccttactttcttcttcctccttcccagctaagttagactacagatgctcttcgacttacagcggggttacatcccaagaaactcatcgcaagtggaaaataccataaatcaaaaatgcatttaatggccacgtggggtggctaacgcctgtaatcccaaagtgctggaattacagacgtgagccactgcgcccggccccgccatctctttaactttgggcaaatgcctcatttcactgagcctgattcttcatctatatcctggggataaaatatctctttgtaggactgttgaaggattagagagtacacaaactatacctggcacatcatagaaactcattaaatggagagagagagagaaaacagatgaacttctcaggtgttgatttttgaagg

SEQ ID NO: 55451 - DNA, 156 bp, Homo sapiens
tatatacatatatttcttctatgtgatttaaatctactttctatggttgattttgtttaatcagatctgcaagaagcttatatattttgcctctttcataagcctttttcttttaaggtttatttattaattccaccttttttcctatttttaaaa

SEQ ID NO: 55452 - DNA, 142 bp, Homo sapiens
ggagaatatgaagttaagcagctgacggagttcatttacactgagtcaaacaagctttaaccctagaaagcatcctgcatgtttgatggcacaggtggctgacatgcttgcaaatatgacctgtctcacctttcagtgtgtt

SEQ ID NO: 55453 - DNA, 494 bp, Homo sapiens
gactattttgcgatatcagtgctaaatataatttcctgatgataacattttcatattataagttgtaaataccatgaaaatccatccctaagtaatagattatcagtcagttgactctccactaaacagtattataacgatcagctgaagaaagttttcagctattgcccaatgcataaaatattttgggagctcaaattttttaaaaatctattttaatccccaaatagcagtataatagttaatcatctcctgaacaggttggttcccagaaaccaaaatcattttccactcagtgttgttgtagatctcaattaaagaactaacccaggatacctgaactaaagagaggtggcactgagtttccatagaacttcaaaacaattggttgatttcacttaaaaaaaaaaaaaaaagtcattcaatatacagaaaattactcccctggtcagtactgttagccccagataatctgaaaaaatttgttcttaaaa

SEQ ID NO: 55454 - DNA, 529 bp, Homo sapiens
  misc_feature (1)...(529): n = a,t,c or g
gctggaagaataaattccccagctgtggttgggggaacatgcctgttgtcccagccatttgaggggctaagggagggggatagcttgagtcaaggagtttgaagttactgtgaggtatgatcacaccactggaccccagcctcggtaacggtgataccttatatccaaataaaataaaatacaatataaaattaagttaaaaaataaataggcatgtaaagaaacaagaaaaacctaatttataaccaagagaaaagtcaataggtgaaaatatatccaaaatgaaagagatgaccaaaaatnanaaaaataaataaataaaattattctaaatgcactccacatgttccagtagtaaatataggcatgatgaaaaaaataaaatanaatanaagatgtggaacagacccaaatggacttattgaaatgaaaaatgactatttaaaagaaaaatnccttaatnggaataaagnaaantttccntganaggagaaataataatgacttgagacttaaaactatccaaatc

SEQ ID NO: 55455 - DNA, 876 bp, Homo sapiens
ggcaggaggatcacttgagacctggaggctgaagctatagtgaatccagatggcaccacctcagcccatccttggcaacagagtcagaccatgttcctttaaagaagaagaatatgtcatccaaaagaccaccaggatggctaaatagtagaaaggagagctatattggtgatttcagtttgcacagcgggaagagacagtctccagcttatgccaaaagtgctctcttcccagagggaaaagggcagattggtttttatgcctcacagggcctgtatcacacaatagagtaaaacatattcagcagttttgggagaaaagttatacatatctatgagggaagttgaacacacgtgcaatggataaacatatgtaacacaaatcccacgttcactttggggtaagggtttaacattaaaataaggtggaacttggcccttcatgtcaaaaggtgaactattggacacaaagtttgcatgcagtctctataaactggctgaaactggctcgaggtcttcggttgcttatcaggaaagaatttttgtaaggctggtcctttgtccaatcagagctatagtggtttggattgtaaatcaggtttggtaaggttctgacaattttcccaatagctcctatttttagcaaatttagcaagattgtgttttttcttgtagccttaggaattttcgaagtttccatgtcaaccaagccctgaaccctccacccataggtaactttcgttttcttaactttagggttcttcttagttgataaaggagcatccattttggtcttccagataacagaacacaatctgacagggcaattatgtgactaaaataatgaaatattaaaaactgaattttccacagaaaa

SEQ ID NO: 55456 - DNA, 405 bp, Homo sapiens
  misc_feature (1)...(405): n = a,t,c or g
gcctgaatgttgcccacctgtcctcaagccacacatgcacctgtaactcagtgcaagcccagaaactccccgtggggactcctagagctgtcagtggcctcacatagcagctggtccagtctcttgtgattgcccaaggaaactgaggcctggagagcttggggtcactgctctgaggccatagagatgcctagtagaagggccaggcctagaagcaggatccttgctgcccctctgagctgtttccatttaaaatcacatgaaggccggcgccgtggctcacggctgtggtcccagcattttgggaggccaaggtgggtggatcatgtgaggtcaggagtttgagaccagcttggccagcatggtgaaatgccatctgnactggaaatccaaaattaatggagc

SEQ ID NO: 55457 - DNA, 411 bp, Homo sapiens
gaagaagagcccagacctaggggagtatgatccacttacccaggctgacagtgatgagagcgaagacgatctggtgcttaacctgcagaagaatggaggggtcaaaaatgggaagagtcctttgggagaagcgccagaacccgactcagatgctgaggttgcagaggctgcaaagccacatctttcagaagtcaccacggagggctacccctcagaaccccttgggggcctggaacagaaggcggcctcctccctggtgtcatatgtgcgcacgtctgtcttcctgctgactttggggatctcgatgatcctggtgctcctgtgtgctttcctgatcccctgtcctcccagagatctgcacagcacctggagccgccacttgggctcccagggaggtggggacctgtctcc

SEQ ID NO: 55458 - DNA, 361 bp, Homo sapiens
  misc_feature (1)...(361): n = a,t,c or g
tgatcctagagagaggggtcttggttatccatttccttagtgcctaattcatacccagccttcagtaaaaatctgctgaattaatgagcaaaaggacattttaaaatatgaatccataacataactttttgacacactatagttcatcactcagctactaagagcaatataaatgccagattttaaagaaagggattagaagaaattcacccactgtattttattactacaatttaaaagttaagaatcattttaattcagccgatnnnnnnnnnnnnnnnnnnnnnnnnnnnnnnnnnnnnnnnnngccttataatcctgtttccagaaagatgaagggaaggacagagaagcagataag

SEQ ID NO: 55459 - DNA, 531 bp, Homo sapiens
ttcagggatcgcgattgcaagtcctccgctgaggtgatttggatatccctagaacgttgagggcacgagtcgggtcctgagaccaggtcctcagccagcagagccacgttccttatgagcaccgtgggtttatttcattttcctacaccactgacccgaatatgcccggcgccatggggactccggctttgggagaagctgacgttgttatccccaggaatagctgtcactccggtccagatggcaggcaagaaggactaccctgcactgctttccttggatgagaatgaactcgaagagcagtttgtgaaaggacacggtccagggggccaggcaaccaacaaaaccagcaactgcgtggtgctgaagcacatcccctcaggcatcgttgtaaagtgccatcagacaagatcagttgatcagaacagaaagctagctcggaaaatcctacaagagaaagtagatgttttctacaatggtgaaaacagtcctgttcacaaagaaaaacgagaagcggcgaagaaaaaacaa

SEQ ID NO: 55460 - DNA, 248 bp, Homo sapiens
  misc_feature (1)...(248): n = a,t,c or g
gaatttggccccagggctcgaatcggatgtatgcgactgatcgggttggggcaggttataggacgaggactggtttgcaaggatgggcaagctgtggggccgctgggcttgtacaagtggagggatcgggttggaataactttggaaggtgcctgagagagggcagggctagagagagtgtgaaaaggggttcctagatgcatttgtcatttgagatgggggtgtgngtnatattnctttngaacttt

SEQ ID NO: 55461 - DNA, 735 bp, Homo sapiens
ggagtgctgagcaaggccttctccagactcaagaccaccctgccctgggtgccccccgacaccaagctctccaagctggacacgctcaggctggcgtccagctacatcgcccacttgaggcagatcctggctaacgacaaatacgagaacgggtacattcacccggtcaacctgacgtggccctttatggtggccgggaaacccgagagtgacctgaaagaagtggtgaccgcgagccgcttatgtggaaccaccgcgtcctgaccttggaggtgcgagtctgggaaaggcgcgcctcccggggggagcggggccccgggaaggcgacccctgccctcagtgctctctgtctctgcttccccctcgcaatgctcctctctctgtcccaccccgcgagaacactttacaacgacgaggagattcgtttccaaaccagaggagatcaattgtacttacaaagattcccatctatttaactttattaacttctaccgtgaatgactctgcaagccttgctggtccaagtgcaatatgtaattataaatatataaatagataagagcctatcaatgtatcttttgtacaatatgttgtaaaatgtagatcataggatagctgactttgacagtcacatttataaagtaattcacttaaagatatatatttttttcaaacaagttttgctacttttgaaaataaatctttctttatattgctaaaaaaaaaaaaaaaaaa

SEQ ID NO: 55462 - DNA, 151 bp, Homo sapiens
tgggattataggcagaaatacaccttttagagataaaagtcacaacccaaacttctgaattttgggttaatgcttcttaattccctccctttttaaagaatagctttagcagccataaaaaaagaatgagttcatgtcctttgcagtttaa

SEQ ID NO: 55463 - DNA, 2174 bp, Homo sapiens
gaatgttattgcaacatgtgtattcatttacagaattcagataaaatttgcttatgttctgctattatgtttgatctaatcctaatcacagtgagctcttaattagctcaatatgtggtttgcctcaagtgtgcactgtttattactttgtaatatgcactatgagtactgacatttagagttgtttaaaggccgagaactggaaacagcctttccctcattttctgtgtattggtgatgggagtaataacattttcggggagctttttaaatttcacagaagaggaaagtggcctgctctggcaggtatgtgcaggatacagtgtgtttcatctgttccggtgccaagaatgagcactgtactgtggcagttccctttggatttgtatgtgctctgggctcatgaagatattgcatcgtgagctgcagcagttgcactctttttcagtgacctaaaaagggcttatttccgaggaatgaaaggctgccatcgttggctgtggatgtggaaaacctttcctagcttagagcatttgtatctacaatacattttaaagtcagagttcgtgttccctgttttaatcacatgactacctgtgccagtacacgaaagggcgctggttggcattcttcttaatgtatttagtaaagatcagaagaaatcctttaagagtttaaatgtctctgaaacaggcatacaggctctagtcaagaatgaattagagtgaaggaaagctgtgtgacacctggcattcctctctgttcatggagcttctttgaggcttgaagtttgattttactatctagacctctctggctaatacctattcttcaaccacctcggttactctgacataggaatttacttcttttccttgagtggaaaacactttagaaaataataacaaacattattataaactaatatatgtgagagtacttagttgaaacaaaaaggaattttagtagacagtattatattatctttgaaaatcaaggagaagtttatgcaactgaaaatgtttacacactgtgctgcaatctactgtttgtgaatgtcaatgtattatcaggaaacatgtctatacgatcgcagagttgtatttcctcacaaacttctttacgaagagtgaaatatgtttttgtacctctcagtttcagtcagggacatattttgtgcaatatttctgtgattgtgcctatgcgtgatgagtgaatgcatttcaatcatacattgcctaaatcataacttgatgatgcttgggaaagaatcaacagttaaaacttcatgaagttctaatgtctgtgttccaaaacacatcacattattaggttgtagggagatatgtatgtgtgctccctggggtggggagttttctagttactagaccatctccatttttagcacttggcagcctcatgatccttttataaataggagattaacaggagagcagcaatacgattttgccaatggaataacagatttgccggcattcactgaaagagggcagatattgggtccttgtgacttcaactgactcttccgaattgtatgaatttatcaatgtattacacaaatccagtttcagaatgataaaaaatgttagaccaaataatgcggctaattaacagtcgtatgatttctagcccatgggtttaaaactgtatcttaaagagtcattttaaaataatataaatattaaaaaatgtaactgctatcttaatgttctgaaataaaacattttaaaatataaatcctgtagtttaaaaggaagaaatggtgggaaggaaaagtagagaaagaaatgccaattacaggccaaagcgttatttgccaagttttcttagaatgaattttaccaatgtatgagttcttgttaacagaatgtgtaacggaaatactgaaagacttttgcttaaagtggcattattgactgctgatgtgatgctactgtaatgtgataaattattaaattgttgcaaagtgctgtttttgccttaaaattttattttgcgcatcttgaaaattatagtattaaaggtattgatactgtgcaaatactgggcatgcttggcatgagataatctgtttcattttcacaaaattgtagtataactatgcaagtgtttattaaaagaacacaaaataaaaaaggtatgggattaaaaaa

SEQ ID NO: 55464 - DNA, 427 bp, Homo sapiens
gtcccttcccgctgtgtggctccagcaagtttcctcccacctcaggtttgggtttccaggcattaagtgacaaagtggatgcgacgctccttctggactgtaatgcgcactgcgtggagatgttcgtgttccagtgtagacagggcgttgtcacatcaggcaggactacagggacaatgtttgtcagcctgtcttctgggcaacttggggtatcctccctttatatcacctcctgcccaggtgctctgcgccgccagagcatcatgtcatttgggatccctgatggcacattttgagactttggttcacaagtaaagattgggcctgtgtgatcttaaagtaatgtggcttaaaaacaaatggctgtcagggaattgtaaatcaaagcaaacaccgatgagaatggcccaaatccaggacactcagc

SEQ ID NO: 55465 - DNA, 422 bp, Homo sapiens; identical to SEQ ID NO: 41170

SEQ ID NO: 55466 - DNA, 213 bp, Homo sapiens
ggtatttctcagattcctcatctatgataattggaagggtggtatgctattacgtagacattagtgcttcttactgcttaagataatggtattaaggctacaaagtttatctagatttatcagataattaacgaagaatttggccagctctttcgtctttgtttactcagtagtgtcataactatgaagtactgtatagtaatacgaaagaac

SEQ ID NO: 55467 - DNA, 147 bp, Homo sapiens
tatctggttgatttctaagggcttttgatacaagttagatttaggccccagaaaatgtcagattggagatcaagttcaacataagaatggggaaaatcatctatagagcaaataactattgctaaggttagagaatatagtaccttt

SEQ ID NO: 55468 - DNA, 817 bp, Homo sapiens
  misc_feature (1)...(817): n = a,t,c or g
ggtgcactgcctcttcctgtggtgccgggtcctgagcactgcgggccccagcgaacccctccagcccttggtctacccccttgcccaagtcatcattggctgtatcaagctcatccccactgcccgcttctacccgctgcgaatgactgcatccgtgccctgacgctgctctcggggagctcgggggccttcatcccggtgctgcctttcatcctggagatgttccagcaggtcgacttcaacaggaagccagggcgcatgagctccaagcccatcaacttctccgtgatcctgaagctgtccaatgtcaacctgcaggagaaggcgtaccgggacggcctggtggagcagctgtacgacctcaccctggagtacctgcacagccaggcacactgcatcggcttcccggagctggtgctgcctgtggtcctgcagctgaagtcgttcctccgggagtgcaaggtggccaactactgccggcaggtgcagcagctgcttgggaaggttcaggagaactcggcatacatctgcagccgccgccagagggtttccttcggcgtctctgagcagcaggcagtggaagcctgggagaagctgacccgggaagaggggacacccctgaccttgtactacagccactggcgcaagctgcgtgaccgggagatccagctggagatcagtggcaaagagcggctggaagacctgaacttccctgagatcaaacgaaggaagatggctgacaggaaggatgaggacaggaagcaatttaaagacctcttttgacctnaacagctcatgaagaggacggcaccgncgg

SEQ ID NO: 55469 - DNA, 390 bp, Homo sapiens; identical to SEQ ID NO: 35248

SEQ ID NO: 55470 - DNA, 746 bp, Homo sapiens
ttttttttttttttttccattgcatacagtttatttcactagattgcaattttatacacagtatgaaggggtttcctgatagcacatatatagtttactttctgtactgctgaagaaccaattgttttttacattgtatcataataccctatcattaaaacattattcagtgaattttttccaactacatataaacggagatttaccacacacattctttaccatggtgcaagaatgcctttataacatatttgaatcacaaaatgtgagtctaaaatacatcactgtaattaaaacactactttaaagttacaatggccccatgttatagtagccagatttgattaatccctgtataaatcacaaagcaatttggtggataatgtcttggctaactggcagcagcttttaaccgtgatattaaaaaaaaaattctttaattaagaaccagactttcacaatttagaaaacttcttcccttatatgtcaatattctcagtcaaaatgggatatttaaaaatttgtagtctctaaaacaaggaaaataaatccaaccctcccttagctgaaaggatgcggttctaacattaggtttcgtagaaacctaagaatagcattgtacgaggagtggaaacaagtcataagaaacataacatttcttttaaaacctcttaaattcctctgcccctccccatctctgtcaaacacagagaaagaatactgcattacaaacaaagatgtgtttc

SEQ ID NO: 55471 - DNA, 328 bp, Homo sapiens
cgctccctgacccaggctggagttcagtggtgtgatctcagctcactgcaacctccaccttctgggttcaagtgattctcctgcctcagcctcctgagtagttgggattacaggtgcccaccaccatgcttggctaatttttgtatttttagtagagacggggttttgccatgttggtcaggctggtttcaaactcctgaccgcaggtgatccacccgccttggcctcccaaagtgctgggattacaggcatgagccactgcgcccagccccgtgattttcaatctatggcctttatgttcagtgactgtgaaatccaaatgtcttgg

SEQ ID NO: 55472 - DNA, 492 bp, Homo sapiens
gggagggggttatttttttgcagcatttggcagtcacatatcagggttatactgaactgcaacaaagatcaacttttaaaaattagccttcttaaaatacaaaatgatttaagtattttaaagataatttatttgccttgctcttgccttctaacattagccatttcatggagaggctaaaacttatactccaaaaaatgtggaagcacattttaatgggagtaaaattaaaaaattttgagaaagggtaaaatcttatgaatatgcatcttcttagctttatcttccctttgataggtaggcacttatgctcttccatctgctccatgtcaaatagggctcagggaagccagtcatttccttagcgagatgattactcctttggcctttgaaacatttattggggcccaccatgtatggatcagtgtgtggtagtgagtcctactcccaaatcagtgattcccaagtcttgggctttggggacccgttttt

SEQ ID NO: 55473 - DNA, 253 bp, Homo sapiens
acaactgctccgcctggtggaatctgaggtcagtgacttgcacttgttctgtggggcagaagggacctgaatagagagggttggggaggaggctgtgctgatacagacatttttctaaaacgatctctcttcaatggtgagctatatataaacgttctaagataatgtggagtctatttttaagttgtattgcgttctacatccaactccaagaggaagtcacctcatgtgtcacccagaagggctgaagtga

SEQ ID NO: 55474 - DNA, 1191 bp, Homo sapiens
atatttgaaattttaaggtcagtttattaagttcaatgatgaaagctatcagaagaatattctcctgaaaataattttttcttagaaaaaaagaaaggaaaatcataaccctctgagcatagccacagatgctgtggcagtcaagcctctctgcagatggggacagtccattagtcagctgagtcactctctgggtcagcaggattatagtctggatcatcttcatcatcctccagctccaagtcatccatttcttggaacaaagactcatctacctccacgttgtttccagcatcctccaagaactggatatcagatgtgtcaagattatgatctgtttcaaatagttgtttcccacttaatttattttttcctgcttgttcttcttctttcatccttttctttttaatttccaagagttctgcatcaaacttggctttccaatttaagaaattctcaattgtaactggagtaccatggaataattgcttttcagcttcttctgcttctttttctttttgtttcttttcttcttctcttctagtttttatctgatctactatttcatttaatttttcttgcacagctgtcactagagtaaaaatcatcaccataccaagattttcttcagcctgtaatgctagtaattttaaaatgtctgagacatcattatcttctagattttcctgggagaatatttcataaaggggagcttcatctgggtatttttcactgtatgtaaacttgagggtagtctggacagtttcatcattttctccagcctcagacgtcacagtaatggtgaagctgggtggattttctgataatacttagcaggaccttgtcaagtgaagcactactgaaggagaatgtggtatcaggagagtccatttatattttggaagactagttgttaggagggttggatcaatgtgcaatcaagccagttaatgacactctcaaacccctcttcactcatccccttaacatcctcacagcacagatgtactgctggtgagagagaacatgaacaggactggagctatacagggatagctgagagacatctgcctgtgaaggagtcagggtagatggactccagggcctccagctcgttgcgctgctcctcgccgtaatctgtcatcgtggcccttgctcttgcccatagatcgcccagacacctaggcggcg

SEQ ID NO: 55475 - DNA, 396 bp, Homo sapiens
gggcgcgcccgcgccgcccgctccagctgggctagtgctgcacattccggccagcccctcctcaagaccccattcccaagccccttctcagctccctcgggccggcagagcggctctgatcagtaaaatgctgttgaaggcccacgggcatgactgcacccctcactaattggtcattggtttggggaggacaccactgtcccagtggaaccttgagcacaccttggagccctcctcttcctctccggacctgtgccaaactgtgagtggcacagagcaaggactgtatgtgttctcttctttgttgcatactcagttccttgaccacagtgccaagcacacagcgagcactccctgtgtatctgctgagtaaataaacgaatgaacaaacccaaa

SEQ ID NO: 55476 - DNA, 393 bp, Homo sapiens
gcaacctgctccaagccatcattgactccttgtctggggaggacaagcgggagcatcgagggaaggaggaggccctggttctagacaccaagaaggacctgaagcagatcaccagccacctgctggacatgctagtcagcaagaaggtgtctggccagggcagggatcaggcgctgaacctgctcaataagaatgttcccaggaaggaccttgccattcatgacaactcacgtaccatctatgtggtggataatggtctgaggaagatcctgaaggttgtggggcaggttccagatctgccatcctgcctgcccctgactgacaacacccgcatgctggcctctatcctcatcaacaagctctatgatgacctgcgctgtgacccggagcgcg

SEQ ID NO: 55477 - DNA, 510 bp, Homo sapiens
cggaatgcagtttattctactccaagagattctgcctcccttgtgtccgggagaacatcaatgcttttcctcaggaaattcggcaagacttggagaaaaggaaagctccatcaaagaggacccccagccagcccggttctcggacgtgagtgcaactggggctaggtcatcgggcggcaccctgcacagagctcctgggccagcctgcgccagggatgctgctgagctgggagccgccatgcctggccttgtttctggaccactgggagcagcactgcagcccaggggagctggagtccagcttggagcagccacaggcccagggagctgtagcaagagggtagtccaaaggcagatgccagacaagacacagccaggaacccggccaggtccccccacatgcccctcagggcccaggcctgagtgagtgctgctcagatgtgactgagagggatgacctccttcagcagggcagctcctaagaggctgcgtgcaggtgcgtgtgggggg

SEQ ID NO: 55478 - DNA, 853 bp, Homo sapiens
aaaaaaagaaaaaagaaaaatctcattatttcaaaatgatagacatataccaaaaacaagtctataatgtgagtagttactaaaatttacacatcttaaaagtgtgtaaatgcttaaatttcagaattaccatcagaacctcaattgacattcctttgaataggctaataagtgacaaataagattaataagatttttcaaaatcgccaggactggtgaatataaatgatgattgaactggaataatattggggaccaaatcaaatgaatgattaaattatgaagctcatatccttttgaaggtagttgcaaagagacatttcaaaactgccctaggccattgcagcatccttagatgggacgcataatcattaccttaaagcatcaccactcattttgaccatatagattttattatgttagtttaaaaggtcaatcagcctcatgactttatagttatgtcttgtatttaaaaacattttttatacatttggttatgttgataaaccaaaaacatttgattaataaaatatctatttgaataaattatgagctatcctttcaaacagctattggcaagttttaaacccaaaatatatacacatagttctgtaataaaactgtttgacttctcaagtaacatgacttccttatttctgaacagtactggttactttcaaaatgaatttttattgagattttccattaactatttttttcaaagactcaaattttgtaccaagtaaatccaggctttatgtacaaacatgttgtttgttttatttggggctgggggaggtatatgatgagcagacttctcggaattcataataaattttctaaaagcctaaaa

SEQ ID NO: 55479 - DNA, 403 bp, Homo sapiens
  misc_feature (1)...(403): n = a,t,c or g
agaagatacaacaaatggaccaaaaaaagtaatgcaagagagactgaagaacatgatgtgggttaatataagtgaatattaactgtacaaaataattatagtgtctgtggagtttaaattgtacatagtactaaaattcatgatatacaagtagcagaaaagacagaaaggggtaaatggaattttaaagttgtactggaaatgtgattgaataaattatttatattagaatgtgatcagtcaaggatcactattacaatattaggataacactaaaataataaagatgaataactagcaaattcatagaaggaaaaacatccaaaataaggtaagagcagagaaagagaagatacaacaaatggaccaaatagaaaaaaatagtaagatgaaagatcnaacc

SEQ ID NO: 55480 - DNA, 5331 bp, Homo sapiens
ctaacttcagcggtggcaccgggatcggttgccttgagcctgaaatatgaccaccccaggaaaagagaactttcgcctgaaaagttacaagaacaaatctctgaatcccgatgagatgcgcaggaggagggaggaagaaggactgcagttacgaaagcagaaaagagaagagcagttattcaagcggagaaatgttgctacagcagaagaagaaacagaagaagaagttatgtcagatggaggctttcatgaggctcagattagtaacatggagatggcaccaggtggtgtcatcacttctgacatgattgagatgatattttccaaaagcccagagcaacagctttcagcaacacagaaattcaggaagctgctttcaaaagaacctaaccctcctattgatgaagttatcagcacaccaggagtagtggccaggtttgtggagttcctcaaacgaaaagagaattgttcactgcagtttgaatcagcttgggtactgacaaatattgcttcaggaaattctcttcagacccgaattgtgattcaggcaagagctgtgcccatcttcatagagttgctcagctcagagtttgaagatgtccaggaacaggcagtctgggctcttggcaacattgctggagatagtaccatgtgcagggactatgtcttagactgcaatatccttccccctcttttgcagttattttcaaagcaaaaccgcctgaccatgacccggaatgcagtatgggctttgtctaatctctgtagagggaaaagtccacctccagaatttgcaaaggtttctccatgtctgaatgtgctttcctggttgctgtttgtcagtgacactgatgtactggctgatgcctgctgggccctctcatatctatcagatggacccaatgataaaattcaagcggtcatcgatgcgggagtatgtaggagacttgtggaactgctgatgcataatgattataaagtggtttctcctgctttgcgagctgtgggaaacattgtcacaggggatgatattcagacacaggtaattctgaattgctcagctctgcagagtttattgcatttgctgagtagcccaaaggaatctatcaaaaaggaagcatgttggacgatatctaatattacagctggaaatagggcacagatccagactgtgatagatgccaacattttcccagccctcattagtattttacaaactgctgaatttcggacaagaaaagaagcagcttgggccatcacaaatgcaacttctgggaggatcagctgaacagatcaagtacctagtagaactgggttgtatcaagccgctctgtgatctcctcacggtcatggactctaagattgtacaggttgccctaaatggcttgggaaaatatcctgaggcttggagaacaggaagccaaaaggaatgggcactggcattaacccttactgtgctttgattgaaggaagcttatggtctggataaaattgagttcttacagagtcatgaaaaccaggagatctaccaaaaggcctttgatcttattgagcattacttcgggaccgaagatgaagacagcagcattgcaccccaggttgaccttaaccagcagcagtacatcttccaacagtgtgaggctcctatggaaggtttccagctttgaagcaatactctgctttcacgttcctgtgtcagaccaggctacccagtcgagtcctcttgtggagcccacagtcctcatggagctaacttctcaaatgttttccataatactgtttgcgctcatttgcttgccttgcgcacctgctctcttacacacatctggaaaacctccggctctctgtggtggaatacccttctaataaaagggtaaccagaacggcccactctcttttacggaaaaatccctaggctttggagatccgcacttacattagagttatgggaatatacacatattaatgtggctccctttttcttgtgggggaataaaagaggactcctcctcattccctttaacatgggggaaaaaactgacattaaaagatgagactaaatctttatcttgaattttacacaactacttacgacaagggagatgtttagacctgttgtgtatacttcagagtacttttcatgagttcttccacagtgaacccttggattacctggtggctttttctagccagatttgcattaatccttactgagattggatggttttctttcctctattggcgccattcttcagatattaaagttaaaccatccactccctcaccttcagccttcagtgaatgtgctttctagttgtcaggaatgctgaagaattaacactttgactcctaaatgtgatactggtttgtagattcccttagagcagaaaggagaggggcacatattaatttgtatcgcttttgcttctctttggtcttttgtgtcttagaatttggaagtggttcatttctgttgctggtatgaggatttcgaatacttagtaatcgaaaaccatatcctgtaatttaataaaaaaaactaaggacgaaaaaaccctccaattttcccaaatgcaatcagtgtaactaggggctgtgtttctgcattaaaataaatgtttcaggctttgtggtcctgatcaaggtcctcattaaaaaattggagttcaccctaggtgcttttcccctctgtgactggcagataacacatacttttgaaagtaactttgggatttttttcttaggtgcagctcgattctaatcttttcatgctgcacacgattcctttaatgtagcatccttatctgaaagaaataaccatcttctcaacatgacctgcttaacccaaataagaacagtgatcttataacctcattgtttcctaatcattttatttcatctcctgctagtactgtgccgcttccccctccccccacacaaaataaaaacagtatctgccttctggctcatttaatgatgactgcaatctgtacctgcaaatggcgcttccagtactgtgttcagtgatccacatttgtgcttggactggaatgaaaaaatacgcttaattgccaagacaactgcaaatgagttcaatacgacttctcggtgctagttggccatcttgactcaatgttgggatacactaccagagaagatttttttgttgatgtgctgttcaaagtgaattctgaaggaaaaggttgctcacctctgtttcagaggcatacccttttaaacctttttagacttgtcctcttctagaattcattataaccccaaagtgtaaaaactatttggaagttgcccctgacaagctattatacatctctggtaaatcctgctgaatgtaagggatattcagagcttttcatacctcatcatgatgttatttaagcagccaacttatgtgacctgatttaaacttttaaaaaatccacttcattcaaactagaaagagtcaaagacaaaggacatttatcagccaagagtgtgacgcattcttcgcatctagtctgtagtagtgtctgtgctctgggatggataccgtctgatgtctgtttgttattgatggcgcagccactgcaaaactagtcaactcccatctataactgttactttttctagtgctgctttgtgctgagagaacattttagtttactgcacttgacctgtaaaagactgattctttgtaattttagggataaattaggtggttaatttaaagaagaaatttcaatgttgcctttacatcacattaaaatataacttctttcagaaggataatagaagcactgattcatagtaaaaatcttgtttttagctttgacttttttgtggctgttttttaaaattgtaaattactagtaacatgtcatttctataggatgttttaaattatgtaccttccattggatagttaaaataatttcattttataagccaatttgagtgggaaagatacaaagcacacagttgtctccccacattaggaagagtagtgtgcattcagacattcggaatttttgctagtagttggagatgtttcagtgagtgaattaaaacaaagtctatttaactgacgtgatctattttgtgtctaaaacagaggaatttatcttgtcctagaagttcatgaactataagatctaagtttttttttcttttttaacaataaaatgattttttcttaaagtatcaaagttggaattggctaaaagtgaagtagcataactcagatatgttggaacttggtactgaagcaggctttttggtaacagaaatgacattttaaggggtaactgtatatcctgtttttagttctttgcctctcagattctgttaacttagtttaaattcactgaataccctaccactaaggccgttgctcattacaaaaagcatgttaatttcaatacaggaaaactcttttgtagttttatatatggattgggggaaagtgactttgttttacttttcctttttattcccctccatcctccaaacttccaatctatattatttgtaatgagaactttggtgggggaaaaaaagcattaagagaattttggatgtaaaggcatctggtatctgatggaccagcaggtagatgtggttggattgagaaattttgggtaaggtagatgatagaagaaagagattttaggagacacagttctctgtggaacactttctttcatgttcctgtaactaattgatcaagacccttttaaacgcttatctttgtcagttccgcttttgaaaaaactattgcccctagggattgtttccttcccatatgacagatgaaggttattggctctgagtcatttttggcattatcgtcacagataaaaagattggcaattaatctcataaaaaatctgaattattccagattgctgccgatttttgcctaagaaacaatatgtaagtatattttataaaccaaactttgtcaaccaattctattgtacgtctacccacaggcaactttgaatttacttctctagtgctaaataaacatttcagcgatttaatcccccaacttgggggatgcattatgaaaaggttttcctgggagtcaaggggtttttctttctcgctagttttgtgaaaatttttatatcaatagggcaaatcattataactttttaggggttgatggtttttaagtatattgggaaattgtgggtgtctaagggatgatgttcagtgaagaaaaggggatccacttttaggaaaccagccattgtttgctttcaacttttcatactgtatgctaactcctacgttcccaaaatgtggctcatttgcagtcacaggtatgcc

SEQ ID NO: 55481 - DNA, 2444 bp, Homo sapiens
  misc_feature (1)...(2444): n = a,t,c or g
gacttttttatatatatatatacacacatactattctctcaggttctttcagttttctttaatactagtctctgacattataaaacctntttttttgttttttgccctttgagaatttctaaatacaaattgagttaaaagattgttccaaaatctgctgcttcatcaaaaggcattaaaacatttcttatgtcaggaaaggatcctactagtcttttaattgctattgtctgggattaacagataaggagaaaccagacaggaaatggctaacatatggaaatatttgcacataccaaaataccactacttttctttgtatgtgaacggtcctggaaggattctgttgctccttggcaggtgtgtggtttgcgctatagactggctccggtgatctggccattatactctgctgtctccatcttgaggatgtaggggattatgctgtctatcgaaacattgccaatgagaccagtaaaaaaaagttcttctgttatgttggagctcatcagcctgagtgccggcaggcgaacgaggatccgggccaatcggtaggtgtcttctgagtaggttttctgaacatagtcctgcaactccatctgtgccttttcttggaatttttcaatctggcttgtgctggtcaaacctggatgatcggggctaaagagaactatagctttaaggtatgcatactcatagccatctatatcccagttcgccatgctgttacagaactcctgcagcttccagatgtgctccatgacttgctttatccggtcaccagaaagtttatcttcctggatgctgttctgcaggtggttgacaatggcagccaggatggtggagagactcatgacctgggcacactgggccaggccgagggtgaagagctcattccagcaggcccgcacaaggctggtgttgcagtcctgtccaagtccctgaaaggctgggattgaccttgcccggtgcattgagaggaaaagcagacgggatgcagactcacagatgtagtgcacgttgaggtactctggcattggactgggcattgttagcttaaatgtgacgtgtgtgtctgaaaggagggggccttcaacctcaatgatgggtgtcgactggtctctgctgatgacgtggatgctccctcctccactggtgtctatcccatctgccaagcttggagaagaggagctgtctgtggtattaagtgctttagctaaggtatcaaatgcccgagttatctcacttgcagactggtcctctggctggatttctgaagtgtcaccgttgttcaaagattcacttaggttggcaagggaggtcactacatttgccagtgtgcccagagctccctggcttgtttcagccttagaatccgtggccaggagaactgtaccatcctcacgtatcaaaggctgctggatgttcacaagcatccctggatcaagaagacctgtttgtcttgctccatctttgtctgccacaaacgtgggagtagctatcaggggacttctcaggtctttccggatatagattttctcagttgaagcagcacaattgcttggtttctcccgttgcacatcgaagggcttccgttcactctgcacagattccattttcatgcccatctctaagcattttttcagccggcaaaactgacagcggttccggtgatgtttattgatgatgcagtcttggctgctccggcagctgtaggtcaaatttttcctcacactccttttgaagaaacctttgcaaccttcacaactgacagccccatagtgacggccggaggctttgtcgccacagaccacacagtactctaccacctggggccgctggacgtccgtcttccccagtaaacgctccacagaggcagaatccgtgacaatctggatcctgccagggacgaggttgtctgaggtggtgaatatgagttgcttggcgctggatgtctctggggaagccaggatcaccttcccagttccagctccatctgggctggtcaggatgaactgctgtttgggggatccggaggcgtccactgcggtgactatctggattttctgtcctgtctgctggtctgtgacaatcttctctttgttcaaagatgtgaaaacactcaatgggccagaggcaggttcagagccctgaatgcgctgaggtgaggctacagcagagtcggtggagattatctggatgcgtggggaggggctggtcatccctggagattccggccgagaggtctgtgtacgtgttacctcaggatttgcgccaaagcggcctcgaagcgggtcccgtgtctgcggcgggcggcccccggcgcggagggcagggcgcggggagcccgggctcccggtgtcggcggatggcgggagccgggggccgcgggctcgcggggcagcgggcgagagacgagacgccgaggtgggagcggcgaattc

SEQ ID NO: 55482 - DNA, 180 bp, Homo sapiens
ctgtctcaaaaacagagcccgtgtttcaccatgttccccaggcggtctggaactcctaggctcaagcgatctgccacactcggccttccaaagtcctgggatcacaagggggaggcaccacgccaggcagatgtattcctttctggttactaaattggaccgggggcgcggtggctcacg

SEQ ID NO: 55483 - DNA, 670 bp, Homo sapiens
  misc_feature (1)...(670): n = a,t,c or g
gcagaaatcatatctcattatacatcaaagaactcatacagaagaaaaaccctataaatgtaatgaatgtggcaaagcttcagagaaaagtcaaagcctcattatacatcagagaattcatacaggagagaaaccttatgaatgtcctgtgtgttggaaagcttttagccagaagtcacagctcataatacatcagagaacgcacacgggagagaaaccctatgcatgcactgagtgtggcaaagcttccgagaaaagtcaaacattcactgtacatcaaagaactcacactggagagaaaccctacaaatgtaaacaatgtgggaaagccttcagtgtttccggttcccttcgagtacatgaaagaattcacactggagagaaaccctatacatgtaaacagtgtgggaaagcgttttgtcatcttggaagctttcaaagacacatgataatgcacagtggagatggacctcataaatgtaagatatgtgggaaaggctttgattttcctggttcagcacgaattcatgaaggaactcacactctacagaaaccctataaatgtaaacaatgtggtaaagcattcactgtttcggtcttgctaatacatgaacgaactcacactggagagaaaccctaccaatgtaaggaatgngggaaaacattcaga

SEQ ID NO: 55484 - DNA, 340 bp, Homo sapiens
  misc_feature (1)...(340): n = a,t,c or g
gaaccttcccactgcccctcccagacgccgcgtttccgagagggtgtccttagaagaccaaagtccggggatggcggcagagggggaccagctcagcctgcctccccaagggacctcagacggccctgaggacacgccccgggagagcacggagcaaggccaggacacagaggtaaagccagcgatcctcacagcatgccagaacctgccnaggacanccaaacaaccccaantcccgccccccaggaaaaancggatttctcgacaactggcctngaccctnccagctcccttagagaacgctgagctcttgcacacaggcgatggccttggagacacc

SEQ ID NO: 55485 - DNA, 345 bp, Homo sapiens
gcaagaagttgggctggacctcaacagggtggggctggctgttaggtctgtgcacatcattcatacctacaggagcaaggaggaaaagggagggccttcctggggcctgagttctggaaagaacaaccacacccagttttgagctgtgctctcaggagccacagcctgctggccttgcccaggtcctgtgatgacagatgttcatggggtgctgatgaacaacctggatcacaaaggggtggctggggggaacactgactgccagcagggtggtggactgtccccaggaggggctgggcgcccctgagactcggcttttacaccaccccacgtgggagggagcaa

SEQ ID NO: 55486 - DNA, 420 bp, Homo sapiens
cactaattgctcctatggagaaaccgtggggaggggttgggggaggagggtcttatattgaacctggttttatatagctttatagcttgataacagctggttcctttcttctcagaatttgtagttttaagtgtattggggttttatttgttgattttgctttaatcagtttcttaatccatgatctgttgctttgaattagacattaacctgtttctaaagagatagactaaacaaaactaaaggtttgtttgcttaagtcaagcttgagtctggggagttatgtaagtaacatagatatctggttaatctggtaggatagcctttccaaaggagtttacattggtactttgaaagaaacattttaagtcgcagaaaggtaacaaaaattaagttactgtagcatcagcccagaagtta

SEQ ID NO: 55487 - DNA, 424 bp, Homo sapiens
gccatggcagtggtgccattgatgacattcactatccagggacagaatgtaggagctttagtggccagggtcccaggcaactcagggtcttcactgggcttccatgttgtggagtccccatcctgcagccttccttagtccatgtttactgagctgggtctccagcttttcccagcaacactgtagattaatagtgtcctttgagataaattccttttctctttaagccaactagacttgttttctgctattgcaccataagaagcctgattggtagcagtacctatatttaaaagactagtatttaaaactccaaaagagatgactagattggaagagtctccaaagaaggagcacatgtttgatcactttgacttttcataatgaccttagcatatatactgggtaaacaagctctgaaaat

SEQ ID NO: 55488 - DNA, 811 bp, Homo sapiens
  misc_feature (1)...(811): n = a,t,c or g
gcacaaggcacccatacagatctgatgtggttgggggaaatgcagtccccacctcttcatgaaaagagtatgcgtgacatcgtaagaaaaacatgtgggatgggataaatatgtaggtgtggccattcttaaaatacagtcttctccaaggattgagggcatgcacttcagcatattctacttaagactatcctctaattgacttttttcttaagtcagtttttttatatatgggtaatcaaatataaatttgagtatgaacctataaaagtagcaaaatatcagcaatttcataatgttcattgtaatatcggttatagtatattcttttttttttngctttttttctttttttttnnaaangnannctngtttcgtngcntaggntgaagngcaggggcnnantctaagntaantgaancnttngcccccnaggttaaagnggttntcnngcntaagcctccnnagtaccngnatttccnggngcnggtnnccaccccngggtanttttnganttttnggngnaggcggntttnnnccntgtnggcaaggctggccngaancncctantctaagggnanccttccncctgggcctcccaaagngctgggtttacaaacgtaagtnctggggtccaaccnnttttaggggtatncnantnnannttnntttaatntngccctnttaaanntnnaaaanaactttntnaaannccttncttaattaagnggccgaangctttttccctttanggagggtnaatttnancttggnnntggccgnnnttttanaaannnnnnanttggggaaa

SEQ ID NO: 55489 - DNA, 334 bp, Homo sapiens
gattaaatatactttcactcaaatgaagttttattcattttggcaacaattgcgtaatttatgcagttctacatatattttcagttgtatttaggaatgtcattaatcacacctttgccctttaagctttgttaaattctattttttattgcattactgccttctttccctgattttttttgattgtttcatctttcattttggttagtcccctgtttcacttatttttatttcattttttttgtagagatgaggtctctctatgttccccaggctgatctcgaactcctggcctcaagtgatcctcctgccttggcctcccaaagtgttggga

SEQ ID NO: 55490 - DNA, 598 bp, Homo sapiens
gcgtcgacgtataatacggcccgtcatatacacgtacatagagccatgtgattccagaaattagaagactggatctgtggaatccatacatgttaaaattttgccaaaatgagatgattaaaatttttgtgagttttataaactgttgcagttcgccttactgatttttcaatgataatcacttttatgggaagggggcttaggaacaaaaaactttgccaagaatgcaaaatcttactggtttttaaagcttgtaacagttgtgtgtaaaacttttatatttgaaacgtaaactcaccctttctgccactgctttcattgcacttttcataccaagttctctccaacgtggtgtctgaaagatttttattatatacactctttatggaattcaatgaagtgtggttatgctgtgtttctgaagtttttaggcttttcttcattggcctgcctaatactagtgtgtttctataacttcagatgattcaaaagtttagtgcttcattgtaggcaaaaaatgtatataactcataatatcctacatgtaggtattcaaaatcaattattaataaccaataaaggactcaacacattttaa

SEQ ID NO: 55491 - DNA, 1196 bp, Homo sapiens
  misc_feature (1)...(1196): n = a,t,c or g
tcaatggcgtccgggctggtaagattgctgcagcagggacatcgctgcctcctggctccagtcgcccccaagctggtccctccggttcggggagtgaagaagggattccgcgccgccttccgcttccagaaggagttagagcggcagcnctttctgcggtgcccgccgccgcccgtgcgccgttcagagaagccgaactgggattaccatgcagaaatacaagcttttggacatcggttacaggaaaacttttccttagatcttctcaaaactgcatttgttaatagctgctatattaaaagtgaggaggccaaacgccaacaacttgggatagagaaagaagctgttcttctgaatcttaaaagtaatcaagaactatccgaacaagggacatctttttcacagacttgccttacacagtttcttgaagacgagtacccagacatgcccactgaaggcataaaaaatcttgttgactttctcactggtgaggaagtcgtgtgtcacgtggctagaaacttggctgtggagcagttaacactgagtgaagaattcccagtgcccccagctgtgttacagcagactttctttgcagttattggagccctgttacagagcagtggacctgagaggactgcacttttcatcagggacttcttaattactcaaatgactggaaaagagctctttgagatgtggaagataataaatcccatggggctattggtagaagaactgaagaaaaggaatgtttcagctcctgaatcaagacttactaggcagtctggtggcaccacagctttgcctttgtattttgttggcttatactgtgataaaaagttgattgcagaaggacctggggaaacagtattggttgcagaagaagaggctgctcgagtggcccttagaaaactttatggattcacagaaaatagacggccgtggaactattccaagcccaaagaaaccttgagagcagaaaagagcatcactgccagctagccgccatggatgcagcagcctgaaacttgagagcgaaagtgagataaatgtcaaaggtgtttcaagccagacattttcacaattgtgaagaaatagatgttttgtttctgttttttactgtgttcccaaaattaaataaatgttaaccaagtcacagtgtttttggttttgtttttctgaaatcttggtttgat

SEQ ID NO: 55492 - DNA, 575 bp, Homo sapiens
gcctcccaaaatactaaaatgatagatatgagccgccacacctggccataagcttcagccttgagcagatactttctaaacactttatatagggaaaaaaaactaattcttgcgtagccaaggtgttcattttgccgagaataacgtagcatagtgtttacaattacgtgggtgtaatttctagctttgtgatcctgagagactgccttatcctcccatatgcctccagttttctcatgtgtaaaaaggggggtaataataatacccgacagggatgttgagaaatccatgtaaaagtacttagaacagcgcctgcatatagtgagagcagagaaaagggaaaaggttcgtggtggtgattgcattgatgttattattccttcagggtatcaccaagtcttccagtgccgagcattgttcagttgagagagaaatatagatgctaggcatacacctagaaatagcattgacagtaagttacgatttctgtaattatcttcttagtaaaaaacctacatatttataaatcttttgagcaactggaaaaaaagtattaacttaaatttactacagga

SEQ ID NO: 55493 - DNA, 354 bp, Homo sapiens; identical to SEQ ID NO: 44829

SEQ ID NO: 55494 - DNA, 330 bp, Homo sapiens
gttactttaaaagttctgcttgattattgtttcttaggaaatatgggaatgaatcttagtagtgagtatgtggaaggttctgttcttgctaaaatgtattttcctttactgagaagcaacttaaaaaataagaaatgagcttttgttcttatgtggcaaccttaatagtgatggactgattgggaagaaaggaagcccctgcttatgatgtagcatccctcagaaaaggcacactaaagacaagctgctctctccctccgatttctgacaacaggaacaggagaaagcactgcagaaagcctgaactccattcacagctgggtaccacaa

SEQ ID NO: 55495 - DNA, 375 bp, Homo sapiens
gcgtgccaccacacctggctaattttttgtaaagacagggtttcagcatgttggccaggctggtctcaaactcctgacctcagctgatccacctgcctcagcctcccaaagtgctgggattacaggtgtgagccaccatgcccagctggataactttttttagtcatagccaagagccctcaaagaggatattaggataaaagacatgtaaacaaatcctagttctgtgtctcagcgatgcagaagttttcaagagttttactttgggatgatgaaaaagctttggagttggatggaggtgatggtggtacaacattgtgaacgtacttaatgccaccaaactgcacactttaaaatggttaaaatggctttaaa

SEQ ID NO: 55496 - DNA, 436 bp, Homo sapiens
aaaacttttttttttttttttttttttgactactcaaagactttcttttattagtacatgggctgggattgatgggaagggacagatgtagttggcaaccatggttagcatcggatgcccatcccaatggccatgaatgtgccaaaggtgccgccactctgcatcatggttttcccaatgccgcccatcagctctcgaccccgcattccgatcctgaggaggaaaccaagatggagctgagacaggaaaaggtgccgaagagcgccccggccgccatgcccacggcgcaacccatcacgaagcccattttgacacggtcgaagcagcttggctgggactgtccgtagggacccacggccaccggcatctcacctcgctcgcgggctgggtcgctcagctctacgtctctcacggaaaacgacggggagggcgctcg

SEQ ID NO: 55497 - DNA, 383 bp, Homo sapiens
cggacgcgtgggccattttgggctgaggggcgcttttggaggtctttagcgaccggggtggggggtggttttcgagaaatcggccctgattcagtggaccgcgcccttattttccagtcgggtatagtctggattcttggggcggtagggacccccgagaggccgcggtagaatggtgacctgtctccttcgaggcctgggccggccgcgacctcccaacatggcgccagttgaacgctgccttggctcataacccctcccaatggagggagtttctctttgcccctaaaatggcagcgcgggtttttgcccggaaagaggcgctctcgttcgggtctccagtttctgtttttggagttgacagcagaattttaaatattgga

SEQ ID NO: 55498 - DNA, 11944 bp, Homo sapiens
  misc_feature (1)...(11944): n = a,t,c or g
ttttaacaagcaaaggcccagcagaattctgtgcttcttggtgaagaaagagaggagtccttgaatggcgggggagacacaaaagggaccccccaaaatccacatggggtgctgggaaccccaaaatccagtggaaggcacatcaggcacaaattccagagaggttctgagtggaatccctgccacaaatcccagccattggagatggaggagctcccaaaatttagaagtatccccaaagccaagaggaaaccaaatgatggaggagacagggggctcagtctttggcgggggtcccccaattccagaagaactggaaaagcacatggggaccccctcatctcccagggtggggaatgggggatcctgaggcagcatcagggcagagacgaacattgattggctggtgggcaaggctccttggcgtggagggctgagattggctccctggtggcttgggcggggcctaaggcacaaggcgggctgcgctgagtaggcaggcaggcaactcatcggcctgggtgcggtgcaaggagggttccgaggcactccgctcaatcttggggagtgaccgttgcagcagctcaattgtggccaggatctgggggcaggtgggggggaggaggggggtccagaccgctgtgggcatcccaacagccccagcctcatggcgaannnnnnnnnnnnnnnnnnnnnnnnnnncacccaacagtcccagcctcatggcgaaacacacatacacacacacccccaacagtcccagcctcatggtgnnnnnnnnnnnnnnnnnnnnnnnnnnnnnnnnnnnnnnnatacctctgagctttcatattcacatctgcctccatctcagtcttcctctaacccagagtcacccacccaaggtgtccagccccctacccagcccacctgggggaagaggggccgctcctcccgctggaacttgaggcagtcagacagcaggcgccgcatggccttggggcagttgctggagattttgctgaggtccggggacagatagccacggcccaccataaagataatctgggggcagacgggggcaggaaaggggtgatctggggtcaggggctgggaggcccaaggaattttgtattgagggaccttggaaggttcatttttagcgagctggggtactatcagtatcaaggcccagaggattctctgtccttgaggacttgggaggattctctgctttcagaacagagggatttaaatttggggttgtcaaggattgtaggtatctggggctcagaggattataggcccacgggtttctaggaggcttagggacctggaaagtactgagtctcgggaaaacatggagttctgggtctgggggagcttgtacttctgtgggggtctggggcctagagggttctaggtatcgcccctggggcctgctagatacccaaggcctaggtgactgtgggtgtccatgactattccagaagcacaaaggggttctgtttctgggggaaaatgggatgctgggagaaatgagatctgggctttgaggatctgggggcattttgagtacccagagcagacgactataggcgtctagggatacagagggctttggggtatttgggggcctgcggggattctaggtatagagattcggggcattttggacttcaaagatttttgtcccagagggctgtggatgtgagaagagggaagttggggtaggggagacccagagaatttattgtaagtgtctggagcccaagggattctgggagtccttatcctagaaaattttaggtttctggggaaagtgtggcatttatcagtgcaaaggaggggatgtggggtatggatgcctgaggggatccctcaggccagggaactgtgggtaaggtgtggggctcacctggtcacggcagccaatgtggctgtaaggcagtgagccagtcataagctcgtagagcacaaccccgtaggcatagacgtctgactggaagctgtaggggttcgggtcctgcatacggatcacctcagctgcctacaacaggccagaccaggcagggggaccacggaggtcagcaaatggctggtccacagtcccagatcccactggccacacagggtacaactcagagccacccacacgaggtgggaacatgaggagtccagacacccacatctggcacaggcattcccgttcccacttggccccacactccccaatcccggagcccacgtccccatgtgccccccattcagcctggcccaactcaccatccacagcacagatcctgagggctgctccaagggctgggccccgctccatcgagtcttcactgtggccaagccaaagtcaccgatcttcaccgtgagcccctcatgtaggaagatgtccgccaggtcaaggaccactacagggactcctaatagccatgcctctcaccctgcctgggaggttcccattggtgcccctataccactcatccctctgatcctgaccaggagccccttaatatcacgcaaactatccacaaccttgacgtgggcagggaacgcctgctaatgccccccacactcagccccgctgtgactcctgaacaggaagcccctcggagggcatccgaacccactatgcctctgatgttgaccataatgccctccacaactgtcagacatcagactctaaccagagtccccaagaatagtacctgaaccagccacacctctgacttctaagagactgccattaaagccccctggctggccacagctctgccacctggcaaggagctctgggacacatgcccctcccttgtaattcccagaacccccacaagaggccatccttctaagcccttgacacccccactcaaccccagcccagggacagatagatactgttagacttgagatctcggtggatgatgttcttggcatggaggtagctgtgggggtatgaggcaggtggcggattggctgggggttacctcatttcccccacccttcccccacccctccccaggctgggaggctcactccatgccctgggcagtctgccgggccacgtcgatgagctggaccatgtcgaagcgtgtgtcggccacatgcaggtgatggtagaggctggagccctcacaccactgtgtgatgatggcaaatcccggccgggtcatgaagcccataaacagcaagatgttgacatgtcgcgtcttcctgcaggcagggagggcagtgtcagaggtggggaggaaaaatagcaactgtcacttaccgagcatcaggagtggcactgttctttaccttcctcggtcatttattttcaccctgtcttttggggcactcaggaccaaagcattgccagattccatgaatttgtgagatgtgtttactgggctatgattctgtgctgtgggctcatatgtggagcttccccatccgagtctcccaacaaaagcaggagggaggaattgctgcccctccccctccctgcctacagcagcatttctaatcattaacaccccccacccctctgactctgaccattacctgggtctgtgacatctcacagatgagaaagcagaatgccaaccttcctcactgatgtatcaatataatatggatagatgcaggattaaaacattggtgatatatgatgattagagcctgttcagcagcatgagaagcttagaggtaaagagcttggagtctggactcatgttcaaatctaggcctcagcaggtactcaaggtacaaccttgggaaagacatttaacctctctgggcctactgttcctcaactgtaaaactgatcattgcattagctaccttattctctgtaacataattgtgcccatctgacacagaggaaagccatgccaacatccccagggttggtagacgctatccagtactacctgtagtatataggtatacagtactatgctacatagtaactatagcagcaaataggagacacctggctttcttagcgtgactagatgaatactgtattgattacatattacagcaattataataattaagcaatgattagattatggtgatgatgataatattgtttaaatcaaggtattagaattaatgaataacaagaaccaacactataaacagaacattaccattgtagcccaagcagaggggaaggaaagatggaagccttcctggcaatgcagtaacaagaatggtggcccacacacagacccagttcgcagcaggcaaatgagaagacccacattttggaggcagaaccattcattaataacccaaacacaaacaactgcatgatcacaggtcctctaaacatactcatttcccagagggaaagggacacccttcagagagaaacaacttctgatgatggtttaacaacacaaacacaggtgatgtccaggaagcactccaagcatggccttttcccagagagatgccaaggccgggcctgccacccccatccacgcacacatgccacctcacctgagcacctgcatctcattcttgaaagcctgggcctgctcagctgtgggctgggacaccttgagcaccttcacggccacatcgccatgccaccgccctcgaaacacggtgccaaacgagcccgtcccgatcctcttcagcagctgcacctcactgggtggtacctcccagtaatagcctgagtcccggtaccccaggttcttctgtgggcgagatgggtggcatctaagaggcctgcccacatccctcatcccacgtcactcagccttggtggccccaaaaggatccccctcgagcataccactttcttcttgtcatcggccaaggacttccgctcgcgctgctctgctggtgacttggaatgtggggacttcctccccgaggacacgctggctgggctggggctcccccggggggttccatcactacctcctctactaccggcagctgcagttgcagagaggatgtgagtggaggtaagtggggcagcgggggtcagggtgcaggcacaggggactcaccatcagtgctgaaactctggccagtgagctagaagaagagggacaggagtcaaaaagagggcatggaggccaacagggatggctctaccctctgccctgtggtccccggcattgtcccccacagcaccaacctggatgaggttggagtccatgggggccgtggtgctgaccatatggacgttgggagtggacgtggagcggatgcgctgtaggggggcattggctggggcagggaaggggaagtgctccgggtcacagtgctgggtgcgggggctgccaggggaaaggctgtgaaatcactgccaggaatcagagatccgagaaagccccccaccccacccccagccataaacatgcatttggctcacacagagcgaatgtccactggcagtactattattcattgcttcaagaaacatttattgagtgcctgctgtgtgccagataccattctaggtggtggagataaaactgtaaaacaaaataacagttcttgccctggtggggctgaaataaaaaaacaaatatataatatgcctgatggtgataggtgcaataaagaaaaatagtaaagcaaaataaggagacacaaagtgttcctagaaagtgtcaggaaaggtttctcttgaggaggagatgacaatggagtaaacgcctaaaggcaggatagcaggccacacagatagtggggaaagggtaatgtatcatattttataattatatattataattacatgtacttttcaaatgttatataatatgtatcatctatataaaaatggcaatgttttaaaatatacatattaccatattgttatacatacatgttatacatatgatatatgctaaacatattgtaaagttacaaaaatatgttaatgttcccttcactatcctgaaatgaaactcaaaggtaattaatgcacatacactcataatttaaaataataccctaactttattttatgtatcatataaacatgtatgatgttctacattatataaaattatgtaatacaacatgatacaataacataaatataccataaaatatgcacatcataaaatatatattagagcaataatatattttaatatagctatagttttatataatatttaacataaaaaagcaataaaagggaagtaatttatgataaaataatacgtatttcaaaatggaaaggcttgagtatgattatactagaattagccaaagtaggttaggatgcttataaatatatttataattaataataaaaaaattgattatttacactgtaccagatcctgttctagggcactgaacatgtcttaactcatttaagcctcaccagaacctttatatggtagaaagnnnnnnnnnnnnnnnnnnnnnnnnnnnnnnnnnnnnnnnnnnnnnnnnnnnnnnnnnnnnnnnnnnnnccagtttcatgcccttactcacacttgtaggtgctcaataaatgtttgtcaagtaaacaaatgaataaagtatggctcgtggtctacaagagccccaagatctttttctcccccagcagctcttcagctaaggcatccctacctgggaccctggggggttagcaactcattcagggggcggttcgagggagcctcatgctgtctggagcctccggacaaatcctggacactgtggtagaaccttgagggcatgaagggtataaagcaaggggacacaggtcagctgtctgtaagggcctcgtggctgggcctctgtgctccccatatccccccacccaccccaggctgggctcactgttggcggttggtactcatgtcaacacagactgtggggaccttggaggaacaatgctggtggaacttgtagccacaggtttggcaacggaagccatggaacagaaacttaaggcagaagtcacagaacgccaggctgaagaaggtcttccgtacctgatgccacagagcagggaagtttgagacctggtcaaggacacccccaaccatggtccacccccaccgtccaccctgcactcacaaaattgtgcatggtcagcgggacatcttcaaggacctcgacaatgagctcctcgccatccaggggagcaatggctgtgtcccaggcagtgaccgtctttcgtctgcagggggcatggaaaggaatgagtgggaggttgggtaggggccatggggaggcagggaacccccacaagtccctccaagcctgctacccacagggtcatgtctggcatgtttaattctcatcacagcaactctagaaattagtcactatccttgcccccaactttacagattggggaaacaggcctcagagggataaagtgactggccctgggcacaagggtaatgagaggcatgacggtgtgaagagtccatgctctgaaacggaaggggagaagcaaatgaaactaaacaactacatcttagaagcgctaagccagcccctgaaaagggctgaggaggcactgaaacaacaaataaagtgcagtgtgtgaactgcatcataaattaaggaaccccacgagagaggaataaataaagtcagcaagacccaactcagcagacagagaatggggaaaatgaggaagaagagacctgatgaagtcatgacatcgtgaaaggacaaaatagatgaaatctgggcagaagtgatggaccagggtgaggacttgggggccaggggagaatgagttgctgacttacaggccaataaacctatgaagtaacaaaacaaaagatggatgaactcatagattacttgaactannnnnnnnnnnnnnnnnnnnnnnnnnnnnnnnnnnnnnnnnnnnnnnnnnnnnnnnnnnnnggtggnnnnnnnnnnnnnnnnnnnnnnnnnnnnnnnnnnnnnnnnnnnnnnnnnnnnnnntgcannnnnnnnnnnnnnnnnnnnnnnnnnnnnnnnnnnnnnnnnnnnnnnnnnnnnnnnnnnnnnnnnnnnnnnnnnnnnnnnnnnnnnnngcccatcacttagtagcctgctcagttatcaaacaactgactcaannnnnnnnnnnnnnnnnnnnnnnnnnnnnnnnnnnnnnnnnnnnnnnnnnnnnnnnnnnnnnnnnnnnnnnnnnnnnnnnnnnnnnnnnnnnnnnnnnnnnnnnnnnnnnnnnnnnnnnnnnnnnnnnnnnnnnnnnnnnnnnnnnnngaannnnnnnnnnnnnnnnnnnnnnnnnnnnnnnnnnnnnnnnnnnnnnnnnnnnnnnnnnnnnnnnnnnnnnnnnnnnnnnnnnnnnnnnnnnnnnnnnnnnnnnnnnnnnnnnnnnnnnnnnnnnnnnnnnnnnnnnnnnnnnnnnnnnnaagacggaaaaatttatgggtagaagacaagaatagaaacatgttccnnnnnnnnnnnnnnnnnnnnnnnnnnnnnnnnnnnnnnnnnnnnnnnnnnnnnnnnnnnnnnnnnnnnnnnnnnnnnnnnnnnnnnnnnnaagactaagggaagactaatggaagactctgtgataaagtacagaaggaatcaaatgactgaggaggggatgggaggtgggacacccagtgggtgggcgtggggctgccacactcaccccttgatgagtcggtagaccacacagcagtcctgatttagaccccgcaccttcagggccttgtctagagagtcgtagacactcatgccatcccggacagtcacctgtgtgtatgtgcagatgtaggggtcctcaatgcccaacagaagcgcagctgatgttcccatccttctgcaaaggcctcccccaaccgttgtcacccttttgatcccagagttacaactgggtccatccacagcccctgccatttcgcttccatgactcaccaccgtgcgttgcttgttgggcaggtatactttgacggtgcccactgcccgggatggctcggccccattggcaggggggccccgtggtggctccatggagccttagattttgtcaagatgggctgaggtggggctgggcaggtgccatggggctcctacaagaaggcagacaagaattcagaggtccaataatgatagtctagaagcaaagtggcaggggacaaaataaaattcaaagtccaggctcctgtcgccccctgcagcctaattttcacacgacagtccaagagatcctgctcacatctgaagtccttccagttccttctctgctcaggccctcctgttgcttgtctcactcttgagtgccaaggtctcagcttcactgcacagggttgcgggggagagaacagggaagggggacagagcatactgtcttggagggtagaggagcacacaagactctgtgctggggaccaatggggaagtcagtacacactgcactgagccgtcagtacataagaagcacgaacagaatttcctgggnnnnnnnnnnnnnnnnnnnnnnnnnnnnnnnnnnnnnnnnnnnnnnnnnnnnnnnnnnnnnnnnnnnnnnnnnnnnnnnnnnnnnnnnnnnnnnnnnnnnnnnnnnnnnnnnnnnnnnnnnnnnnnnnnnnnnnnnnnnnnnnnnnnnnnnnnnnnnnnnnnnnnnnnnnnnnnnnnnnnnnnnnnnnnnnnnnnnnnnnnnnnnnnnnnnnnnnnnnnnnnnnnnnnnnnnnnnnnnnnnnnnnnnnnnnnnnnnnnnnnnnnnnnnnnnnnnnnnnnnnnnnnnctggttttttaacagagaacgggggaaatgccagttactgtggtgagggaggagtcgcaggcacggtgatgggaaagagaggattatcagatactgcccttagtttggggaagatggaggttgcaccaaacatgtccttaaagggcactgtggacatccctaagccctggggggtaatgttgatgttaggaccacagacaccgttgttaggtggctaatggaagtcccaagcctctatgatgaggaattcatgggggggggggtcactacatactatgcggaagggagatgtaacaggcgtcactagggactgtaatggggagaagggtggaaatggaaatgaccagacattgagccgaactgggaggtaatggtggaccaccagacattgtcatagcaaaaggagaaggaaggtatggtgttgcggggagaaaaatggaggtaaagagggagctccaaaattctccttgacaacctgtgaggggtcacaggcatattactggtctaaactgaatgagggatcatggaaggcggttacagaggcgagaatcctgacattctccggcgggggcggtcagacactgatccagaataaggaaaccggggagtgaaccgcgtttccacacactccccgcagttggtaaggaaaggtcattggacaccttagcgggggttaagacggaatcccggcaccactcggtcgggtcccgcctaccaaagggcttccggctctgcgcaggcgcaccaccactagcagcgggcgaaaccatcacccgcagccttgcccgcctattcctgttacccaccccacccccgctgtcgacgatggtctcgccccgggtcaaaccactcctccggttccgggcagggaacgccggggcccaggcgcacgatcctggagctgagctttcggtccgggctccctgcccgtgcccggcagccgctccagaaaccgagccctcccgggcccgccctcacctgtcacgccgctacagccgccgccgtctccatcttgggcctctcttcttgtttcctcacagagtccgcctccgtcgcctctcggactctcgttattggctctgcggactcagccttccacccttattgggtcagggtcacgtctgtcaaggcaagaccaatcggaatgtgagtcgtgttccggattaggaggggccgcctgaaacgtcaagatctggggcagcatcgtcctgactcgcaggcgcagttgaggcaagacctgcgtgcctaggctttaaccccaacagtggcatagacgtataaagcagaacacaggtcatttggggctgaccttagggctttggcatctgggcggagaaatccttaagtaccctttttgggccagtgcctaagcacccttttatgattttcccgtgtctcagtttttaccatctttgaaatgggttggaatcagaaccaatgatcggcgatgttcaccagctctaggagactgtagttcatagcctttgaggacagcgggtctctggtgtggcgggggctgggggactgggcctaggaggggcggcctgctgtctgggaggcttcctttaggaatggggttgattaggactatgaaaaactagtcacaggtggccaggtgaagagggaagtgcggacctggaaggagcacgatgccagtcaatgtgtggaggtattgtggggtaaacacaaatttttaaagatcgaattttccctggtgtcaaaagagaaagacgtctctcttagagcatttcctttagaaaacttgtaactgtaaaattttctctgtccctttgagatgtatgtaagtccttttaaaagctaaatctcttgccagttttacatccccggaatgtttttcttaagagccttgtagccactctttgaaatgtgaaacatcaatgaaatagcacccctgtctttccctgtcttcgtgggaatttgatctgcgtgcctggcttcaagttattacctgcttgtcatagagatatgagttttcgttttcctttggataaaggcaattaactaacacagatagccaccctaattaccaggtgaatttgggatgaagtatgtgtaccaaatggtgccgtcaagtttcttgagcacaagttattgtttgagaatatgtttgtaatgggctgtatctgcctgctacataaacggatgagatttctttctgtctttgaaacctctttagcagattgtttgtgatgtgcatcacagtctggtgtaatgcttattcagttataaaactttccattc

SEQ ID NO: 55499 - DNA, 410 bp, Homo sapiens
catgaagtgggtcagtgacgtggatgagtacgcaccagaaggcgtccagaagatccttattgggaataaggctgatgaggagcagaaacggcaggtgggaagagagcaagggcagcagctggcgaaggagtatggcatggacttctatgaaacaagtgcctgctgtcctctcatgtgatgaccctattgagtatcagtagccactactccccctgcctggccctgagagcggctctgctgtcatctcaagcagcccctgtccccagcccgtccaccctggagtggtcttcttcagcctgtttccccagccacaggcctgctacgacccccacgatgtgccgcaagcactgtctcaccatcccgcacccaccagacaacagccagggctggagtccaggccactttcagct

SEQ ID NO: 55500 - DNA, 634 bp, Homo sapiens
gcacgagggcattttaatttgcagataataccctggtaattctcatgaaaaatagacttggataacttttgataaaagactaattccaaaatggccactttgttcctgtctttaatatctaaatacttactgaggtcctccatcttctatattatgaattttcatttattaagcaaatgtcatattaccttgaaattcagaagagaagaaacatatactgtgtccagagtataatgaacctgcagagttgtgcttcttactgctaattctgggagctttcacagtactgtcatcatttgtaaatgggaaattctgcttttctgtttctggctccttctggagcagtggctactctgtaattttcctgaggcttatcacctcagtcatttcttttttaaatgtctgtgactggcagtgattctttttcttaaaaatctattaaatttgatgtcaaattagggagaaagatagttactcatcttgggctcttgtgccaatagcccttgtatgtatgtacttagagttttccaagtatgttctaagcacagaagtttctaaatggggccaaaattcagacttgagtatgttctttgaataccttaaggaagttacaattaggccggggcatggtggc

SEQ ID NO: 55501 - DNA, 997 bp, Homo sapiens
  misc_feature (1)...(997): n = a,t,c or g
ttttttttttttttttttgactaagccaagaacttccagtttttattttttaaacatcatttaacaagaaaaaacattcaaccaaattaaaaagaactaggttggattaatttacaataaaataatcaacttaaaatatcggcccttccatttagggccaaggaggccaatagttcctgtttaaacagcagaattgcacaattatttttacctatatttgatggcacaaaaaaataaaagtcttacaacttccacggacatcctcccctccctccagagcagagttcatacaattccatcttaggtcagtactcaggcttttaaaaatcatcttacgttttgaaatataatacaactactctgggtaacaagaatacttttaaaacaattcttatagaaaacaaataccttagataattgtgtggcacattagactgctcaaagaaacagcaaagatgaaaaataatgtacaagaattatagtcccttgtttatagaaaccatccaaataaaatattttccctaattttccttgcttcttataatttattagcagagatgaattacaagaagcagaacgcaccattttttggttcttggttgtagctgccaacttaggagttcatgactataaatataaagcaaatatgattatgctcacaagctctggaatggtaaaaaaaccccacatatctctaaagtgtttctctatccttgctttcaagtcatgacaaaaaaattcacagcagtttaaaggatggtgaaagactaaacatgggcccactaaaatagagattaattttacctattacactcctatagtaaaaattgtaataagtatgatattgtattaagtaacattctatagtaagccgttggagcaaatacagcatttaacaggttcatttacagatccggcatggtagccttcagacagaacatcttattttcactcttgaacatgtaacctttaaaaannctnaaaggaatatgtaatc

SEQ ID NO: 55502 - DNA, 403 bp, Homo sapiens
  misc_feature (1)...(403): n = a,t,c or g
aaaaaaaagaaaattttactgcattttcttccatgacttatagtttttagctctttagttaagatctttgatccattgtaaattaattgttgcatgtggtataaggtaaacattcagattcattcttttgtttgtgaatatccagtttttccagtaccatttttgaagagactgttctttccccagagattggttttggcacccttgtcaaaaatcaactgaccatatatgcaagggcttacttctgggctctcaatcctatttaatttgtctgtatgtctggccttatgccatgtaactctgtcattactgtaactttataataagtttcagaattgagaagtctgatttctgttctttttcaagattgntttggcttttgatatttcctgngaattttaag

SEQ ID NO: 55503 - DNA, 901 bp, Homo sapiens
ttttttttttacgatgtgtcagaccatctttattgatttaccctaatgttatgcataaagtttatctcttccccccattcgttctcatcctcccttctctctctctctctctctttctctgacacacatacacacacataaagaagcaaagtcaccagctgagagcgaagtttggggtggaagttttgaggtttgagaaaaaagaagtctgaaagtctaacctctttttgaaatgtgcctgtgatgaagagtgacaatcggcaaagcaaatctaataggatctctaaagagccttttcctgttgtttacaattgtggctaaagccctgcactagaaaacaacaaatgctaagatcctccctgcatcccctacccccgaccccctggggcacacacaaccctcctccaccacgttctaaaaagactggaaggacttggaaaaacattcctatgggatgaactagaaggtggcaggactgctatcatcagacctcatttacccaccgcttccagctgaaaaccagggatttcacaaaggaaaaatcatgagagtcatagttctgtggttttctcaaaaggagaaggaagggacgctcttccttcccaccccctgagaacaggccaaatgagagcaagcccactggctggactgagggtgacccaaatgaatgtgacgatggcatctcatttccccaggtggaacatgtgctgggcagcatgtgccctaggactgacccagaagacacacagcaccacacaacaggattgatgtgatgacaaggccaagacagaaggctgtgggaggagtgaggagaaggtggccaagtgcctgaacaatcaaagcaggtttcactcaggaagctctatctatctgagttgggtcttgaaggacaagtaagaat

SEQ ID NO: 55504 - DNA, 491 bp, Homo sapiens
  misc_feature (1)...(491): n = a,t,c or g
aaaaaaaaaaaaaaaaaagtgaaagcagtgatatgctcacaaatgtcactgaaatgtttataacatcagggcttttggtgtttttttgttttgttttttgttggtgttttttttttttttttgctactagcaaagcagtttttattttaaatttgcaagcctgggccaatagtttgtggttggtttctctttctacaaaataaggtataagtgagtgagatataattgagtaatgaaattgcattgaaataattgagagtattgccgaatattagcacaaaagctcttataaacacatcttgattaagatacatttgcacttaaccgttttgatccattcatattgaggcatctgttgcttatatactttattatagtagaagtcactaataaactggtaagaatttttgagtgtgaattacatgcctagcaattggatagtgtaagacnccatcataatcncattattccatatttttttggaataatag

SEQ ID NO: 55505 - DNA, 2374 bp, Homo sapiens
  misc_feature (1)...(2374): n = a,t,c or g
ccaaccttaatggcctgaggtgggcagaggggtgtggagcagccaggagccctcatctgctgtgctgagtccaggaaagcatagttaggtagggagctggttggagaaggtgctagaactagaaggcagatgagactagcatgggcccacctggagggctgtccctaatggccccagtcgccttacctcacccacagcagtgcccttgtcttcctccaaaacagaaagcagtgacaaaagggggaggggtggtaatctgaagtctcactgctgagccttcagcttgtatttttcactgtttcaaaacccgcattctattctagaatggtttttaaaatggaagatcttacctttttctatcttgttactctggggttttgtccccctaagagattgcactttttgtttggggtttattcagctgcatagatgaccagcttgatccctggtgaaatgaaaagccttccttctcctgaagcctctttccgccctgccctccactaacaacactgaggagcacaagcccaggcttgcccacctggtaggaaaggaagaaattagaacaatgggagccttggctcccctctcgtctcctcccctccttcttgtcactggctttgatgaggcccacttcccagaggctcctgggcctgtgagtgcaggagctcattctcccctcactgctgaagtctgtgacagcttcttcctccagttatgtctttcttccaaagcaatttcttaaccatcagccatgtgctgctatttctagggcttctgggctttgtcccttactgagagattagggactccacagctgccttgaggtagggcctggctgagagacaagggtagcagcaggtggcaggctgttaaaagacaggctgcctgaggagcctggagcaggtggaaacacngtggaagaaaccggccacagccctgctttaccgggctcacctctagggcattccagcaagaggctgatgcaggagaatggccagcaccaaaggacatttaaaagagtttttgggtttttttgtttgtttgttgttggtgtttgtttttttttttttttttttggcacacttgagctgactcagtgcaggtttaatatcctggtgacttgcagtcacattctaatgactttcaagggccagaatatggtgaaaatcacttaaaatatccgtcccttccatgccttagtttagcaggtaggctctatcttttgccatttctgtattttatgtgctgtgttcccgtttcactgggtatgaactgtgaaatggactgaatcctggccactttatgagtttgtttggttttataaggcatttcaatgtacattctataaatacaagcactccatttgcaaacagatcttaagctaatattttctttcccattcatcttgccctccccctcctcccgccagctttaaagttcagtggagaagccagatggcaattcagacaaaggtatactcttcctgcttcatgggtggtggcacgggaatagatagcccttagccctttccctcccagtcccagctgagccctcagaccacttgcttcccacataacaatgtcgcctccatttccgaggaacatccttgcgtagagaatgaaatatgctgcaatcatttctgcatccttactcctcacccccaaagaaaaaaaaaaggcctaggcagggaagcagcatgcagggctttcacagcttaatgccaaggacagcgagtgaggctgggagcttctcttgggcctgctgggtctgtcagctctcggaatagggacagtccttactggtgcccccaaggtgggacttggagaatattttgcttggcatatgtttggtctgaatggtgtagttgctggttccctagagaggaaaaggtggcaggcccagctttgctgggaaatggctcttaatttccagttgaaaccctagtagaattgtgaatgaaaacctcaaggttgagcccctctgccaagcagcagagctagtagaaggggatgcaggggcaaagcactcagttgccaagcaaggaggagagatgtacgtgggctgtgtggcagtccccacaccctgccctggcttcttcaggttatcgcaccactatggaatcctttgcagaatggtactcatataatggtttaaaacaacacattcataattgactctgtgcaggatgtcactcaatcagtttgggtttgctttattttattttatatatatattttttggtatcctgtacattgcagtgggtgtgaagatagtattttaatatttgtacaaagtttaatttaattttaattgttctatgtatataactgcatttctaaataattaaaaaaaagttcttatgaaggcaaaaaaa

SEQ ID NO: 55506 - DNA, 422 bp, Homo sapiens
ttttttttttttttacatttgctacacggtatttattcaatgactgtatatttagtcaccacctcaaccactgctaagctctcttcatgtctatctgtaccagtttcccatcttagactgtgatgtcaactggcaagggctggctgttggccgattcaccatgactgacatggtgcatgttcacttgtttttaaagcagattgtacaaacaggagaaacaaacaggggaaactgtatttccagtttctttttgttaacagcctgttgcctcacccatgcaaactcttctagctagtttaaggctacataatcttattgctaatcaaccagcaaccatacctatcactctccaaaattataagttaatacttatggacaaaaaccactattgagaactttgcattcaaacagacaagagtcgg

SEQ ID NO: 55507 - DNA, 621 bp, Homo sapiens
tttttttttttcgtatggctaatggtgacacactttattaatttaaaaacacgcccttcccacatagtgcgtgaggcatgtgcacattttcctagaaggacatgaatagtgatgtggaggtacggtggaggtcaggcatctacagggtcattcgaggaggaacagattcaagctttcggacgatcagtgttttgtaaatagcagcatcatcagatctaaggacaacattggacctggcagggccttttctttgggtggcattaattactccagattcagaccaggccatcctctcccggcccaggatctgcctctccctcctctgtccccacacctagacatgaaagccataacccttgggcccctcagagggaaaacacaaggggtgcgaggggtgggggggcggcgatggggggcattgttgagcagtcctctcacggctgggagcctctgctgcttccagttaactgcctttctggaaagcgattctattacatgatggaggcagcggaatgaaacattgaattacacggcacgagatccaagctagttgttctcatccccagggcatcagagtttaaggagtttaatttgaggcttacttcttttaaaaacaagatg

SEQ ID NO: 55508 - DNA, 344 bp, Homo sapiens
ggagccatcacttctcctctaaagggcgtattcctgtgtcctctatattaagctgaccagtaaaccagaatgcatggggtgcttggttttgtgggccattccagagtgggccaagaagaggtctgcactgtcaaaccctgactgattctaccaaggggcctgaagtggtttacagaggacaaaggggataatttggattttcagaacagtgaggtgctaatgggctattagttgacttgaacatatgattgagaatgaattattggatctagagggtcgggcaggagcatcatgagagattgctggaaatacaggagaaagagtctgaacagatgtaagtgggg

SEQ ID NO: 55509 - DNA, 443 bp, Homo sapiens
gtgccctgtactccagcctgggtgacaatagcatgactttgtctcaaagaaaattagaaaaatatttaaaaagaaaatgaataagatgcttctatatgcagccatatagatgaatctcatgaataatgttgaccaaagaagaagagcataagagcatactctgttactacttttatacaaatacaaaacaggcaaaacccatctgtaatttaagttaggatgaaggttatttttgtagagtaggagtagtgagcaattttaggaggcataggagggggttctggggtactgataatatatttcttcatctgggtgtgatcactttgtgagcattcattgggatgtcatttatatatgagacacacagaatagcttggaaagagagaaactgaaatcagtgccaaccccaagctttgatgcctgtggggaaatgtgataatggg

SEQ ID NO: 55510 - DNA, 585 bp, Homo sapiens
attgaaaaggagacctgctgctttctggaccttcctgcctccctcacgctctccttgccctactctccaggacagcctgtgccagtacttcgcccaactcaggcacatgccccctggctgctcctgcaggccaaggaccggcatgcgctgcagcgccctctactgggcacctggccctcgctggttttctgatcctaaccagcttctcctcttagaatttcctgctgatccatcccagaatgaatgggagttcaatctgtactgaattatctttcatctagcaattgtgcaattccaaatgcaggtgaggttgagggaaagcgggcatcccctcacatccatgggatctatgtgtgggttgtatcaagagtctcaaaaatgctcatattctccagtcctagaattgggtctagcctaaggaaataattcagaactccatgtttttttaaagctttatgcacaaacatgatcataagacatgatttatgataaaaattggatgaagtaaactttcctatgaaagcagctgagtaggttaaattaaggtatacacttgatagccccttcataaagaattctcaagtg

SEQ ID NO: 55511 - DNA, 1261 bp, Homo sapiens
ccttcgcggggcgcggccgagcttttcggttcacagcgggcagggaaagccgcgggaagggtactccaggcgagaggcggacgcgagtgtcgtggcaggaaaagtgactagctccccttcgttgtcagccagggacgagaacacagccacgctcccacccggctgccaacgatccctcggcggcgatgtcggccgccggtgcccgaggcctgcgggccacctaccaccggctcctcgataaagtggagctgatgctgcccgagaaattgaggccgttgtacaaccatccagcaggtcccagaacagttttcttctgggctccaattatgaaatgggggttggtgtgtgctggattggctgatatggccagacctgcagaaaaacttagcacagctcaatctgctgttttgatggctacagggtttatttggtcaagatactcacttgtaattattccaaaaaattggagtctgtttgctgttaatttctttgtgggggcagcaggagcctctcagctttttcgtatttggagatataaccaagaactaaaagctaaagcacacaaataaaagagttcctgatcacctgaacaatctagatgtggacaaaaccattgggacctagtttattatttggttattgataaagcaaagctaactgtgtgtttagaaggcactgtaactggtagctagttcttgattcaatagaaaaatgcagcaaacttttaataacagtctctctacatgacttaaggaacttatctatggatattagtaacatttttctaccatttgtccgtaataaaccatacttgctcgtatataccccctgcctccttctgttccagtcagccaacatatgtacataaaagaacacacaaattcaagaagttggaagattaaattatctgcttatttagtgtaggatggtcaggtagctagctataagtgaaaggaaattttgctgaagagactgagaaatgggtagtggaatgactatcaagatgacctcaaactatttaaaaacattttaacttgccatgaagaatcttgatgatttttgtataaatgttgtataaaattcttttacagctacagatttttaaataggatcattgtaaagattaatgagataatgttttaacatagtgcctggtccatgataagtgttaaatttttcaattaccctcagtaactgataatgtagcagaaaatactctatattcagacagacctgaatttgaatcccagctctatgactt

SEQ ID NO: 55512 - DNA, 3395 bp, Homo sapiens
  misc_feature (1)...(3395): n = a,t,c or g
gagccactttgacttaatgaaaatgactgctggcaagaggagtcccccaatcaaacctctgcttggcatgaatccctttcagaagaaccccaagcacgcgtctgtgttggcagaaagtggaatcaactatgacaagccgctgcctcccatccaggtggcatctctccgtgcagagcgaatcgcaaaagagaaaaaggctctggctgatcagcagaaggcacagcagccggccgtggcccagccacccccgccccagccgcagcccccaccacccccgcagcagccaccgccaccgctgccacaaccacaggcagcgggcagccagccgccagcagggccaccagctgtccagccccaaccccagccacagccccagacccagccacagcctgtgcaggccccagcgaaggcgcagcccgcaatcacgacggggggcagtgcagccgtactggcaggaaccattaaaacatcagttactgggacgagcatgcccactggtgccgtgagtggaaatgtgatcgtgaacaccatcgcaggggtcccagctgccaccttccagtccatcaacaagcgcctggcgtcgccagtggctcctggggccttgactacgccgggaggctctgctcccgcccaggtggtgcacacccagcccccgccacgggcagtcggggtccccagccacggcgacccctgacctggtgtccatggcaacgactcagggtgttcgagcggtcacttctgtgacagcctcggccgtggtcactaccaacctgaccccagtgcagaccccggcacggtctttggtgccccaagtgtcccaagccacaggagttcagctccctggaaaaaccatcacacctgcacatttccagcttctcaggcagcagcagcagcagcagcagcaacagcagcagcagcagcagcagcagcagcagcagcagcagcagcagcaacagcagcagcagcaacagacgacgacgacctctcaggtgcaagttccacagatccagggccaggcccagtccccagcacagatcaaagctgtgggcaagctgacgccggaacacctcatcaaaatgcagaagcagaaactgcagatgcccccgcagcccccaccgccacaggcccagtctgcgcccccgcagccagcagcccaagtgcaagtgcagacctcgcagccgccgcagcagcagagcccccagctcacgacggtcacggccccaaggcctggtgccctgctgacgggcaccaccgtggccaacctccaggtggcccggctcacccgggttcccacttctcaactgcagtcgcaagggcagatgcagacccaggcaccccagccagcccaggtgcccttgccgaagcctccggtggtgtccgtcccggcagctgtggtctcctcaccgggagtcaccaccctgcccatgaacgtcgcggggatcagcgtggcgatcggtcagccacagaaggcagcaggacagaccgtggtggacccagcccgtgcacatgcagcagctgctgaagctgaagcagcaggccgtccagcagcagaaggccatccagccccaggctgcacagggcccggcagccgtccagcagaagatcaccgcacagcagatcaccacccctggcgcgcagcagaaggttgcctacgccgcgcagcnggcccttaagaacccagtttcttaccacacccatctcccaggcccagaaactggccggggcccagcaagtgcagacccagatccaggttgcaaaacttcctcaagttgttcaacagcaaacacccgtggccagcatccagcaagttgcctctgcttcccagcaggcttctccacagactgtggcgctcacgcaggcgacggcgggcccggggcagcaggtgcagatgatccctgcagtgaccgcgactgcccaggtggttcagcagaaactcattcagcagcaggtggtgaccacggcgtcggccccgctccagactccaggcgctcccaacccagcccaggtgcccgccagctccgacagcccaagccagcagcccaagttacagatgagggtccctgctgtcaggctaaagacacctactaagcctccgtgccagtagtcagggcagcagggctgcctctcatctaaagcaaaactaccttcctcacagaaaacgctttattagtgaaccttgggaccatgtcacgcaagagattcagcactgggaaagatataattgaaacaaaatagtgtaatcattttattaaaatgcatcccacactgcaggacaaatggtccttatggagtgccgcgttctctgtactacgtggctcatggaaaaagtgacaacatggcttcctctaaatcatttcacctttcagtccccacccgcacccgtcccctagagccatagtactgtgttctgaaagccatttagaatttctttgtgagcatgtagtgctttgcacgccacagaagccgtctgccgtgtgtgaggagcatacaatggactttctaaagataaggcgtggggcttccacagtgtctgccagagtttagttctttataccttactgaaaaatgcctcgtggtcttcgcagaggggaaggcctgtctaaagtcaatcatccgagatgggttttccattccaaagaaaggcaatatggttccttccttccctcctaaaatatgacttaacttttaagagaaatgttctgacacccacctaaacacacaaggcacgttcctggcctgtgttcaagggaaatgatcagtcattgcattgttattccaaagagcagccaacagtggcctcccccaggccctaccctgcaatgggattcgctttcatttaatggaaacttctgggactgatgcccaactcagtgcactcaagacgcatctccagttttcgggggaagctggtatttgacatagtgtgttaaacagctcctgagaacctttgggacactctgccatggctggcgtgaggcccagaggaccacgcagaggcaatggtagtacagatgtcacagctgagggtacgatgaggcctgggctcagtgagccaggacgaatgtgacagacaccccttgctgccacagtcagccctttgacgaaggtgggctggtgattctggaagtattggctatagcggtgggcccagtcaactcttccttgtggacttacgacagcagattttctctaggataagcttgtgtggttctgccagtgaagcagagaaccacctgtgctgttgtggaaggcgtgccgttgagggggaaaacgaagcccagtatttgctactgtttttcctttttttactatgacaggaaaataaatgcaattttagtggaattgattgacagtgtctccttactttgaagtttttcaccaaaggcaaaaaggtc

SEQ ID NO: 55513 - DNA, 962 bp, Homo sapiens
  misc_feature (1)...(962): n = a,t,c or g
gcggccgcggcggatggggcgcaggcgccgcgcgagtgaatcgaggcggcgggcccatccggaaccgccggccatcgcccgcggccggccggcgggaggcggcagcgaaccgaccggcgccctacagcaggccaaaacaacttcccgacaagtggcagcacgatcttttcgacagtggcttcggcggtggtgccggcgtggagacaggtgggaaactgctggtgtccaatctggattttggagtctcagacgccgatattcaggaactctttgctgaatttggaacgctgaagaaggcggctgtgcactatgatcgctctggtcgcagcttaggaacagcagacgtgcactttgagcggaaggcagatgccctgaaggccatgaagcagtacaacggcgtccctctggatggccgccccatgaacattcagcttgtcacgtcacagattgacgcacagcggaggcctgcacagagcgtaaacagaggtggcatgactagaaaccgtggcgctggaggttttggtggtggtggaggcacccggagaggcacccgcggaggcgcccgtggaagaggcagaggtgccggcaggaattcaaagcagcagctttcggcagaggagctggatgcccagctggacgcctataatgcgagaatggacaccagttaaacagaccagcaaatccgcgtgcggaacaggacccaggcgtctcctcttgctccctggttggggggcggtggctggggctgtgcggccaatgatggatttgtttcttttatgttttaaaataggatttaaaaactcatgtaaaggnnnnnnnnnnnnnnnnnnnnnnnnnnnaattctgaaacagacctgttttgtaccgagttatttttgggataaattttactggttgctgttgtggagaaggtggcgtttccaccttttccataataaaatagaaatgtgtgtagaactgga

SEQ ID NO: 55514 - DNA, 416 bp, Homo sapiens
cggacgcgtgggtgcccactccccctgcctccagcaggccaggaagaaggcacagtccaggcaagtctgggagcttccaagcccttgaggtccagctgtggggcccaaatgacagccttacaagggttctaccagagaggaaaattccacatcccaccagaagacaggggtgttggcaggcatactcctatctcctcctcttggctctcaatgctgaggcttgcagaggcatcccagcggcaccagcctcccactgcacagcttccttccctccttcactctcctctcccctccctgccccttgcctcacctcctcttctagactgcattagattcattcatctcattttccaggacatgttggccagaggtctgggcccatcccaggcctcaaggccctcaggcctgtggggagc

SEQ ID NO: 55515 - DNA, 365 bp, Homo sapiens
  misc_feature (1)...(365): n = a,t,c or g
tttgtgactcaaagatgagatttttatttaaaaatcattcaaaggtgaaacacagcaacagcaatataatgaagtttaaagtccctgtcctcaatgaatgtacaatgcagttgggaacaaaaacaatgattattaaagtgctagttaagtcttatttttaaagagaccctatcttgtccaggatgcagtgctgtggctattcacagannnnnnnnnnnnnnnnnnnnnnnnnnnnnnnnnnnnnnnnnnnnnnnnnnnnnnnnnnnnnnnnnnnnnnnnnnnnngtacataggcatgcaccactgcacctggctcataagacttgataatttataaaataattctacagcctcttccttactctt

SEQ ID NO: 55516 - DNA, 1889 bp, Homo sapiens
agcatatctgatgggcatttataccacatcaatatttatttaatcaactttatgcaaaggcacattgatgagtttaaatcactatagtccttatacattgaaaacagaacaccagtagtgaaatgacatttattaattccattaagacacaactacatattttattcttataatggccatgttaataagttcaaggcatacttcaaggttaggatcaaaatttggccagggcttcttaagatagaccttaaaacattgcacgttgatgttcttttgaacaagtttgtctccaggaccagtaaatatgacactttggattttaagctgattaaagagaacaggttttattaataaagactgatctcaaaatgctgggattgataaaagaattaaagtttcaacatatcaattttaagaagcaaagtgtttcaacaactgagaggtaagaaaatcttgttatttgcatgtatttttatataatcaatcaggttgcagattctaaaattgctcatatccagcatgatggtgcttgagaccaataaaataagccagcaacactagaataagtactcctgccaaggcagctcccaccgctatgggcacaaggaagttgtcgtcatctgcactgcagtcttgagctgtagaatactttccttgtgtcacattgaaaggctgaacccttagatcaaaggtatttatctgaaatgctccagacactgaaacagtctgctctttgttgcacatataagaacttcccaggggggcatcccagtagctgagattgttatttgcaatgctgaaaacggagccattaaccaaatacatgctgatgttcacttccttcagataaaatcggttttcatttttcacagcaaagacaaagtctagatacttaatggtgctgctattgagtctaagtagagcagtgtgagaacggcagctgcctgtggagtgagttgtattggggttgatgttaataactgaagcaaccttatcctgagtgatgttcagctgcagccccatggtagccagcagacaagtatcattgccattattaactgaataggttccagcttctggtttttcctttggagtaggtgttgtagtaggagatggcacagtggtgtgtatggtgggtgccactgttgaagttttgtctttatcacacaggaactcatttgtgctcactgtgccattttggacaaaagcttgtacaagaacatcccagtagtgttggacaacatcattcttttccaaagttgataaactattgcatctaaaaaggtcattcaatggaattctgatggccaaaagttcatcaacagtaagaattcctttatcttcagcatcaggaaatgttgtgttatcaccagtgttgtaggaaaatgagacgctgtcaattgaataagtagatgctgccttggtaaaattcgcaatccaggaaaagccaggtccgaactgcactgctattttgggaccattctgatcatccccacaaatgcttccattatatgtcacagtgccatggtctgaaatggttacagttttataagttttatttgtagtttcatagcgtactgtgaaattcatctgccattttgcataaaggcaagtggcattttctgaatctgtcaaattaagttccaatgcataagaccgcacagctcccaggactaggcagaccagaacgagccctgagcccggaaccgggaagaggcggaagcacaccatgaccccgcagagcaggcggcgacggcggcgacggcggcggtacaacaacagctgcaacaccagggaaaaggctcgctggacctgggtcaagagcactgatgaccaccgaccacagccttgcaaaagccaggaatcggcgcttcagtgcgagtcataag

SEQ ID NO: 55517 - DNA, 389 bp, Homo sapiens
gtttcttcacagttacagattttcatgaaattttacttttaataaaagagaagtaaaagtataaagtattcacttttatgttcacagtcttttcctttaggctcatgatggagtatcagaggcatgagtgtgtttaacctaagagccttaatggcttgaatcagaagcactttagtcctgtatctgttcagtgtcagcctttcatacatcattttaaatcccatttgactttaagtaagtcacttaatctctctgcatgtcaatttcttcagctataaaatgatggtatttcaataaataaatacattaattaaatgatattatactgactaattgggctgttttaaggctcaataagaaaatttctgtgaaaggtctctagaaaatgt

SEQ ID NO: 55518 - DNA, 6273 bp, Homo sapiens
tccaatttacactaaataatttattttcccaaaatgtgtatgtgttctgaggcgtgacacatgatacagttccattggtcattctctatcaatcataatatgacaggacacaagaggctaaaaatggctcatcataatttattttatgttaaaatgtacagcttttttttgtttgttttttgtttttttgaagtgactgactaaaaagagaacagataaatacaagagtgtcgctggatcctattttatacaaggattacgcctctcctgcttggcccttactgtcaccctgtacaggtacaaaggctacaaaaaaggaagcaatataaacagacacaaataacttttttgcttttttacatgcgatttgtaagcttagtttgagctattcacaagctacttttctatttttccttaaaaaataactccaatattttataaagatagaaaaatctacagatggaatgaaaatgtaaagttagaggcatttccataaaatagcaactttacaccaaattcactatttttttttaaatcctgccaagtatttggacatatatgaaatgtttcaaaacctgacagataaacactgagatatgcttcattcaataaacagaagtctgcatttataaaacagaaagctgccttttttccccaaagaaatctgtcaccaaaatggaaaagggtctcaactttacaccaaacatttagcaataaaacccttttgactaaccaaatgggaatagcttttatagctctttacagttttataattaacaaaaatatagttttttttaaaaccctcaaattagggcaccctaatcaaggcaaaaaacttaagaaatggcttactgttagcacaacacttgtacagtactacaaaatgcactgtcactaacaaagacattagcggcatgctgaagtgtcaccttaaacaaaatatacaataactgaaatgctaaaggcatttacatggagtggacagggaagggaaaaaaaaagctctaggttcaatattaaaacagataatttgggggggcttgatatccacattgtttaacagaagcaggcacaacaagtggctgcctccaaattgtagtccaaagagaggccttcctttgcagagaattttatataaaagtaacagaaatgaaggtaccaaaaaaaagaaaaaggaaaaaaagaaaaacaacttgtataaggctttctgctgcatacagctttttttttttttaaataaatggtgccaacaaatgtttttgcattcacaccaattgctggttttgaaatcgtactcttcaaaggtatttgtgcagatcaatccaatagtgatgccccgtaggttttgtggactgcccacgttgtctaccttctcatgtaggagccattgagagactgtttggacatgcctgtgttcatgtagccgtgatgtccgggggccgtgtacatcatgttaccgtggggtggggtctgcattggctgctgggcatatggctgggtgcccatcatgcccatctgcatctgcatagggtattggggcgtttgattcatatagccatgattgctgtggtagccactgttcatcattggctgggacatgctgtacccattcatggcgttgagagtgttcatgttcatgttcacagagttgacattgtaggctggcgctggcatcaggttcacactcatgttcatgcctctttgcatcgttaaagtccgtgcaggaccctgcatggctacagtctgggagcgcccatagatttgtgactgatgggtggcagcggctggtgacagagacgctgacttggttctcatggagatgtggcccttgctggcaatctgggtttgcagtctttggctgtgagagatgccaatatttgatgcagccatgttccgttgcaaaagaggcggcggcagattcattggaggaggagtcaggttggggggtggggtcatggtagcttgtgcttggggtcccccagggacggagtgtggagactgagaaagttgaacaagccctgtgttacttaatggtgtggacaaagaggcactgtttgcataggaagtcacagcagcggaatggctgtaaggcaatgaatgatcaataagtgtattagttaactgctgcagtttggcaaggctgaaggtggctgacggctgcgggtaatgcccagccccaaaatcactctgacccattcgctcgtataagccaatgttggcgttgctcgtctcggggatttcagccagctgcatgggtggggtgaagttagcagccatgctgcactgagccagctgctggctgctgctcggaggcctctccaccacacagccttgaggagacttgacgctgcaggtcggaggggagctgatgctggtttgctgcagcatgctgcagctcccgctgatgttggacatctgctgggtgacagcacagctgctctgtgtcagactgctggaggtgaggttgctataggagcagctgttctgtgaagagccgtttccacagatgctgcctcccatagtagaatcgtagctgcttgggttttcgtagttctcagttgtgctctcgatactgcccaggtcactaaatccactgtctacgacttgctgtgaatgatctgaaactgatgggacatccatcatgggactggtttccatgttctgcagagatggcactgagatggcactttgatctgggctgatttgggcgtagctgttttccagagcagggacacttgggctgttgacagaacgtacggactggccaggatgggagtggacggatgaaactgggctactgtggtccgactgttggcaatcgtcgagcgtggtggcaatctgtggactttggtctgcacgggtgtagttctgtaggcttctacaggcctcttgagtctcggcacaatcctgaaaggtgtcgtcctgttcgctgctctcctgggtcaaagactgaacggcctggacagtctcagagtcgatttccatggttgctgggtttccctctttgaactctgtatcgacttccttgctgttcttttggtcctgcttctgtgcctgttctcctgggggtggctcctcgtcagattcgggtacagcttcagggtccccagcaagctccttgggctcactgttacaagaagctgtcaggtcgacgccacagtccattaagacctctgggttcgagtgaccaggctgcacattaaggtctaaaaaagtctcctggttttccagtacttctttgaagctttctctgggcagctcttccttctccacttcggcagactccatgtggctgtcatcctcgtcatcggcatcatggtcctcgttgtgggatggctcttcatcctcttcctcctcctcttcgtgatcatccaaacgtgcagagtcttctttttccgtggagatttctggttcctctttttcttggcttttagcaccatctggatctttttctacatttcctcctccttcttcttcttccccttcctcttcttcctcttcttcctcttcctcctcctcctcctcttcctcttcctcaggtttgatgagatcatcttctggtttttcacctggtgatgtgtttggacttacaggggcacatgtttcttcccttctgttttcctcttgaggcaacagggcttccccagtttccttgacctcctcctcaatcctgatgggactggggctggtttttccttctgaagtctccttctgttcttccactgttacctgctcgtcaggctccatgggtgtttctggcggggtgtacaaattcagtttaaatccggtcttcctctctttgttttgcctccacttagatagaccgcgctttgttccttttggccacacttgtttgcactttagaggttcgggattgtctttactgccttctttcaagttacttgaatcatcattcatattgtttctacaagggtcagcattcttgaagcaatgattgtcttttccttcctcttcctctgtttgtcttttcttcccaggctgatgctggaatgcttttctcaggactggcttcctgccatcttcctccacttcaatctcacaggtaggctccagctgtggcattggcctctcttcatctgagttgtcaaagggctcattcagtacttctgtcgtctctgaaatggtctctgttgttacactgctgttgatcctcctgcgtttacgaccccttttcttctttagtacaaaaggcctctttctctttatggcaactgactgtggtttcgtcaatcttgggggagagctttgaatattttcttcttcttcttcttcttcttcctcttcttcctcctcttcatcctcttcctcttcttcctcctcttcttcctcctcctcgtcctcctcctcctcttcttcttcactgctctctttagacagctccagcagctgccctcgctcccctgtgactggccggctctccggggaatgcaaatatttatttttcgattgtacttttgcaggtgattgcctactgttagctctagttgacaggatttcttgttcctccttctcccagcagctagcttgttccattagccgctcagcctctttctcagcttctcgctcttcttcagacactgcagcattagaaattaaaattggggtccacctcagactgtctggatcaagttcattggctctggaacaggttttcagcttttccatgtggctcaatatcaacttttcccgtctaatgatgacaaatctgccatctctcttgtcgatcatgtggaggtgctgcagagtggtggcaatgtcatgtgggcacatgcccgtcgctctgctaattgccttgatgctgatgtgcctctcatggtggtggtagagatactccaagatgacgctcttccaatatgccaggtaggagagacggcccagatcggagagaggcttttcaggagaccctgcttggccttctcttctagaaagcaaatagctgaaatcaatgagaaaccgtccaaatccttgcctttggtgctggggcatgatcattatgcaggagacattatacttctgctggcaaagcttttccttagagaggtatccaaccagatgacagcccttttcatcattttttgtaaggacataaaaaaggaatggctcgacatcataatacaacgttttgtggtccaggaagagcttggctaacaagcaaaggttttggcaataaattttgctcatattcccatcaacctcaaatactgaaaggtctttccttcggtaaatttcatttgctggaggatgaaaccatccacacttcttggagtgtcttagcaaaatatttttacttttcatatatttaagacagaattcacacaggtaaagctttggtaatcttgcatattcctgtgggtaaggcgaggagtaccaggtttggatttcatatttaccaaattcaatcacagaagggtaccggccacagtcttccaccccactctcacactctattttctcccaagaaagttcctgggcctgcttaaaaacatccaaatcctcttcagtaacgacatccttgtttccaatcacatttacatctgcactttcttgtttgatgtttatttttatttcagtatcaggtgacccccttcctgtgaatgcattcatggatccttcatcactggttacagacaacaatcgttgctttaatttatttttcggtcgtccaatgggttttgcatatcgtcgttttatttgtgcagctttctcatgaagtagttttcttccctttttctttggtctgcagacttggcaaatccacatcccttttggcattctggaaagtggtgggtcacagcattccatatgaaatcctctatcacaggaatcacaaaaaagcatattatcagcatttctgccttggactctacaggcactgcatgtcttgcattcgatgcactgccaccttaaggcctttacatttgttgttaattcaggacaaaatttcaaacaggatgggtgtccactactgccacaatctgcacaagagaggagttcttctggtttcttttcacgatttgattctttagtccccaaacagaagctacatattggaatgggatcagcacggggctggtctttctcatggggtagaaggctgacaggtgggagcgaggatgggaatgcactgggatactgaggtgcccctttgccatctaagctcccataattgaccctgtactgcggtccgtctttcagtaacctcccattattcacagcgcgtttggcccccagtcgcagccgctgctgaaaggc

SEQ ID NO: 55519 - DNA, 369 bp, Homo sapiens
tttaagattaaattcatgtattgaaaatattgttcagaccccatgtgacataactggagccagtgcagtgccatgaagaactacgagattagcctggatattaacttgtcttctagagaatagatttcatgttccattcttctgcaatggttaattcacacagaaaaccaatgtttaacattcacagaggattttactgcttaacagccatcttgccccaaatatgcatttgttctcagttctcagtgccatctagttatcacttcactgaggatcctggggctttcccagtagccactaatggggaacgatttccttggcaggagctaaggctccccagtgtggcattcctctccattatgacctctt

SEQ ID NO: 55520 - DNA, 346 bp, Homo sapiens
gattgtcacctataggtttgcgtctaggggctggatcccttgcttttcagacccctgaaggttgccccatcacagaaaggaggagcggagagtaggcagagtgcagggaggaagcctagaggattaattggttaaactttattacaaaggctggtcctattgtttacgggccattaaaaaccattatcatcttcccaggccaggcagacagcagtcagctgctttgatgcatgtcttagagagataaggaaaatttatcccttgttttgacttcacaatttcttcttggtttattatctgacatgctattcaactttctctccacatgtccctgatctcaagacaa

SEQ ID NO: 55521 - DNA, 246 bp, Homo sapiens
ttttttttttcttatctttatcatttaatcattacccctcgggtacacaggacacacaaatttcatttttcagatttcactttaagaaaattaataaatacagcaaacattaacaacactgtgatgggacgatcatcagaactgtggtaactaatcagcaatagctctcaacctttgcacagaaagttaggaaatttgactcgttaatcaatatgccatatgcctatctttaaaatacaaaaaaac

SEQ ID NO: 55522 - DNA, 3182 bp, Homo sapiens
  misc_feature (1)...(3182): n = a,t,c or g
gctgggtttagtaggagacctggggcaaggccccctgtggacgaccatctgccagcttctctcgttccgtcgattgggaggagcggtggcgacctcggccttcagtgtttccgacggagtgaatggcggcggcggctgggatgctgctgctgggcttgctgcaggcgggtgggtcggtgctgggccaggcgatggagaaggtgacaggcggcaacctcttgtccatgctgctgatcgcctgcgccttcaccctcagcctggtctacctgatccgtctggccgccggccacctggtccagctgcccgcaggggtgaaaagtcctccatacattttctccccaattccattccttgggcatgccatagcatttgggaaaagtccaattgaatttctagaaaatgcatatgagaagtatggacctgtatttagttttaccatggtaggcaagacatttacttaccttctggggagtgatgctgctgcactgctttttaatagtaaaaatgaagacctgaatgcagaagatgtctacagtcgcctgacaacacctgtgtttgggaagggagttgcatacgatgtgcctaatccagttttcttggagcagaagaaaatgttaaaaagtggccttaacatagcccactttaaacagcatgtttctataattgaaaaagaaacaaaggaatactttgagagttggggagaaagtggagaaaaaaatgtgtttgaagctctttctgagctcataattttaacagctagccattgtttgcatggaaaggaaatcagaagtcaactcaatgaaaaggtagcacagctgtatgcagatttggatggaggtttcagccatgcagcctggctcttaccaggttggctgcctttgcctagtttcagacgcagggacagagctcatcgggaaatcaaggatattttctataaggcaatccagaaacgcagacagtctcaagaaaaaattgatgacattctccaaactttactagatgctacatacaaggatgggcgtcctttgactgatgatgaagtagcagggatgcttattggattactcttggcagggcagcatacatcctcaactactagtgcttggatgggcttctttttggccagagacaaaacacttcaaaaaaaatgttatttagaacagaaaacagtctgtggagagaatctgcctcctttaacttatgaccagctcaaggatctaaatttacttgatcgctgtataaaagaaacattaagacttagacctcctataatgatcatgatgagaatggccagaactcctcagactgtggcagggtataccattcctccaggacatcaggtgtgtgtttctcccactgtcaatcaaagacttaaagactcatgggtagaacgcctggactttaatcctgatcgctacttacaggataacccagcatcaggggaaaagtttgcctatgtgccatttggagctgggcgtcatcgttgtattggggaaaattttgcctatgttcaaattaagacaatttggtccactatgcttcgtttatatgaatttgatctcattgatggatactttcccactgtgaattatacaactatgattcacacccctgaaaacccagttatccgttacaaacgaagatcaaaatgaaaaaggttgcaaggaacgaatatatgtgattatcactgtaagccacaaaggcattcgaagagaatgaagtgtacaaaacaactcttgtagtttactgtttttttaagtgtgtaattctaaaagccagtttatgatttaggattttgttaactgaatggttctatcaaatataatagcatttgaaacattttctaatagttatgatacttatacatgtgctttcaggaagttccttggtgaaacaattgttgaggggggatctaggtaattggcagattctaaataatataatttccagatagtaattttaagagtactcatcgctcttgccaaataagttcagggtattcaaatcttggactagtcctgcaaggtataaagaataaaaatcccagtgagatacttggaaaccacagtttattattatttatctgggcaattattgtgtgtgtgaggatggaagggtagggaataatcgaacatctaaagccttgaataagagaatactaattgttttggtatgatgatactcagaaatggagatattataggaaaaagaaatcctttggaattttaactaaaatcactgcatatgggaaattaagagatccaggaccatatttgataagagttcctaaaaataatgtaattattaatgctaaagactgctcatgtatcttgatctaattactaaataattacatatttatttacctgataaatatgtatctagttctacaaggtcacatttatgtggaagtccaaagtcaagtccttaggggataattttgttttggctcagttgttcccnnnnnnnnnnnnnnnnnnnnnnnnnnnnnnnnnnnnnnnnnnnnnnnnnnnnnnnnnnnnnnnnnnnnnnnnnnnnnnnnnnnnnnnnnnnnnnnnnnnnnnnnnnnnnnnnnnnnnnnnnnnnnnnnnnnnnnnnnnnnnnnnnnnnnnnnnnnnnnnnnnnnnnnnnnnnnnnnnnnnnnnnnnnnnnnnnnnnnnnnnnnnnnnnnnnnnnnnnnnnnnnnnnnnnnnnnnnnnnnnnnnnnnngtgnnnnnnnnnnnnnnnnnnnnnnnnnnnnnnnnnnnnnnnnnnnnnnnnnnnnnnnnnnnnnnnnnnnngcttcctctctagaatccaattagggatgtttgttactactcatattgattaaaacagttaacaaacttttttctttttaaaatgtgagatcagtgaactctggttttaagataatctgaaacaaggtccttgggagtaataaaattggtcacattctgtaaagcacattctgtttaggaatcaacttatctcaaattgtaactcggggcctaactatatgagatggctgaaaaaataccacatcgtctgttttcactaggtgatgccaaaatattttgctttatgtatattacagttctttttaaaacactggaagactcatgttaaactctaattgtgaaggcagaatctctgctaatttttcagattaaaattctctttgaaaaaatacaaaaaaaaaa

SEQ ID NO: 55523 - DNA, 333 bp, Homo sapiens
attgaactcagagaagccgggggtgctggaaatgtaaacaagaatagactgttcattcctgatggcttttagtctatactaacatattgtttgtcatggcatccgagactgaaaagacccatgctttactgcagacttgtagcactgaatctcttatttccagccttggtctgggggcattttgcctcgtagctgacagacttcttcagttttccacaattcagcaaaatgactggcttcgtgctctctcagataatgcagtacattgtgtaattggcatgtggtcatgggcggtagtcactggaatcaagaagaagactgactttggagaaa

SEQ ID NO: 55524 - DNA, 314 bp, Homo sapiens
gacatgacatacaaaaggagttttaacatttctattttcttgacctttgcattttatcttggtatggttttctaatatatatccctgtgttgatggatttttaggcctttaggtacctaggagaaacagatttgatctattttaatttgttaaaaaagtactgactgcagttgaaaaacctgatttttttttctgtttttctactacctagccccaagatctttgataagtctcttaacccctccaagccacaatttcccccatcttctaaaaggggataatactttatatgaaataatatgaaatatataaac

SEQ ID NO: 55525 - DNA, 1851 bp, Homo sapiens
tttcctttaacacttagtcccttgcaaggggtctgactatacctaacaaaaataaagacctactaaatccctgccatctggctggaaggtgtagcagtgtattaatgtaactaatagcaacaggtgtgcagcagataagacaggagaagacactcagctatggttgagttgtgaaagctaattagatccagcatttcttatgttgattcagattgaatgaggtagtgaaaagggacctgtgcttttgtaaattctagaaaggcaagaggacaatattgaataaagctgtgtttaaacttcattgctcatatatcttttagtaactggtaaaccggcgaagctgataagccaataagagtgctgtctagaacgcatttgcaaaccgttaagagtagcttctttttgaggcctggacttctgattcatctatagaagtctattatgattccatcaattgcatagcttgtgtacctggtagaaattgtgtcttggaatgaccctttcgagttattgacatggctctgatgaatagaacatgagccccaaaactaaatccaaaaggaattttctatctttcatcccccacatgtgggcaagacaagttggccctttcttacccagaggtcttttgtgtgactgcatctttctcctccgttctccattgtgtgctttccattttgtctttagtgcctatactgttaggtgttttcttcactggcattcacaaatttaagccattgctgcctcattagccttgtattttgtgtgcatatcatgtatccagacctgtatgttcgctttaagcattcttatatcacactgtctcctcatctaccatatggtaaatgttaaaactccacatttgtctgcatcaggggaaaatgcatgggcacacatcctccctccctccctctctgctctcctcccttccttcaggcctcttaggcattgtttgttttcccatttctgatactactactccatgctgaagatttgccatattactattttgggaaacattgagtgataggaactcctaggaaaatttgcaaaggaaatgttacatactgtatatcaaactctcaggattctagtgttgaaaaagtagcctatactttgctattacttatacctgctgccataggaaaaaaataagtttatttcatggacacatttacatttgatcataaataaaagaaaaaagggcacctttttggggagttagtcatgggtagttcattaggtggatatttctgaacagttcttaatttaaaatacttcaaaggaagtaaaggtcatggccttagctgaaggaaatgctccagaaattggactgtgtaaaccatcagtacaataatacgctgtgtatgtatgtgtatataaaatgagaattatggcataattggagcatttgcattaatcaacaaactcacattgagacaaaacttagttttacagctgtcttgattaaagccaagtgttccatgttgctgtgaagaatagcctctttcaaatactttggaaagtagttacttggaaacttgtaaaggtattacatttttatatttaaacacctatagagatcttcaattccttgagtctgagcttgtgggtggaattctaaatttgtatcataatctgtcttttgtgaaacattttgaaaatatgtatatataatattgtatatgcaaattgtgttgtttcacttgtaaagggaaaaggcttatttttctttatatttctgataacttgttttgcatatgaccagcactgactgaaaggcatgtgtagctgcaaacactgttgctttttttgtgaaatgaaaataaaagtatttaaatacaaaaaaaa

SEQ ID NO: 55526 - DNA, 3596 bp, Homo sapiens
cagcgccccatcgaagctaaagggctgacagaagggctgtagcggcaagtgtgcgccaacacagctgcacacgcccagacacctgaggcgctgagaggaacttccccgcgatccgccccggctgcacagagcctcttctccccgccggggccccgcccagcctcacttcttttaaaagcagcagccagcagcgcgccggtggcgtgcggctcgaaaggccgggaggacgtcatcgacgcgctgtcgagcctccagcccgcccgggtttccttcgcagtcgcgcaccgacgctcaaacgcgcgctccaacccgcagcctcctcctgcctcaccgcccgaagatggcggctctcaaactcctctcctccgggcttcggctctgcgcctctgcccgcggatctggggcaacctggtacaagggatgtgtttgttccttttccaccagtgctcatcgccataccaagttttatacagatccagtagaagctgtaaaagacatccctgatggtgccacggttttggttggtggttttgggctatgtggaattccagagaatcttatagatgctttactgaaaactggagtaaaaggactaactgcagtcagcaacaatgcaggggttgacaattttggtttggggcttttgcttcggtccaagcagataaaacgcatggtctcttcatatgtgggagaaaatgcagaatttgaacgacagtacttatctggtgaattagaagtggagctgacaccacagggcacacttgcagagaggatccgtgcaggcggggctggagttcctgcattttacaccccaacagggtatgggaccctggtacaagaaggaggatcgcccatcaaatacaacaaagatggcagtgttgccattgccagtaagccaagagaggtgagggagttcaatggtcagcactttattttggaggaagcaattacaggggattttgctttggtgaaagcctggaaggcggaccgagcaggaaacgtgattttcaggaaaagtgcaaggaatttcaacttgccaatgtgcaaagctgcagaaaccacagtggtagaggttgaagaaattgtggatattggagcatttgctccagaagacatccatattcctcagattttatgtacatcgcctttataaagggagaaaaatatgagaaaagaattgagcgttttatcaatccggaaagagggagatggggaagccaaatctgctaaacctggagatgacgtaagggaacgaatcatcaagagggccgctcttgagtttgaggatggcatgtatgctaatttgggcataggaatccctctcctggccagcaattttatcagcccaaatataactgttcatcttcaaagtgaaaatggagttctgggtttgggtccatatccacgacaacatgaagctgatgcagatctcatcaatgcaggcaaggaaacagttactattcttccaggagcctcttttttctccagcgatgaatcatttgcaatgattagaggtggacacgtcgatctgacaatgctaggagcgatgcaggtttccaaatatggtgacctggctaactggatgatacctgggaagatggtgaaaggaatgggaggtgctatggatttagtgtccagtgcgaaaaccaaagtggtggtcaccatggagcattctgcaaagggaaatgcacataaaatcatggagaaatgtacattaccattgactggaaagcaatgtgtcaaccgcattattactgaaaaggctgtgtttgatgtggacaagaagaaagggttgactctgattgagctctgggaaggcctgacagtggatgacgtacagaagagtactgggtgtgattttgcagtttcaccaaaactcatgccaatgcagcagatcgcaaattgaaatatggatatttgtaccaggctgcgtgtttttcattttaaacacacaagatttaattgaaaggacatcaataatcataattgtgtatttaacaggtggttttttattagttttcttgtgtttcagactttatgcagccatataaactgttctctaggcatgctgtgacattttaataaaaagcaaaaggagcatttataattatctcatttgttaaggctgagaaggttgtttttataataggtaattatattgaatgcattttcactgaatatggtatgtatgctaaattatatgaacctttccccaagaagggccctagaaattgatgtggctttcctcttaaatattaattattagtcctgaaagaaagataacatatgtgatttttgtggttaggagagttgctgtcatgattgttttttcttcagcctcctctgacttttcttttggggcttcagattttatgattacatcttgtccccctagaacatcccccttcctcccatactgcttttaaacagatgcccaagaaggcaagcaggaatgcctcttgtgggggagggcagggagaaataactagttcaaaccaactatctatctatgctttgcaaagactaaggcgtattataggaagagggctagaaacctaactgattcttctcagttttctcatttttaaaacagcccagtattcctttgtatcctcaagggtccttgagaatacttctgttattgagaccctgtgggctacttgtactgtacctcctctcaagccaagaagggctgtgggataatttaccatgaatccttagtagcaatgacagcagagttaaaaaataaaaggtgttttactttcaggctcttgttttggttcagaggagattttaaatattgaatgacacttctacagaacaacggtttttcttctgccaaggctacttcctttaacgaagtgccctttaattcagccttatccaactaggggaaaataatgttgggacaagtctaggatttgaagagtcagtgaacttttagtgtcagggaataaacatggtggggtagattaggtttgaaaaaaacttccttagaggtatttattctcaatacctgacaggggcccatggggaatgacttcagaagcatcccggataatagatgggtaaaaagtctaggcaccctgaagaacaggtgagacagctggcctctggacagaggtaggcatagtacagtacgatatatcattcctctggtcctaaatatacaaacttattcatgtttttaggtgatgatggtcattgaaactcacttcttttcaggtgtagctacaattgtgtaatgtacaatattagagaaaggacaggctttttatgagtaacacacaccatatataaaacagcctttctggctgaccacatggttaaatgcataccttccccagtactggggggaaaaaatgacccttcttagaatgtgcaagttccatgagagtaatatattgatatgattttgaaaagaattgttgatagttacatcttcaaacttatcattccagtatgcatctttaagataatgtgattctaagtagatgactttatattcttgattaaagagtgctatacatgttaagaaatgcattaaggaatacaataaatattctaaagtgatgtaaaaaaaaaaaaaagtcgac

SEQ ID NO: 55527 - DNA, 318 bp, Homo sapiens
cggacgcgtgggacgggagattctccagtgaggggtctccctgggcctcatggtctgtctcttctagcctgctgctcatgctgcacgggcctcccctccatcctgcaccagctgtgcttttgcctggtcatcctgagcccctcctggcctcagggccattccatagtgcccccctgcctcaccacctcctccccgctctcccaggctcttcttgtagaggctctccatccacctccccagtcctgttcccccagcctgggtgcccctaacttgactcttcccatctccccagcataaccaaatctttttttttttttt

SEQ ID NO: 55528 - DNA, 587 bp, Homo sapiens
ttttttttttttttggtcttcacttttattgaaatacaaaatgttaaatatgcaagctgtactaatgaaggtgctccttgaagttgattaaggagggctgggctgcttgtggcttcctgcaggggagagaaaaaacagaaggtcaagatggttaccccttgctgccttcatcccatccctcatcatgattcttcttgcatcctcttccatgtgctcttgccacttcccttgacttccatctgtgacatcttagtctattcaccaaaatgtgatctttgtaaaacctaatttaaagcatattacttcttttttctaaagcactagaaaggcttcctgtctcactcagataataatttttaaaggtttaccatgtgataaccatagaaccacgcgatctggcttctcactgcttctcctaatttgtctctgccattttctccactcacgttctcttttggtcacactgtctcattgcagttctttaaacatgtttagtggcattgctatcccaggggcatttgcactggctgtattctgtgctggaacacttttcctgcataagaaccacattattcactccccaactc

SEQ ID NO: 55529 - DNA, 1338 bp, Homo sapiens
ggacagaggctgttccctatggcagaaggcaaccacagaaaaaagccacttaaggtgttggaatccctgggcaaagatttcctcactggtgttttggataacttggtggaacaaaatgtactgaactggaaggaagaggaaaaaaagaaatattacgatgctaaaactgaagacaaagttcgggtcatggcagactctatgcaagagaagcaacgtatggcaggacaaatgcttcttcaaaccttttttaacatagaccaaatatcccccaataaaaaaggtgataaattgggtcacagaggcagaaatcacaatttatgttctgcaatatcctgcagctcatccgaatatggaggctggaccacctgagtcaggagaatctacagatgccctcaagctttgtcctcatgaagaattcctgagactatgtaaagaaagagctgaagagatctatccaataaaggagagaaacaaccgcacacgcctgggctctcatcatatgcaatacagagtttgaccatctgcctccgaggaatggagctgactttgacatcacagggatgaaggagctacttgaggggtctggactatagtgtagatgtagaagagaatctgacagccagggatatggagtcagcgctgagggcatttgctaccagaccagagcacaagtcctctgacagcacattcttggtactcatgtctcatggcatcctggagggaatctgcggaactgtgcatgatgagaaaaaaccagatgtgctgctttatgacaccatcttccagatattcaacaaccgcaactgcctcagtctgaaggacaaacccaaggtcatcattgtccaggcctgcagaggtgcaaaccgtggggaactgtgggtcagagactctccagcatccttggaagtggcctcttcacagtcatctgagaacctggaggaagatgctgtttacaagacccacgtggagaaggacttcattgctttctgctcttcaacgccacacaacgtgtcctggagagacagcacaatggggctctatcttcatcacacaactcatcacatgcttccagaaatattcttggtgctgccacctagaggaagtatttcggaaggtacagcaatcatttgaaactccaagggccaaagctcaaatgcccaccatagaacgactgtccatgacaagatatttctacctctttcctggcaattgaaaatggaagccacaagcagcccagccctccttaatcaacttcaaggagcaccttcattagtacagcttgcatatttaacattttgtatttcaataaaagtgaagacaaacgaaaaaaaaaaaaaa

SEQ ID NO: 55530 - DNA, 487 bp, Homo sapiens
  misc_feature (1)...(487): n = a,t,c or g
aaggcatgttatttttagggaacttagggtgattgaaaagttgtttacttacagaagaacattctcagttttcaaaattttctgtcagtttcagatcttcaaagacctttaatggcaggtttaatagtaacttccagaggagaaacttttacacgtcggatatgttgcggtcactatctaacacaaaacctacagtcaatgaacatgacttgttgaaattaaagaagtttacagaagattttggtcaagaaggctaagccaaagacaaggaagatgcttaccatatgtattctttctttcatagatatttttgtctatttggatcgcattaattgtttccagtaaaactcttttaccacagggaaatacacatctcacttcagagttccattaggttttatattgtacttttcctccattncttattaaatactcctattaacaaaaggtacaaaataacaggttatgaggaaatgagcgatatatg

SEQ ID NO: 55531 - DNA, 207 bp, Homo sapiens
tgcctaggttgtcttttttcatgcagcataattccctgagatctgagtttttatgtgtatcaatagttcattccttttatttattccatggtatgaatataccacagtttggccagttacctgtagaaggacatctggactaattccagtttctggctattacaaataaagctgctatgaacattcacgtaccaaaaaaaaaaaaaa

SEQ ID NO: 55532 - DNA, 371 bp, Homo sapiens
attcacctattttagttcagttctaagagtttcctctgtgacttttcctttggcccatggtttatttaaaattgtgttcttttacttccaaattatttgggatttttctagatatctttctgttcttgatttctggcttacctctatcagggtcagagaacaaacttaatatgatttcaattattttaaatttgccaatgtttattttatggcccagaatatggtctatgttggtgaaagttcaatttgaacttgaaaagaatatgttttatgctgttgtctactgaaaagtctatatataaaaaatagattaataaactgattaatagcctggttcaccactttcgtagccttactgatttctgttagtc

SEQ ID NO: 55533 - DNA, 408 bp, Homo sapiens
ctttgatccattgcagcacagaatcttggcttccacgatcctctttttataatgctctcatcatttgtatatgtatttaaatatctgagtctatccacatctctccatttctactaccactgtccaagttcagtatcacatcttcacatcctggaagactgttctggcacccgaactgagcacttgtatctgttctgacttctcccagccactctccacactaaagctagagtaaacctttaaaagcacaaatgtgtcatgttgcctcctgcttagcagtctccactggtatctctttgctcttgggctaagacaaaatcctttagtggggattataagctcctaacactctagctccctttgcttcagtcacactggcagttttggagtttctcgaactccccatat

SEQ ID NO: 55534 - DNA, 171 bp, Homo sapiens
ggttcaaggttatttttatcattgatgaggaaagtgatgctcagaaaagaagagtaaattgcctaaagttgaaatttacatccaggtctgactgattgtaggctattttgtacatcattaataacatacaaggtttctttattgtgtctgaccctggcataaaagttttag

SEQ ID NO: 55535 - DNA, 416 bp, Homo sapiens
gggacaaagtgtaaccagataataagatgaagtaaattgacctctatgcaatttgggattactgttcctgcaaagtcagtgggaaaagccaagtgttttctggctttttcctttgcctgttaggagagagggctgagaatccaacagaggttcagcatccggcctgcccagggtatataccccctcaccagttcatgttgctgcttctgtgatgtggttacttagccatgagaagtagcggtcatgtcatccagggtgggttttcaatactggtagcttctgaatagctcagctttccatggtactgttttctggcattgttggtattttgcaaaggagtttctaaagaagccctagaaaaaatcctctagtaaagacttttctttggatagggtttgaatgaagcagggctaata

SEQ ID NO: 55536 - DNA, 89 bp, Homo sapiens
accccctccacgaaagaaaagaatctcttcactttagtatcttagttgggaaatgaccttaatttgtcagcattaaaagaacttcttgg

SEQ ID NO: 55537 - DNA, 511 bp, Homo sapiens
gtacactttgttgatcagtggcctgaattcattaaaattcacactacatgcctcaaaaagaatattggatcccagcctaggttgttgagtatattcctgtcctttattaaaatgtagtttgatagaaaggtggtagggatatttaaatctatcatgctaatttactttctttgtatcacagcaaggatagggaattaggaaaagattactcactcaatagagaaaaggtagatagaaaatccagtattatcttgacaaagcagtgaatgttttagtatgattgaggataggtaatctagtgctaaagttggtcacagaatttcctgcacaaaatgaaagatctgtgtatgggaatgctagagaatttgacttctcagaaatatatagaccaacagtggttgccttttttcattttcacttctcttcattcttagatctacggaatccagaggcagcattgtctccaaccttccgtagtgacagcccagtgcctactgcacccacctctggt

SEQ ID NO: 55538 - DNA, 266 bp, Homo sapiens
gggcacggctggagacggaggtcctgcagctgcagctgaggcccccactcttcctgcactgggcagagagccgtgatggggcctcagcaggagtgcatggaggaggacgcctactgtctggacctggaccggaggcttggcaagatgcaggacaactggaagccgtgagtcagacccgcgactggctcaagaaagattgcacaagacctgttctagaaattggagaagttccaccgggagatcctcttccacgaggaaatggctca

SEQ ID NO: 55539 - DNA, 459 bp, Homo sapiens
gttggaagaagtacccagtccatttggagagttaaaactgtgcctaacagaggtgtcctctgacttttcttctgcaagctccatgttttcacatcttccctttgactgtgtcctgctgctgctgctgctactacttacaaggtcctcagaagtggaatacagagcggaggtcggtcagaatgcctatctgccctgcttctacaccccagccgccccagggaacctcgtgcccgtctgctggggcaaaggagcctgtcctgtgtttgaatgtggcaacgtggtgctcaggactgatgaaagggatgtgaattattggacatccagatactggctaaatggggatttcccgcaaaggagatgtgtccctgaccatagagaatgtgactctagcagacagtgggatctactgctgccggatccaaatcccaggcataatgaatgatgaaaaatttaacctga

SEQ ID NO: 55540 - DNA, 368 bp, Homo sapiens
actagatgcaactgcctagtaatatctccacttggatgtctagcaagtatcttaaactcgacatgtccaaaactcacccctgatcttctctagccccctccactctatcctccttcccttcaaaataaacaacaacaacaaaaaaactactccacctagagccctcctggtgtcaatgcttgaagtcatctttgacttccttctttctctcatataccacattcaatgtgttggtaaattttgttggttccaccttcaaaacatgtccaggatctgtctacttctcatcaccgccactgctatcatcaccacaatccaccctactgtcatctctcagctactgtaggttagtggtcctcccacttttg

SEQ ID NO: 55541 - DNA, 364 bp, Homo sapiens
aaggcaacagcaccaaactgtagcagaaatcattgtattcttcacaactacacagttacagtgaaaaataaattcaactttaagaatgtccttgataaagcaataaaaaatattagttttaataaatatcaaccctttagtacatatatttttattactgtttatgatgaaacagaaatatgtataaagcacatttgtatactaagtatgatggttatctccaggaaaggcatttgtgtgactgagttgcaaactgaactagacagttttcttcatggaatactatttttacttgaaagactgaacaacaagctatgttattcaagcttagatagctgacaggcattttctcaaaagtaagcct

SEQ ID NO: 55542 - DNA, 144 bp, Homo sapiens
taagggtcctaggattatcagaatgataaatgagcactagcttccacttaaaagtgaccagctgcattatccactaatgagagttagcatgtcctttcaaagcagatgttgtcttctcttctagttattgaaatgtcctagacg

SEQ ID NO: 55543 - DNA, 340 bp, Homo sapiens
ggtaaatcagtcctgtttctgatctgtaagccagaagaagtggtacagtttcttttgggaattatttccactcagaattgcaaggagatacttgatatatcaccttggtttgagtctgcattcttagtggagggtatggagacgtcctggaaagagtccctgtgcgggggtttttgtttcttgtttttgttttgagatggagtcttgctctgtcaccaggctggagtgctgtggcacaatctcagctcactgtaacctccgcctcctgggttcaagtgattctcctgcctcatcctcctgagtacctgggactacaggtgtgcaccaccacacccagcta

SEQ ID NO: 55544 - DNA, 329 bp, Homo sapiens
tggttaaaattctgtgaggtttgcataaaaggaatagagtaggggcccaaaaaccagtaagatgagaaaatagtgtttcctcagttctaggatccaggggaaaaaaaaaagaaataaaagagaaaatactgtttcctgccacttaagaggaaggactcacatatcctaccttccatcagccttgaaggagacaagtgccctctctctcacacccggtggccttcccttcccctttcccagagcctccaagaaggcccctggcctggcctgatgcccaccatcagcagcaataggcaccaaaacctttctccttcctatccctccccacc

SEQ ID NO: 55545 - DNA, 411 bp, Homo sapiens
ggcattttttgcctatctagaaagacaatgttaaatgtgctatctatatattttttaacttgtgctacctactacgcgtttatatttgtggaatctgttttcttttggacaaaaccacaaatcaaaaacacctcatttcttaggcatttgaaatccctaattcagaataatctcccaaacagaaacacaactacctgcattctttttgacaaaagagctaagtagcattagaaaattattttaaacccaattctgttttttaacagaataaaattcttctggtcttcacattcttctttcataggtaacctattgaaagtaggggtttatttgggggaagcatttctttctggctcttatctcataataaatacagggggcttaactactagtttcctacctcaaagatat

SEQ ID NO: 55546 - DNA, 375 bp, Homo sapiens
gaaacttctgaacaccctcctaagtcactacaggatgccagcgcttcctattcttgggtagacagagccacctcagcatcctgatggatgatacaagaaattgttacttcctagtatggaagtgtcttaaggacacgtctccatgatattttggtgaacccacagtgctttatcctcaacaaactgttcctctgttcccagttaacgtaatattccctgcttccaagtaagcaagactgttcactaaagaaggaactttttagaaaactaatctcctttatcatccaattttagttctgcatgttccgaggtagccagtcaacagaaggaagcaaaagattcttaaagatccaccgactggcatgtcccaagcaa

SEQ ID NO: 55547 - DNA, 332 bp, Homo sapiens; identical to SEQ ID NO: 40138

SEQ ID NO: 55548 - DNA, 587 bp, Homo sapiens
caccatatggtaaagccaaaagcaggagcttatagattgcatgaaatgaaggcgtcttcagacttcttcataacccacgtgacatctgtttttaaaaacacgttaacattaaaaacttttttttaaaaagagttttatccccaaacttccaccatgcagtcccatttttggtctctagactctggtaagtataaccagtactaaaatgttaatgagaatgaaacaatactactagaaatacgagtgtcagtattaaatggaataataaatgctatgcaaacaagagatcactgcgggaggaaaaaagcagcagctctgagttacttaccagcacttccttttcccactggtattttctacacttccgagactccgtttctgtctgagcacggcaacacaatcattcctgtcagggtgttcacttgcttttattgtctgcatacatttaattgttgtaagaaacttggcacagtctggaaatccacatgaccaagcgagatcttcagctgtttgcccgttcttattacataaactgaaaacaggataaaaacggagtgaaatgaaacattgaacttaagtcttttttt

SEQ ID NO: 55549 - DNA, 355 bp, Homo sapiens
cggacgcgtgggttcagagtcataaagcctaacttaagaatcctggctcacttctttggtgatacactgtagccactagaaagagaaataaacccaatggcatgtgtttacaggaagaaagattaccttcagatacttgacattaacctcatcaaaagtgtgtgaattttaaaacaaattctaaaaaaactatagtgctaaattggtaactggtattttaactctcaatttagcattttccttgatactttatcattgaaaatttatgcatttatttactgattgtgttgtgaacatgagttttatggtattttgtgagggatgcattttttaaaagattaattttggaaacaga

SEQ ID NO: 55550 - DNA, 373 bp, Homo sapiens
ccccctttcaggaaaggtggcagatatgaagatagtgaattagtcatgatcgatgtcacctcctctgtctggtgccctttgatattaaattcaaatgatcttgcaggtactttctagggggctgaaaaggaagtaacagatacgccacccacttccagatccatgatccgctgctgcctaaggaagacagtcactgattgcccaccttactgtcaaggaacagggcaaccacatctcctggctggtgcaatgaagtcactgcacactctaaaagcagtgtgcacacgctccaagaaagccaatgccatagtcagtctttacttcaattagtagcattttacagggtgcaaataattgggatgtttcaaaaggg

SEQ ID NO: 55551 - DNA, 241 bp, Homo sapiens
  misc_feature (1)...(241): n = a,t,c or g
gagctattgaataccataaattaaccctcaagtctgttctaggtattcttgggcctgaggtcttctgaattaattgagtagcagtatttggctactcagttggttattaactgtgctttttgactgataagagaatacatttaaattttttaaatggtatttnnnnnnnnnnnnnnnnnnnnnnnnnnnnnnnnnnnnnnnnnnnnnnnnnnnnnntcaattatatagatcaacatgatca

SEQ ID NO: 55552 - DNA, 156 bp, Homo sapiens
tggttgaggctacgatgaggtgtgactctgctattgggttccagcttgggtgacagagtgagacgctgctccaaaacaaaacaaaagaataggacaatctcgtatttcctctatctagactcaacaattcttaatatttgctttatcctgctttct

SEQ ID NO: 55553 - DNA, 722 bp, Homo sapiens
cggccccatgctcctcgccccgctgccgagatggcgacgcgctcctgtcgggagaaggctcagaagctgaacgagcagcaccagctcatcctatccaagcttctgagggaggaggacaacaagtactgcgccgactgcgaggccaaaggtcctcgatgggcttcctggaatattggtgtgtttatttgcatcagatgtgctggaattcatagaaatcttggggttcatatatccagggtcaaatcagtcaacctagaccaatggacagcagaacagatacagtgcatgcaagatatgggaaatactaaagcaagactactctatgaagccaatcttccagagaactttcgaagaccacagacagatcaagcagtggaatttttcatcagagataaatatgaaaagaagaaatactacgataaaaatgccatagctattacaaataaagaaaaggaaaaaaaaaagggaagagaaaaagagagaaagggagccagaaaagccggcaaaaccacttacagctgaaaagctgcagaagaaagatcagcaactggagcctaaaaaaagtaccagccctaaaaaagctgcggagcccacctgtggatcttttaggacttgatggccctgctgtggcaccagtgaccaacgggaacacaacggtgccacccctgaacgatgatctggacatctttggaccgatgatttctaatcccttacctgcaact

SEQ ID NO: 55554 - DNA, 1136 bp, Homo sapiens
gacatctctaaaatgtgttagcacactgcagtttcattttaaatgtgtctcataatcaccagtgattactactaaggagcttctctagagatcttaaaaacagattgcttccctaagggctggaatagttcagctgggtacctaagggatgtgtgaaataaaataaattcctagcgcctcttttatctctaatattctaagatcctggtggtttgataactttggacatggtcccttaatgcagacagaagagtatcttagtctcctaactctctgaccaacacttagatcaataaggcactgtcgacagtgcactagaataataaagaacccagataggttgaaaagccctttgtaccaatataactgtaatgctgttagaatcacctttccggtatgctctcagaaataagtgccgcttttgcaaagtgttaagataatttaatgtctggcttttctgtttcatcatctcatggcatgaggaatgctgactgctctaaacgttgaacttctagaagcttgaacccattgacttgccacgagtaattacttcaggaagactcctgagccagcgagaagccaggacaatgcacaaagcaaaggtactagaaaagaaaatgcaaactccaatgtatacttctgagaacagacaatatttgcataagatgcaagtgctggaaatgatccgtaaaagacaagaggcccaaatggagttaaagaaaagtcttcatggagaggcaagaattaataagcaaagtccaagggaccataaagccaagaaaacccttcaaagcaccccaaggaatgatgaccatgaccttctaaccatgttgcctgatgaaatcttgaacagaggtcccggaaattcaaagaatacagaatttttgaaacatcaagcagtgaataactactgtccctggaaaattggcaaaatggaaacatggcttcatgaacaagaggcccagggacagcttctctgggacagttccagctctgactcagatgagcaggggaaagatgagaagaagccacgagcactggtgaggaccaggacagagagaatcccacttttcgatgagttttttgatcaagaataagaatctattcattacctagaaactgagtgctttgaaaag

SEQ ID NO: 55555 - DNA, 1601 bp, Homo sapiens
ttactgcagatttactttaaggctcatattctccaagtctattctgctttaaaaagaagacaagaaaagaagtggtttatcaaaatcacgttataatcagattttgaccaagcattttgtaagattgccaagcatgcccacggacatggaacacacaggacattacctacatcttgcctttctgatgacaacagttttttctttgtctcctggaacaaaagcaaactatacccgtctgtgggctaacagtacttcttcctgggattcagttattcaaaacaagacaggcagaaaccaaaatgaaaacattaacacaaaccctataactcctgaagtagattataaaggtaattctacaaacatgcctgaaacatctcacatcgtagctttaacttctaaatctgaacaggagctttatataccttctgtcgtcagcaacagtccttcaacagtacagagcattgaaaacacaagcaaaagtcatggtgaaattttcaaaaaggatgtctgtgcggaaaacaacaacaacatgggctatgctaatttgcttaattataattggcagtggctttttcttatctgtacctttctatttctatcaactgtggttttggcaaacaaagtctcttctctcagacgatcaaaacaagtaggcaagcgtcagcctagaagcaatggcgattttctggcaagcggtctatggcccgctgaatcagacacttggaaaagaacaaaacagctcacaggacccaacctagtgatgcaatctactggagtgctcacagctacaagggaaagaaaagatgaagaaggaactgaaaaacttactaacaaacagataggttagtgaagaaaaatgcaaagtagcaatgagaaggcttatggagtaaaaatgaagtcagttggtatttaatcccaaagtgttgttctgattatctaaaatttgacatggtagaccttgcaatttagaatcaagcaggtgagacagggagaagtatgcctgcttaattatttaaactgtgtacttttgttttgacactgaatattttaaaaagcaaataataaaataactaagcatttgaggaaaattttaaggataaattgaggaaactgattaatagagatagcaagggataattaaataaatattccctatgtagcaacagtggttagatgatctttgtctgaatgtaattaaactttgaatagttttagtgtgtccttaaagccaagtatatgctttaacatcaaatggaagtcaaattcctaatgcatagatagagagagctaaactgtgtaatttaatggtatcttccttgctggatgtggcagaatccacaccagcttatcaaccaacacagctaattttagaatagatcctttatctttccatatggcacacgtaagaaagtgtttttctactattaatattaaattaaaacctttacttttgtataataaattaaaactcagaataaacctgtgaccacgtatatttgcattcactttattactttagagaacacattgtaaagatcaataagaaatagagcacaactaaaataaataagatttatagccacaccaataggctaagtgta

SEQ ID NO: 55556 - DNA, 1999 bp, Homo sapiens
gaaagaagctggggcgcatgtttctgcccaaagccgggttttggccgaggtgactacacaccccctttcctggctcccataggctaagtgcctggcttcttgagaagcctgcttcttgagaacaaaaaagtgatttaaagcctcatgggagatgagcaatcctcaagacacaagcagaaaaagtcccagtgatacaggaagcgggttcaggaacctgctggttcctgatacataaatcagacagcctctgctgcatgacacgaagcttgcttctgcctggcatctgtgagcagctgccaggctccggccaggatcccttccttctcctcattggctgatggatcccaaggggctcctctccttgaccttcgtgctgtttctctccctggcttttggggcaagctacggaacaggtgggcgcatgatgaactgcccaaagattctccggcagttgggaagcaaagtgctgctgcccctgacatatgaaaggataaataagagcatgaacaaaagcatccacattgtcgtcacaatggcaaaatcactggagaacagtgtcgagaacaaaatagtgtctcttgatccatccgaagcaggccctccacgttatctaggagatcgctacaagttttatctggagaatctcaccctggggatacgggaaagcaggaaggaggatgagggatggtaccttatgaccctggagaaaaatgtttcagttcagcgcttttgcctgcagttgaggctttatgagcaggtctccactccagaaattaaagttttaaacaagacccaggagaacgggacctgcaccttgatactgggctgcacagtggagaagggggaccatgtggcttacagctggagtgaaaaggcgggcacccacccactgaacccagccaacagctcccacctcctgtccctcaccctcggcccccagcatgctgacaatatctacatctgcaccgtgagcaaccctatcagcaacaattcccagaccttcagcccgtggcccggatgcaggacagacccctcagaaacaaaaccatgggcagtgtatgctgggctgttagggggtgtcatcatgattctcatcatggtggtaatactacagttgagaagaagaggtaaaacgaaccattaccagacaacagtggaaaaaaaaagccttacgatctatgcccaagtccagaaaccaggtcctcttcagaagaaacttgactccttcccagctcaggacccttgcaccaccatatatgttgctgccacagagcctgtcccagagtctgtccaggaaacaaattccatcacagtctatgctagtgtgacacttccagagagctgacaccagagaccaacaaagggactttctgaaggaaaatggaaaaaccaaaatgaacactgaacttggccacaggcccaagtttcctctggcagacatgctgcacgtctgtacccttctcagatcaactccctggtgatgtttcttccacatacatctgtgaaatgaacaaggaagtgaggcttcccaagaatttagcttgctgtgcagtggctgcaggcgcagaacagagcgttacttgataacagcgttccatctttgtgttgtagcagatgaaatggacagtaatgtgagttcagactttgggcatcttgctcttggctggaactggataataaaaatcagactgaaagccaggacatctgagtacctatctcacacactggaccaccagtcacaaagtctggaaaagtttacattttggctatctttactttgttctgggagctgatcatgataacctgcagacctgatcaagcctctgtgcctcagtttctctctcaggataaagagtgaatagaggctgaagggtgaatttcttattatacataaaacactctgatattattgtataaaggaagctaagaatattattttatttgcaaaacccagaagctaaaaagtcaataaacagaaagaatgattttgaaaaaaaaa

SEQ ID NO: 55557 - DNA, 1179 bp, Homo sapiens
ctgcagcccactgataaatatctcacttctcccaaatagtatgtggactcccagctaagcagaaaactattgtcattcaactgaagaggaagataaaagattgtcttgtttccatcactgtattacttgtgtaacatgattacataattcttatcctaagagaaagctttcatatttaaaaaaaagtcttttcagataaaatctgcttgtgtcttgaataatatgaaatacaaactttcactttattttattgtaaattataaagagattattgtcttaaataatatattgagttagcttcaagcttcctaaaatatgaagagattgttgtctaaagtcacatattgacattgagctcagtggcctgtttcatcacgtatgtgctgctacctgtacagcagacatgccgctccagtgacatttataatgacagaagcagggtaatggtcttgtgtttgacatgatcagttaggatcatagactttccctgactcgtagatattagccttgaattgggggagaagaagactttgacacattttagttattttaataacagagatttactcttttgaaaaataaaggtatctaatgtctccctaataagtcttctttccttccaactaaatgacctacacggacttttattttcttgatcaaagaggtgtttattaaggacttctggataactatacttttactctatttttaaagatcacaaagtaattttaaatgtgaacaggttcccataccatgaatgctggcctcaccttctctatcatccacattttgaaatgcaaagaaagctcccttgtaagccatacttccttccccactcccatcctaggatacttgcccagtgcctcattaggcatttcttattcagatagtccaaatttaggttattatgcttaatttgacacattaactaaatgcccagttttaaaatatatccatcaattcacgctgaaatgtgcttctttgtgctatcaaatggaatagaatacacttattttttaaacaatcccagaatactgtgtgtagacttttgttgtgctcaaataaatgtttacttatcttacaaagctcaaatactggattgtaaccatgtgatgaagttatctatgttgtacctaacattgcaaattaatcaataaatctctgttgtcaaaaaaaaaa

SEQ ID NO: 55558 - DNA, 358 bp, Homo sapiens
aattactgcaatttttatgtaatgcacagagaagtagagtccttagaaaaaaatatggccattcttgatccaccagatgctgaccacttatacagtgcaaaggtaatgctgatggctagccctagtatggaagatttatatcataagtcatgtgctcttgctgaggacccacaagaacttcgagatggattccaacatcctgctagacttgttaagtttttagtgggcatgaaaggcaaggatgaagctatggccattggaggccactggtctccttcgttggatggaccagacccagaaaaagatccctctgtgttgattaagactgctattcgttgttgtaaggctctgacaggca

SEQ ID NO: 55559 - DNA, 404 bp, Homo sapiens
  misc_feature (1)...(404): n = a,t,c or g
cctcccgcccctccctgccctctctgagataccgaggctcccactgctgcctggctggaggcacctccccacgagctcagcccaccctcccaggctccggctctccttgcctctttgcgtgccccttgcccctgtgcaagctggcagtccagggcaggactcagtttacctcccaggctctccggctcaggacaggctgcgccattgacttgttcttcatgggaccagggctctcagagccgggcagggagcccgggggccctgnnnctcactgnctnttnccccacaggaactcatgtacncanantgatgncnagggtaatacangctntntggnntnatgcnnacctgnnncatacccggncnttatcntgttttggacnnnancaannnntncntttgtt

SEQ ID NO: 55560 - DNA, 1296 bp, Homo sapiens
  misc_feature (1)...(1296): n = a,t,c or g
ttttttttagcaataaggtcttatcatgcctaggctggtctcgaactcctggactcatgcaatcctaatgccttggccttccagtgctgggattacaggcgtgacacctggcacccagcttgaagatggcagttttcttgtatgctcacacagcacaaagtgacctcgctctagttccttccttttcttataaggactcgatctcatcggcgagccccactctcaagatctcacctaagcctagtcacctcccaaagggccccacctcctaataccaccctcctggggtcagggtttcaacatataaactttggggggggacacaaacatgcagtccttaacaccatcgtcatggagatggaggccacagacctaccaacacccataacctcaagggcactggtggggacagaggggtcttaccagcactgccatgtggcagaagttctccaacattatgtctctgtagaggcctccaggcagcacttaggaattgccaactcctctggtgaggtcactnacacantcctcaaggccacagtctcctgaaacaacagaactttgctgcttcatggaggagcgtcagtatgtccacaccataggggtgtagtcacttccctctgccagggagaatggtggaggaagaatggattccctaagtgtattttttctcttcagaactgacagcccatcaaggtacaatgaaatagaaaaaaaggctggccaggtgccaagtcccagctcaagcctggcagctcctcccactgagcctcatggtcaccccagaggacaggccttcctttcacacacatcagaaatagggaacccaagacctcgagagaggaaatgggcccagggacatgccttggcttggggtggcttaggaccagggcaagacgcctgaccccagagcagaccatgctgacactgggcaacacattccctgctctggacctcagttcctttggctactaaggaggcccaacgatcctcgcctgtgtgggaacggggctacctgcagacatagagggcctttgagcacctcgtagcttgcttcccagccagcctgggtgtggaaatggccgtgctgacaggctctctgcgatagggcccagccatggccagtgggcctcccacaatctgcccctgggtgcagggccttgagcagggaggccatcgtgctgcctaagagaccaggacccagcaggggcccatacccagattcagaggctcaggaccaccacggaactgaaaggaggttcaaggcctcaaacaagagtggcccctaaaacagtt

SEQ ID NO: 55561 - DNA, 757 bp, Homo sapiens
  misc_feature (1)...(757): n = a,t,c or g
cgcctgcggtccggtccggaattcccgggccctaactcctttcctcatgattcctactccgaaacctggatggttaggagcccagggctccctgatttccagagctatatcctgttggacctttgccaacagacctgacacttaggggttattgttataaatctaattctctaatattttttacatgttgtttcactttgaataagcaaatgaagaatcagttttctaatatgactttatcctcaagctagagacactagcctatttggtaaatcacacattacttaggtatatttattactataaccaggttggagcttccatgtttaagctgggtatatgatgggtttttgttaaaatgtgccttaaaaagcctattacttcaagagcaaatgattctttgggggaaaggcaaaaataattctatgacatagggcccaagttcatggtagtaagtgtactctttgattaatcacacgctaatatagattactgcctctaactttgtaagtgtggcaatgacttcttaattaaagaaagatgcaggagttatgtctaagcgttcagtttttcaaatctgtgttattggaaatgctcaggcattttgcatggattttgaatgagagcacttattggangggatggcaggtcatctcaaattaatctataatcaatctaatctggtacgcactgcctggacattttctggtttaggatggactgccntnggtcttctcaagnggnagagccttcctgg

SEQ ID NO: 55562 - DNA, 238 bp, Homo sapiens
tggaaatatgaatttaggagtcatctacgtaaatattaattaaaacttctagcatggatgaatgaaaagagagacaggcctaagactgggtggacattgaagaactgtgtggatggcaaggtcgaaatgggatatcctatagaaataggtttctcagtgtgagtggagttcagttttgggtgtaatgaaggcggagattacttgagagacatccaagtgaatgaagaagtcttttttc

SEQ ID NO: 55563 - DNA, 1175 bp, Homo sapiens
  misc_feature (1)...(1175): n = a,t,c or g
ggaaatgggtgaagagagaagtcccctcactagctgcatgagaaatctatcttactgtggttctccatgggcagcaggaccatttttcagaatcaagagggaggacagtgtgagaaggcgatgatccaaagaagacagagaggtcagccccacccgatccctcaaatgggctcttggaggcacccccaggggcagcccatttctcaaagtccagaaaattagggtcccagaagggggcagcagcaggctgggagttaggagggagagcagggtgccggccctgccaccaagttgagagctggaggggaggtggggagagaacatcacagagcagccagccctggttcactcctggcagtttcttctcaagctccttccctaggagcatggtggcacgtgcctgtggtctcagctacttgggaggctgaggcgggaggattcgccagagcccagggattttnaggttgcantgagctatgagggtgcctctgtgctccatcctaggcaacagagtgagacgctgtttaaaaaggaaaaaatccttccctagagctagtatcctaaagctgcagagctagcccagacctcattggtttccttgtccttggggtgcttttcctgaatctttgggggtgaagggagtgttgctcccagtccagaggcctgattctgttcggactgggttctcaagacacgaccaggttctcaagacacgagtccccttgttcctccccattaaagggggtttgtcagaagcaagaacagcccctctccccagtcacagcctgaagggaggccccgagagcttcctccttccccccacctgctccttaccttctctgccctgctttttagaactgcagttcattgttttaagggattgggggagggagcctggggacacaaaccttttatacaatacaaagctttgcttttttttttttttttcttccttttccctttctcggttctcttctctcctctgaatggctgaagacccctctgccgagggaggttggggattgtgggacaaggtcccttggtgctgatggcctgaaggggcctgagctgtgggcagatgcagttttctgtgggcttggggaacctctcacgttgctgtgtcctggtgagcagcccgaccaataaacctgcttttctaaaaaaaaaaaaaaaaa

SEQ ID NO: 55564 - DNA, 447 bp, Homo sapiens
ctttctttttttccaaaatacacacaggttgatttgctgtaatataaaacttagaagtaaaccactgctaattaatcattttaaactttcaaaaactgctaaaacaggtgccatgaatcaggtacaattactgtagaaactaacattagctattatacactaaccaggcatttttcccaaattaattacaatctggttgtttagcctatgctaattaagccctcttagtagtagtattcactttacattgaagacctcattcacaaatacagggtgctctgtgcttatatccttccacccttgactgccaaaaatgtgtggaaatgggaaagttgatgggcaggcagggccgacgatgtcacctgggtgcctcgcggggcttcagtgagttaggggagttcaggcaggcagggggagggcagctttgcatgcctgtcccccgggcac

SEQ ID NO: 55565 - DNA, 381 bp, Homo sapiens
gcggatgtgtgcgggcgggcggtgtggcacagaaaggcctcgatggactgtctgctcttcacggcaagagtgtgctgcccctgttctctgtcgtggcctctgctgtaaagatgagagaagtccaacgccagtctaattcatgattcttttttagttaagctttttaggattttgtggaaacttgtaggattttctgttgatatgtgggagtctgacattttgctatttttagggtttagattgtgacttttttatattggttagcatcttgaagctcttttaatatgcagacttgtctttttaactccatctcagtttttctgtcaagggccagttagaccttgtggccgcatgttctctgacagctcttcagctctgctg

SEQ ID NO: 55566 - DNA, 450 bp, Homo sapiens
cctgggtgagagagggaggtacccagagtaaatacagtgcccactgggatgggtgacacccccattacccttcagacacaaagatgtaagctgagggaaatgaattcttggattcagggaaatgaattcttggattctgaacatgagggtcagatttacattcctgtctcaattgttgacgcttatcccaaggactagtcattctgcaacatctgtgggaaattcccagattgaacttcccagggagaaacatcatatgacatattgggaaaatggctgacaatggttttccttagtaagttcattgagaagaaaagtgggcggatgatttcccagtcttcactctttcagaagcccctaaaacaatctgacatgctctagttggagcctgctttctatcccatcagtttgatttctgaatgccttatgatcattagcattcttcattaa

SEQ ID NO: 55567 - DNA, 339 bp, Homo sapiens
  misc_feature (1)...(339): n = a,t,c or g
gaaggcacagagagagaaagcataagatacattataataaggattagtatttcactgggctgagtctcagtggtggtaaggagataagaccttaccatgttataggagaccttgaaagtcatgctaaaaatttgaatttaattctttatggttgtctaaaaactatttntantcnnannaggctcnccnttccggatgcacngcttnncaagntnaatcagtttncnttgnacntcntnntnnncgttttnttccnnnntncctcnntcnntntttttnntttnnttntatttgcagtctcgcnntttgtttttntctntatctntnngcttnncttgc

SEQ ID NO: 55568 - DNA, 323 bp, Homo sapiens
gcatgctccagaatacccacccaaataaaccatagctgtgtgccaggcactgtgctaagtatcctacaggttttatgtgatttattttatttattaatttaatttaatttttttgagacgaagtctcgctctgtcacccaagctggagtgcagtggcgtgatctcagctcactgtaacctccacctcctgggttcaagagattctcctgcctcaggcctcccaagtagctgggactacaggcgcataccaccatgcccagctaatttttgtatttttagtagagacggggtttcactgtgttgggcaggctggtctcgaactc

SEQ ID NO: 55569 - DNA, 348 bp, Homo sapiens
aattaatgcaattgtattctttaaataggtgaatttcattgtatgaaaattacatcccaataaagctaacaaaaaaaaagtaggtcaaagacttgaacaggtgcttcataaaagagaacatccaaatgaccaataagcatatgaaaaagcataaattaaaagtagaatgagataccattatgctcctatcattatgtctaaaatcaaaaagatggaaaataccaaggattgctgaggacattggcacaactggaactctcctatgctgctcacagggatgtaaattggtattaccactttggaaaattgtttggcaatgtctaggaaagctgaatacgtgcataaact

SEQ ID NO: 55570 - DNA, 410 bp, Homo sapiens
gtacaacaaaactctttgaaaataccagtgttggattcaagtttgttctgctttccttcatagctactggcatattgtaggtggttgacttgattttgtctttttatgattcatactataaaatctcactagagcagcttttccagggggtgggttacacttaagctccaaattgtcaggttccctgacaccgtctttctgcagagctctttaaatacagtacaaaaatgtgtgacgctaaatacgtttctttatcctatctagacaagtcacaatactgtaaacctcttcaaccctgagcgtttgtcattgtacaaatgaattgtccgtgctttcctttcatgcacttatgtattaatgtgtcactttttgactagaggtgtgcttttgacacttaacctattttctat

SEQ ID NO: 55571 - DNA, 416 bp, Homo sapiens
gcggggtgaacctggactccagcggggagtttgccatcatcgagaagatgctggccaccacagacaccaacaagttcagtccgtttctgcagtgagcagaatcaaatgggcaatatttgtcctgggagacctgtgccgcacccaggtccccgtgttaacgtgtgcctgcggttgtggttggcaccctcgggtggtagctcttctactgtaatgagacaagcctttcttctgtcactgcagaatttagaaggggccgtgagcagtcttcccaagcatggtccaggagcagctcagagagggtggagtgaggatgcatgcatccagggaacaggcatcaagaagccagggccgtgcctggagcactgcagagatgactttggagaaagcaaagcagtgacccagtgaccaggcacatt

SEQ ID NO: 55572 - DNA, 1122 bp, Homo sapiens
gtcactaataaccttttcaagtgattttggctattctctaatgaagatatggtccatttgtttttcttcctgcaatgtggtgtgcagagatgctgcatatcctttttatgggattgcgtgtgaatttgaaccatgagacattcctaataatttgttgtgagatataccaagcatggatgataagtgtgtttttagtggtgtgttgtttttttaaagaggtgattcaagtaccgttgctaagctgtcaacataccaagctgttgaaaaaattgaccatttctttcagaagtaattctcagcctgtggaataatagcaggtgaagacttcatagaaggcgacagattgatagggaggctattgaagcagtttttctgaagcctgcattttgagttagtttatagtgctaatagattctatataactgtgagagtttggtagtaaaccagtagggattgttttctctcctaaaaatttgcacactacttcattgtctaccaactttttacatattggaaaatagaaattgcaaatacatacatgtatggaaacatattcagattgggaaaaacaatggacattagtttttaaaaagttacgtggaagcaagatttctatatttgtttttttaaaggaagcagtcattctttctactaaatccatttcaagctagttctctgaaaattttgccatttatctacagaaatttgattataaatatgttcctttttcaaagaaactttattctagaacaaaatagtctatatggtacttgatctacatttaagtggaaaaattagcagtatttgaaagctcagtttatgtcattgtcttaacttcagatacaaataactgaacagaaagttttaacctttaatatctcatgttctgttttttattcagtattttcctttatgttaattcaattatatacttctgaatggcaccttactttttggaaacaaatcttctgttatttacaaaataataatttttaaaaaacatttaaaaaaaatccaaagctgctctcgataatagtcaacatttgcatatatatggaatttcttactttttttctcccaaactctatctaataaacttattttaatgctcgtctacaaaac

SEQ ID NO: 55573 - DNA, 848 bp, Homo sapiens
  misc_feature (1)...(848): n = a,t,c or g
ttttttttttttacaaaaatcacctcttggttttatttctttttatattagtttgatacgtgaatgttagtccaacttaatttttgaaggagaaacaaaatgaaaaatgttttttaaaaaacaaacagtggtatctcttgtcatgagttggatgcctgtgactgacatcaggtattgccaagtaataaacattttgccattcaactctaaatcccttattaggcattagttttaaagggaaatgttacaggcttttatattatttgatttggtatttaataacagttataagtacaatggtagacactgaaaaagaaaacccttaatagaaaagaaaaagacaatttaaaattagattttgttgaagggtgttataagtgcaactttatccatatgcattccttttaaggcattttcattgtccaaatatctcaacatgtacatcaaggtttatattataaaatgggctccttttgtattcattcaagacttaaagaaaaaatacatctcaggactaagtgtagcacttggcccacatgtcatgtagtgggtaatagaattaggagctttgttgctccctagacctgctttttgaatttctgctttcttgtactttgtccacattagatgctgcagtggtgttgctgtcagcagcagctggtggtgaatcaactgatataggcagtctactgtccttggtcaaaaaatcatggatgcttgtccttcgtgtagttccttcggcagttgagatcacgctgcttgcacgaggtaaagttgcataagggttactatcttttgattgtcgtgacagagaagantcttttactaattttatttttccttgagtg

SEQ ID NO: 55574 - DNA, 2061 bp, Homo sapiens
  misc_feature (1)...(2061): n = a,t,c or g
taaacatttggaagaagcacaaaaaaatagatttagttaacccagggaaacatcaatttttttagtagttccaattttatatcacagttttattttcttatgaaatcaaaaaatgcattgatactcattaatgcaaattcattatttaacatcaatatcagagtaatcttcaaggtctgaaatgaggaaacatactgactttttaaaattttaacagtgtacttcttaggctttcattaccagctctgaagaactttttggaataattccatattccatagtgtgtggtttatgagttgtgggtttcatcactaacccagtaaccataagaaaagnnnnnnnnnnnnnnnnnnnnnnnnnnnnnnnnnnnnnnnnnnnnnnnnnttcgtaggccagtagcaatgttgtgttcacagtctaatttccaaaagaccatcaataaaaaagagagcatgtttaaattgaaatggaacttagagaacttgagcttacttacgtacttcaatgccaccggtaacttaggttttaccaccaaatgctgttaacattaaatcattttgaaaatcttggatgaaaggtgctatgtaaatggaaatacaaaggattcttactaacatacaaaaataatgcacaacagaaatatctaaaaccttttccgtagactttgaaacatctctctctgtcataactccctgggattcaagtagcacattggtaataggtatcagagcagtctagagacaattgcatgtcaaaaaatgtacattcatttttagggtgggataaaagtaaacatagaaattatgttatggctaaatacagttagtgggtaacttagatttatattagctagcatctaatttgcacaactagaacacatcccagaacaattactgaaaagctgaaatttaatgggtggtgatgtagcccaatgagggcgaatgacattccagcttgacctctccagaacacttaatatcctaaaatacagaacatgctgggttaagtgcattagtgcttcaagcagaaaatgctgaaaacaacgtgtaaagtactgaatctgagtaggctgaccctgagaaggggacaattaaagagacaaccaagggaacacattgagactacaaaaatatgaataatctcaattatattcatcacacttttttcataccatttcaagaaacaactagacagtagtaaccacatgaatattttactttctccagtataccttgagaagcaaactttgtaggaagccactcttctcccctaaacaacttctgccaaacaataataaagccaactggaaacgaatcggagccattttcattttcctaaccggggcctgacatgctttaaattatctggctgtattctaaatcaacacctaacccctcaaggaaactgaagaatcaatatacagggtaatagctttggctcagagctccaataatgtgcttcagatctgtccatgtggaaatgctttcatccaaatttttaaattggtggttaccaaagagttcacaaaacaggtttgtatgtagcacctttcatgcaaggcatgcaaaaagcctattttaaaatcactgtgcatattatagagttgtagccacctcacaatgaagtactacagcctgtgctgtcttaatggtttatgtcaggaaatgaaaaagatactgtaccaaatctggaattacaatggggagtaataatgtatactaaatgacttttgtattttaagttactttttgtgagtggtgaatttttgtgtttttcttttcagctacacttagtcctgagatgtattttttctttaagtcttgaatgaatacaaaaggagcccattttataatataaaccttgatgtacatgttgagatatttggacaatgaaaatgccttaaaaggaatgcatatggataaagttgcacttataacacccttcaacaaaatctaattttaaattgtctttttcttttctattaagggttttctttttcagtgtctaccattgtacttataactgttattaaataccaaatcaaataataaaaaaaaaaaa

SEQ ID NO: 55575 - DNA, 340 bp, Homo sapiens
tctagagctagagtgaatgagccccaagaaaatgacccaaggagttgactcaggatggtttacagactgatttagaaaaccagaacggatttcatttctaatggagggggccagagatgggaaaatttcttgttcagtccggggaaacacacctaggtgctggtgatgggcttatgaaggaagctaagcacggctgctcactggcccccactttgtttcttgggtaattcacaggggaattcccagtactgtcatggagcagagcaggcagtgggtgctgatgtgtgtgcatgagctgtatgtacacatgcatatatctggtacagaagatactcctggc

SEQ ID NO: 55576 - DNA, 478 bp, Homo sapiens
  misc_feature (1)...(478): n = a,t,c or g
ggngtnnnntgnntttgantttgataacnctatgactgattacgaatttaatacgactcactatagggaatttggccctcgaggccaagaattcggcacgaggtgctgcccctaggcaatctccaggaagttcatgcctctggaccagtggctttactttgatgccctcgattgtcttccggaagatggggagctccttcccagtcctgaggactgtgccctgagaggcagccgctatgatgggcaaattgcagtgtttggggctggttttcaggagaaactgagacgccagcactacctcctggtcccaggacgttggtagacccaaggcagaggtggctgcagcagctgcccggggcctgaacccagacttacagggcgctatgtggctgctcgttgcacccactatctgaagccactgctggaggcaggcacatcgggcacctggggcagtgctacagtattcatgccacatgtg

SEQ ID NO: 55577 - DNA, 3304 bp, Homo sapiens
aggagccaggaagagagctgtgaccagcagcgtcccttattcgcttggccttggttcctgtttgcactggctacagcagggcactggcccctactgtcaccgccacctacacaaagaccctatctctgagcgctgcagcctactgttcagccccaggtttgaggatggatgccctggacgcttcgaagctactggatgaggagctgtattcaagacagctgtatgtgctgggctcacctgccatgcagaggattcagggagccagggtcctggtgtcaggcctgcagggcctgggggccgaggtggccaagaacttggttctgatgggtgtgggcagcctcactctgcatgatccccaccccacctgctggtccgacctggctgcccagtttctcctctcagagcaggacttggaaaggagcagagccgaggcctctcaagagctcttggctcagctcaacagagctgtccaggtcgtcgtgcacacgggtgacatcactgaggacctgctgttggacttccaggtggtggtgctgactgctgcaaagctggaggagcagctgaaggtgggcaccttgtgtcataagcatggagtttgctttctggcggctgacacccggggcctcgtggggcagttgttctgtgactttggtgaggacttcactgtgcaggaccccacagaggcagaacccctgacagctgccatccagcacatctcccagggctcccctggcattctcactctgaggaaaggggccaatacccactacttccgtgatggagacttggtgactttctcgggaattgagggaatggttgagctcaacgactgtgatccccggtctatccacgtgcgggaggatgggtccctggagattggagacacaacaactttctctcggtacttgcgtggtggggctatcactgaagtcaagagacccaagactgtgagacataagtccctggacacagccctgctccagccccatgtggtggcccagagctcccaggaagttcaccatgcccactgcctgcatcaggccttctgtgcactgcacaagttccagcacctccatggccggccaccccagccctgggatcctgttgatgcagagactgtggtgggcctggcccgggacctggaaccactgaagcggacagaggaagagccactggaagagccactggatgaggccctagtgcggacagtcgccctaagcagtgcaaggtgtcttgagcctatggtggcatgctgggtcagtagctgcccaggaagtgctgaaggcaatctccagaagttcatgcctctggaccagtggctttactttgatgccctcgattgtcttccggaagatggggagctccttcccagtcctgaggactgtgccctgagaggcagccgctatgatgggcaaattgcagtgtttggggctggttttcaggagaaactgagacgccagcactacctcctggtgggcgctggtgccattggttgtgagctgctcaaagtctttgccctagtgggactgggggccgggaacagcgggggcttgactgttgttgacatggaccacatagagcgctccaatctcagccgtcagttcctcttcaggtcccaggacgttggtagacccaaggcagaggtggctgcagcagctgcccggggcctgaacccagacttacaggtgatcccgctcacctacccactggatcccaccacagagcacatctatggggataactttttctcccgtgtggatggtgtggctgctgccctggacagtttccaggcccggcgctatgtggctgctcgttgcacccactatctgaagccactgctggaggcaggcacatcgggcacctggggcagtgctacagtattcatgccacatgtgactgaggcctacagagcccctgcctcagctgcagcttctgaggatgccccctaccctgtctgtaccgtgcggtacttccctagcacagccgagcacaccctgcagtgggcccggcatgagtttgaagaactcttccgactgtctgcagagaccatcaaccaccaccaacaggcacacacctccctggcagacatggatgagccacagacactcaccttactgaagccagtgcttggggtcctgagagtgcgtccacagaactggcaagactgtgtggcgtgggctcttggccactggaaactctgctttcattatggcatcaaacagctgctgaggcacttcccacctaataaagtgcttgaggatggaactcccttctggtcaggtcccaaacagtgtccccagcccttggagtttgacaccaaccaagacacacacctcctctacgtactggcagctgccaacctgtatgcccagatgcatgggctgcctggctcacaggactggactgcactcagggagctgctgaagctgctgccacagcctgacccccaacagatgggcccccatctttgctagtaatctagagctggcttcggcttctgctgagtttggccctgagcagcagaaggaactgaacaaagccctggaagtctggagtgtgggccctcccctgaagcctctgatgtttgagaaggatgatgaacagcaacttccatgtggactttgtggtagcggcagctaggcctgagatgtcagaactacgggattccaccggtcaaccgtgcccagagcaagcgaattgtgggccagattatcccagccattgccaccactacagcagctgtggcaggcctgttgggcctggagctgtataaggtggtgagtgggccacggcctcgtagtgcctttcgccacagctacctacatctggctgaaaactacctcatccgctatatgccttttgccccagccatccagacgttccatcacctgaagtggacctcttgggaccgtctgaaggtaccagctgggcagcctgagaggaccctggagtcgctgctggctcatcttcaggagcagcacgggttgagggtgaggatcctgctgcacggctcagccctgctctatgcggccggatggtcacctgaaaagcaggcccagcacctgcccctcagggtgacagaactggttcagcagctgacaggccaggcacctgctcctgggcagcgggtgttggtgctagagctgagctgtgagggtgacgacgaggacactgccttcccacctctgcactatgagctgtgacaaggcagccaccctgtcacctagctcaatggagccccggatcccaagccctgcattgtaagcccacagtaggcactcaataaatgcttgttaaaggaagg

SEQ ID NO: 55578 - DNA, 442 bp, Homo sapiens
gcctagagggctgttttttggaagggaggaccgggagtttcccataacagagggtaggctcaggagaacagggaaaaaggagaccgtcctggacggccagagggagacaaaaggagcaatcatcatcaccgctgcctttttcattcctggaacgggatcaaatggattagaggcgtctccctaagaccaggtgatgggatgatcagcgagtacctggcacacgccggagccttgctggaccgacattggatttttggaccgtagacaccaagagaggccatgtggcttttcccttgttaactgggctcctagggaaacttaccaataggcaaggccagtgaccaatgtgcatgcacagagaggcaactggaggctgaggagcttcctttgtcctgctgctgtggctgttctccagggtggaggggtaggtccatgggggatg

SEQ ID NO: 55579 - DNA, 491 bp, Homo sapiens
gagaaaatcctgtaccttagattgacaatactgttactttaaaagaaatatatacggtacaaattgctgattctacatgtgtacatttaacagatactcagttctgcaccacctaaatcaaaatggcatttgtatgctgatgattacatatgtggattgtagtatcctttgtgatgaatctttgataagatttataaagggcattgccaatactttttgactgtgtaaattaagttaattttttgtatgatgtacagtttgtttaaccttagagcttctatagatttctactttattatacttgaatgaggcagaaaagcactgtggaaaatctgtagctctggatgcaacatgcagacataccaaaaaaataataataaagcaaggtactgaagagcaatgttaacagaatgctttatatccagaatgctatgtttttttcaagcccattttagttgaatgaagtaaagttattcaatcttttattttaa

SEQ ID NO: 55580 - DNA, 331 bp, Homo sapiens
tctcgaggatccgaattcgcggccgcgtcgactcacctgatgcgagtaatacggatgtgttgtggggtggggcaggtggtttagcccgagctggggtgcctggctggggacgtgcccagaggagtagggtgtgcggaaggcaggatggggtccccacagcaagctttcctctccctgactgggccacctgttgcaaacagtcaggccccgaggaatagcctccccccagggggagttcagtaacgggtaccatttctcagaaggggctggccgcagagattagaccacagtgccaagggggccataaattgttacctgtgcccttcagtta

SEQ ID NO: 55581 - DNA, 470 bp, Homo sapiens
cggtgtggaagtggtcaccctcttgctgagcagaagatgccagatcaacatatatgatagactaaacaggacacctttaatgaaggctgtacactgccaggaagaggcttgtgcattattctcctggaacatggcgccaatccaaacattaaggatatctacagcaacactgctctccatgatgctgtctatgataaggggacttcactggcaggaagcctgctttcccaccatgcaaatactgaagcactaaacaaggtatagatcaatcaactttcttttcaaaatatttgttttaacattgacataggtaagagtcaatttttcatatttggatgatcaggcattcctgaatgaaaatattttgaaatagcttaattgtctcaggttttactttaaatattgatacttttaaagaagcattagagggcacagcttgtttagtgcacttatgggaagtatttgtgaat

SEQ ID NO: 55582 - DNA, 432 bp, Homo sapiens
caggcgtgtggtttgttgaatgctccaatgtggaacccagggaaatggagggctgactgtactttgataatatttcaacatacaagctgaaaagtttcattacattgtcggcattcagctaaagaagactctctgaagtgtgaagattttaattaattcagtacactcttcaacatgttatgtatataactatcccatcacaacgtggggcagataatatttcatttggaggggatgttatattacaaatagtccctgcattctaaacttccaacatacataaaaacaaacactcttatttgctgtcatgggagtctatagtgcctctaagagtaattattttgggaaaaaggaatgaaaggttttagatcagtgattctgtaaatgcagtctaattagaatcatctaaggagtttgtataaaatgcatatt

SEQ ID NO: 55583 - DNA, 376 bp, Homo sapiens
ggcagctccaaggcaggaagagaattgggcatcgggtacgaacctggcagctcaggagtcggggctccactcaccccacacaaaaagatgaaaaagcgcaaagagctcaatgcattgattggtttggctggggacagccggagaaagaagcccaagaaaggcccaagcagtcaccgcctgcttcgcactgagcctcccgactcagactctgagtccagctccgaagaggaagaggaattcggtgtggttggaaatcgctctcgctttgccaagggagactatttacgatgctgcaagatctgttatccgctctgtggttttgtcatccttgctgcctgtgttgtggcctgtgttggcttggtgtggatgcaggttg

SEQ ID NO: 55584 - DNA, 410 bp, Homo sapiens
acaaaaataccctttccttgagctctttactcttggggggcaagaggggcactatattatcctttttaccttcttcctcccagtcaacctctctctttttcacgtactctaccaacatccccacccaatctccccttatgcctccaaaattagtcctatcctgattgtggagtttggggttttctttgattcaatggatgataccagtcacaccatttgaaaaaagcatatgacagtgttgttcagtgttggtgaacaggaattcttgatatttatttttaaggattcgatttaattgctaattacagatctttgttaaattaagccgaccttcactcacatttaaaaaatttaactttgttttggttttcatgagacaaatatctctctttaagtgaacaagcttttaa

SEQ ID NO: 55585 - DNA, 322 bp, Homo sapiens; identical to SEQ ID NO: 40161

SEQ ID NO: 55586 - DNA, 401 bp, Homo sapiens
gcctacttacagggtggtcaatggctcgatagcatcttctggaagcttgttagaaatacaggttctttgactcttcagtcagaacatgcattttaataagatctccataggcttctatacactttacattttaagaagtactggtctgaatcacactgtccttgaagttgaagcaatcaattttctcccttaactgagttaaattattttcaaatagggaagtagaaacattctaaggcagtatttctcaatgggacttttgcatcagaaatacctaaagaacttctcacaatactaattcttgggcttctcttcacatctactaatctgtcttcagaagatataaaagctccacaggagattgtgattgatacctaggcaaagaagcacagataatacag

SEQ ID NO: 55587 - DNA, 283 bp, Homo sapiens
tgcaggatgaattttaagcacaattattagagaggacctagatattgagttttaaaaggagaaaatataagtacaaaagaagaatgaagattgttacaacaggggcaagtagaagttagaagaaaatgtgataaagtaaatctacattttagaatagtactggaagttattatcaggtgttacagacaagtttgagacttccgtaagtgacctaaagaaattatggacactgcaagactaaataatcattcatttaggaaggagcttaaatgcactttctcaa

SEQ ID NO: 55588 - DNA, 244 bp, Homo sapiens
gtcgacgcggccgcgatctccaaaagataaggactacatttaaaaacaagcacatgaccattatcactccaaggagaaatgaattacattttcttaatatggtcagttagtgttcagatttccaatagcctgaaatgtcatagtttttaaaataggttgaatcatgattcaaataacatccatatgttggaattggtgggtaggtcgtttaagtcttttaatgtttgccactctccctctcttc

SEQ ID NO: 55589 - DNA, 399 bp, Homo sapiens
cccacgcgtccgctttggacctgcggttgagctggcagcagaatggaggggtccgagaaacgggtgagtgtgaatcccttgcagaaatgctctctgggggtctgcccttgaatgttaggcggcatgacaagtcaaatgcagtccaccagggtcttcacctggaaattgactacttgtactttattctggaaacttagggcagagatttttgttagaaaacccagaatgagcatctcatactggacttaaatgcttaactgtgtattttattttgctatactgtatttgtacacagtcttctaagccatgaccgatctgccgtgtttcacttaagagagaattaaggaaaatcatccagaattcccactccaaaagcccaagctctgcagccctgcagtg

SEQ ID NO: 55590 - DNA, 389 bp, Homo sapiens
gcctgatggaaggggacaatggttggatcccagagaccgtggaggaatggaagcttctccttcatctcatacagagcaagagcacgaggccagccccccaggagtcactaaatgggagcctcagtgatgggccttcccccatcaatgtggagaatgtggcacttctgttagctaaggccatgggcccagatcgggcttggtcactgctacaggaatgtggtctggcccttgagttgtcagagaagtttaccagaacctgcgatatcctgaggattgctgagaaaaggcagagggccttgatacaaagcatgcttgaaaaatgcgatcggtttctctggtcccagcaggcctagtgggagaagattcagcaggatgtcatgacattttga

SEQ ID NO: 55591 - DNA, 95 bp, Homo sapiens
tgatccatacgatttcatctctgatctgacccctcagtgctcccagcttactggccccctacctaccaaattatccttaaaaactctgaactcca

SEQ ID NO: 55592 - DNA, 828 bp, Homo sapiens
cactgcttcctactaaaggacggacagagcatttgttcttcagccacatactttccttccactggccagcattctcctctattagactagaactgtggataaacctcagatgtgaatttcttcggagtaagaaatcctcagaggaaattacccagtatattcaaagctacaagggatttgttgacataacggtaatgtataacagcaatttttttctcaagtttttggattacctgtaagtgtctgactcagaagggcataggcattctttttatgtcatgggtttgatttctttcttcctttctcctttcattcccctggctcccatcttcaaagtgaaaaatatcacattcacttgctgacctagagcctttttctttttccagggctggcttctgacgggctctgcttgccttcctgatagtcttcccctttatgaatgaagccacttgccccagcttccctctgctgcccctatctgcaggcttgctaagatctcctgacctaggcgctgtcacccacagtgggctgcagagctggctcttcctagctggctaactatcctgaatcagtaaaaatttcctagtggagagtgatgggaaatcgaatccaaactggcttaaacaaaaatgagaatttattgattaacatgactcagagaccagaactctatagagaacatggcctgacagtgggggaagagaggtttttcctcaaaaaaaagaaacaggtgcagctttcccagaagaatcagttgctcaatatataataccctgatgaatttagttaccattctatgtctcttacttcctcattcgtcaagtaaca

SEQ ID NO: 55593 - DNA, 1447 bp, Homo sapiens
  misc_feature (1)...(1447): n = a,t,c or g
ttttttttttcatttttgtgcttgttttattggaagcaagactccagccagctgcagggctcaggggaggaggcctggagagttcagtcctgggtctccctctgggccagcagggggaaaaggggtgttaaaagagctagaaccctcagagatgctcctctgaagcaggggaaagaaaactagaaaggaaaactgtcccagggcggggagcggaatagggcccccacatctcagactctcctaccctcaagcagttaattctcaccccctgccttcctctgtcaacggtgggggtgattccaataactcttctcagcttccatacttcaggtgctcttcgtgaatgctgggtggctttaacccttgggggtcccaaacaagtttccagaatcccactgtccaccattctcccccaaagaaggtcccagaaaaggtgaagttccgtgtcttcacgcaacacgggcataagcagcaattatcgcacgaagtttccctagggtggtcggggatcctctcctgccactcctggggcccctctcttgtcgccttaaggtccatgctacctgtcttgaggagctgtgtccaggttgtgggctccggaggaccgaggagtgaaaggctggaggtacatctgaaggtggaggcgctggcggaagatcctgccggactaggtggcccacagtccggagtttcaggccgtctgatcctcgtccgcaacccctggctcgggttgcgatcgcttcgcggagccttctccagctgcgggttcccctaggctcctcttggacgctggcgcggctggcggggacgagggaccaggatggggattcgggggctggtagccggntgtcgcggatccagcgcgtccttggaaagtaggatggcgaggccgggcacgttcttaagtacgctgagactagcggccggcttcgccaggcgtctgaccctgcgtgggcccaggcgggagctctgccacaccntngtacgctccggtagccagccgcgtgacctggtgcanggcncccaggcggcgcttgaggatctcggcgcacgtgacggttttggtggtggcccggccgcagccgctgaagacgatggcgcgcgtnngctgntgccatgctggcggtggcgaaggccatcaggttccggatcttgctgccttccttgacccgcatgtgcacccgcccggcgccaggtctgcgaacggggccggagcccgggccgcctccctcggccccgcatccccgtggcgcctcttcggagcgcacttacggaagttctccatgcgccgtcgatcgcgggaccgccggtttgccatggggcggcctcagccccggggctgcatggccgccggtcgcgccttgcaagggccagcaggggtaagggcgccggagcagcgcagacgccggcgggcgggctgggacggcgngatctcggccccacttct

SEQ ID NO: 55594 - DNA, 1895 bp, Homo sapiens
  misc_feature (1)...(1895): n = a,t,c or g
tagaacttagtccagaggagttgcctgaggaggatgatgacttcccagaatctacaggagtaaagcgaattgtccaagccctgaatgccaatgtgtggtccaatgtagtgatgaagaatgataggaaccaaggctttagctttctcaactcattgactggaacaaaccatagcattgggtcagcagatccctgtcacccagagcaaccccatttgccagcagcagatagtactgaatccctctctgatcatcggggtggtgcatctaacacaacagatgcccaggttgatagcattgtgggatcccatgttagatctggatattcaagaattagccagtcttaccactggaggaggagatgtggagaattttgaaagactcttttcaaagttaaaggaaatgaaagacaaggctgcgacgcttcctcatgagcaaagaaaagtgcatgcagaaaaggtggccaaagcattctggatggcaatcgggggagacagagatgaaattgaaggcctttcatctgatgaagagcactgaattattcatactagggtttgaccaacaaagatgctagctgtctctgagatacctctctactcagcccagtcatattttgccaaaattgcccttatcatgttggctgcctgacttgtttatagggtccccttaattttagtttttagtaggaggttaaggagaaatcttttttttcctcagtatattgtaagagagtgaggaatacagtgatagtaatgagtgaggatttcttaaatatactttttttttgttctaggaatgagggtaggataaatctcagaggtctgtgtgatttactcaagttgaagacaacctccaggccattcctggtcaaccttttaagtagcatttccagcattcacacttgatactgcacatcaggagttgtgtcacctttcctgggtgatttgggttttctccattcaaggagcttgtagctctgagctatgatgcttttattgggaggaaaggaggcagctgcagaattgatgtgagctatgtggggccgaagtctcagcccgcagctaagtctctacctaagaaaatgcctctgggcatttcttttgaagtatagtgtctgagctcatgctagaaagaatcaaaaagccagtgtggatttttagactgtaataaatgaggcaaaggatttctattccagtgggaaggaaacctctctactgagttgtgggggatatgttgtatgttagagagaaccttaaggagtccttgtatgggccatggagacagtatgtgataacataccgtgattttcatgaagaaattcttctgtcttagagttctcccctgctgcttgagatgccagagctgtgttgttgcacacctgcaaaacaaggcacatttccccctttctctttaaagccaaagagagatcactgccaaagtgggagcactaaggggtgggtggggaagtgaaatgttaggcgatgaattcctgagcaccttgtttttcttccaaggttcgtagctcctctctgcccttccaagcctgtaacctcggaggactatcttttgttctttatcctttgtcttgtttgagtgggtcagccccagaggaactgataagcaaatggcaagtttttaaaggaagagtggaaagtactgcaaataaaaatccttatttgtttttgtagactttgtaatgcatatcattagccctcactgtgatcattactgctgtggctctgaactggcacatagtacagtggatggaaggtgcccgcacaccagctgagaactggttcctggcctaggtgggctctagaacatttacacagnatgaaagaaacaggttgggttaggagcagaaagaaataaggctcacacccccccagacactacct

SEQ ID NO: 55595 - DNA, 343 bp, Homo sapiens; identical to SEQ ID NO: 41798

SEQ ID NO: 55596 - DNA, 1009 bp, Homo sapiens
  misc_feature (1)...(1009): n = a,t,c or g
gcaaatatcaagagaccatggctggattaagctagataataattttgaggtcaattttgataaagatccaatggaaatgcgcctccctattcgtagccctattaaacgagactttttatcaggaattcagattgaatttaagcagtcttctcaccagagaagtttaagggccaggttgtactggcttcaggttgataatcagttaccaggtgcaatgttccctgttgtatttcatcctgttgcccctccaaaatctattgctttagattcagagcccaagcctttcattgatgtgagtgtcatcacaagatttaatgagtacagtaaagtcttacagttcaagtattttatggtcctcattcaggaaatggccttaaaaattgatcaagggtttctaggagctattattgcactgtttaccccaacaacagaccctgaagctgaaagaagacggacaaagttaatccaacaagatattgatgctctaaatgcagaattaatggagacttcaatgactgatatgtcaattcttagtttctttgaacatttccatatttctcctgngaagttgcatttgagtttggctttgggttccggaggtgaagaatcagacaaagaaaaacaggaaatgtttgcagttcattctgtcaacttgctgttgaaaagcataggtgctactctgactgatgtggatgaccttatattcaaacttgcttattatgaaattcgatatcagttctacaagagagatcagcttatatggagtgttgttaggcattacagtgaacagttcttgaaacagatgtatgtccttgtattggggttagatgtacttgggaaacccatttgggattaattagaggtctgtctgaaggagttgaagctttattctatggaacccttccagggtgctgttcaaggccctggaaggaatttgcagaggggttagtgattgggagtgaggaagcctctttgggacacacagtaggntggtnccagcagggagttg

SEQ ID NO: 55597 - DNA, 374 bp, Homo sapiens
  misc_feature (1)...(374): n = a,t,c or g
tctcgaggatccgaattcgcggccgcgtcgacctccatctcacagaaattgggggggttaagcatcaaacattggccataagtcactgggcacttcccaggcttcctccttgttgggtttggggtgtcaacaggatccaggcatttgatgccacaagtgtcaggacaacatctcttcttccctggacactgccagtcactctggcactcaggtttcttgtatctaaggcactgggcagatttcttaagaggacagactccagctttgaaggactttccagagccttccacagcccaaggtgccagagttcccagggcaagcagcaccaggaaggggaanangccgtggacttnatggtgaangcangacatggc

SEQ ID NO: 55598 - DNA, 324 bp, Homo sapiens; identical to SEQ ID NO: 42928

SEQ ID NO: 55599 - DNA, 406 bp, Homo sapiens
  misc_feature (1)...(406): n = a,t,c or g
cttcagttctccagtaaatgatattgcgttcgtgcctcagctttaagcacaagtagcagcagctcctgcttgagttctgagggcatcatggccctatgattaaccagagtgatctaacctagactaaannttttgaccntgaccactaactagtgattcttctcnaacattgagaaagacagnacccattgaaacagatatgtgttgagaaacntatatatntcaacnncannanttctnaantctatnagnctnnnnnaacanttgacantnnnnaaccaatctnnntnatnttnccatcgnctctnntanntannnntnanntncncctagnnanatnnntgnanntttacccancnctcnnantnnatatgagncttnnannncncnttnnctttannattaa

SEQ ID NO: 55600 - DNA, 2836 bp, Homo sapiens
cgacctgctgtagaaaaggcggcccacagccacctcagcatgcagaggaggcccagctgctgagaggagttgcctgagagtgacctttgcatctgcctgtccagccagcatggaaccaaagcggatcagagagggctaccttgtgaagaaggggagcgtgttcaatacgtggaaacccatgtgggttgtattgttagaagatggaattgaattctataagaagaaaagtgacaacagccccaaaggaatgatcccgctgaaagggagcactctgacttagcccttgtcaagactttggcaaaaggatgtttgtgtttaagatcactacgaccaaacagcaggaccacttcttccaggcagccttcctggaggagagagatgcctgggttcgggatatcaataaggccattaaatgcattgaaggaggccagaaatttgccaggaaatctaccaggaggtccattcgactgccagaaaccattgacttaggtgccttatatttgtccatgaaagacactgaaaaaggaataaaagaactgaatctagagaaggacaagaagatttttaatcactgcttcacaggtaactgcgtcattgattggctggtatccaaccagtctgttaggaatcgccaggaaggcctcatgattgcttcatcgctgctcaatgaggggtatctgcagcctgctggagacatgtccaagagtgcagtggatggaactgctgaaaaccctttcctggacaaccctgatgccttctactactttccagacagtgggttcttctgtgaagagaattccagtgatgatgatgtgattctgaaagaagaattcagaggggtcattatcaagcagggatgtttactgaagcaggggcatagaaggaaaaactggaaagtgaggaagttcatcttgagagaagaccctgcctacctgcactactatgaccctgctggggcagaagatcccctgggagcaattcacttgagaggctgtgtggtgacttcagtggagagcaactcaaatggcaggaagagtgaggaagagaacctttttgagatcatcacagcagatgaagtgcactatttcttgcaagcagccacccccaaggagcgcacagagtggatcaaagccatccagatggcctcccgaactgggaagtaaagagactcctgcattcctcctcccctcctgagggaagcccatggacaagctcagtccaggacctgtccacttctgtgacaaatcaacgggaaacagcccaggggtgggaagttttcatttgcaggggggtctgaatgtaactcaccatgtggtgtgcaaggttcccctgcattgtattgctcactgcagcccctctgcccctatccatgacccccaagcagatataacaagctgtgcagcctcagtaggctgcttgccctctcccagcctcagggcctcttctggaaaatgaagaaattcaactagtagattcctgaggtccccctagcttaaaaaaaaaaaaatctgccccatgattctaacactcgcagtagtgatagtgtatctagttgttctgctggtgtccttccttggctaagtcttggccttcagttatcttcaaatgtaccagaacctgagccaacgcctccctgtgaaactgttgctgatctgtagtacagtaccaggaagaaacctcttttgttctctttagacatcttctacttgctcttggccttgagatcgtgtaacaaaatgaaggagggctctcttctttcttcctcatcctactcaaaaacttcccgagagcagtggtggttttgagggttttgacttctattacttttgggcagcctgggaaagttgtgtcttctggggaaagagacccggggaggccagggagtagctgagggtcctttctggtgcccttaaaccgcccagagggagccctatttccactctggttttagggctgatctgaggaggggtctccctttgtttcctttctgggagcatttctctaacgttttatttacaattagggaggggggaccccacatctgtggagattctgttttcatttgaggtttacagaaaaaaaaaagtgggccagatgtgttccccccatgggtgagaggcctggggcaactgcctggtgaatgtgtcttgcggcagctgcagcaagtggaggggctgaactactggccagctcactggatgatgggttaatacaacaactgcactgtaaggactcagagccacacagaacttctgagaggggctgttagcattgcgcagcatcttcagttctccagtaaatgatattgcgttcgtgcctcagctttaagcacaagtagcagcagctcctgcttgagttctgagggcatcatggccctatgattaaccagagtgatctaacctagactaaaattgggaacttatttgcaatttttgaccctgaccactaactagtgattcttctccaaaattgagaaagacagcacccattgaaacagatatgtgtgtgaaagtatatttttcaattccagatttttaattttaaggctccaggaaagaaaggagagtagaacatttttcctcattttatcaaatcctctcttgccctccctcaattcccctgtaacattcctgaagctgttcccactcccagatggttttatcaatagcctagaggtaaagaactgtctttttctctgattctttaataaattatctttatagaatatgcacaagtttttctacactcagtgttaaagtatttattaatgggaagtcaacttaatgttttgaaataaatatatgactctgtttaatgcaaaaaaaaaaaaaaaaaa

SEQ ID NO: 55601 - DNA, 317 bp, Homo sapiens; identical to SEQ ID NO: 39480

SEQ ID NO: 55602 - DNA, 611 bp, Homo sapiens
  misc_feature (1)...(611): n = a,t,c or g
ttttttttttgaaatccaagaatggttttaatgtgttggccgagaaaaataaactgtaaagttctgtgaggtcttctaaaaatttacaagaaaaactgatgggcagttctaatcagacttggatgttatcttttcccccctttttaaaaatgacaacagatacagttccacaaaatacaatagaaactgtttttttatcttgactgccagagacgctcctttgcaatgccttccggtaaccaaatttttgggcacaacacacagctggccttcatttcttcaggggctggtaaacagaggcattggggtcaagtccagaggggctggtctccacaaatttggaagagtagtggggggaaacagggctcagggggctggtggcggcactgtatgttatgctgggcatgacggccatgacttcggctatcttctgttttaggtccttgatttcctgatctttctgaaggatttgtccttgggacaatctcgagctgccgctttgcatcgccccagtgcggagaacaggtccagcttgattcctcgtctctgacacttaagctgttctaccaggtgctgtgttttgtncttgcatggctgagagggnctgnact

SEQ ID NO: 55603 - DNA, 1803 bp, Homo sapiens
tttttttttttaaatacaattaacattccattttattcagttttgtcctctcaacttagaaggcaacaaatgaccacattaaaaagggagcatttcagaatatatatacataaaattggtctgggtaccctaaggtgtttgcgttgatagaaaattgacaccccaaactaagtgttctacttagcttctacaatagttattcctagaccttagattagtcattacatttttatttaaggtactatgttactttcatgactacaaaatgaggcactcgtacaaaacaggaatgaaaacatacatatactgtcttgtctttatgtcgtattaatgccaaagatattgtcagggattattttaaagaagcccttactcatgatggctatttttaaaaatggcacaggacagtaacaggctgaaaagaaaacacctggttgaggggacaaattaagtaaatacaagacagcttaaccaaggaagtcagcgaatctccacaaatgaggcttttaataatactttactggtaagacattttagttgggtttttttttgatggctgaataacatcctaaagaagtattttaaatataatcttttaattttacaatgtagaaaacttctcacagtaagtagagagcttagagtactcaaccctgaaaatgaaaataagtagctagcttggaaagttttaaaaagcgccagtgttcttatggcactacattctcctgcacgtgtgcgtgtgttcacgcacattcgcaaacgcaatacaatgtagaactgtccagtgtttgttttgttttaaaaagtcatcaattcaacctaaattcaagaattacactttaatagtggcattttgccaatacagaaatgacgtatcttggatcaaatcattttaaggaaagttattctatattacttgaataagggaaagaaaatacacaagacaagaatccacaataatagcagttacattaaatgttgaaataaaaattactttttgtttacatctggaattgagatggcccatcttcattgtttctccagagtactaagagggggaaaaaagtcacctaaaaacatgggaagttttttaaggctagctatacacaaacgtcacattggcatttttcttcagttttcatctcaactattagtactaaatagtttaaaaatcaaacataatttactaataatgaacaactgcacacttcatactatgaccgtttgataactggtcatgtaaaactatcaccaaatgctgatttgtcttctatatataaatagtaaaaataaaacaaaaaggtcttctttcctagttaaccttcttgaaggttgttttaacccaatataaaattaagcaaaataatagtataatttaaaaaaaaatttatgtgaagaagggcagcaatactaacattttctgaactatgggttttcaatatttaaaaggctcttggttaaatactaaaacccggatgctacccaagcaaatattatgctggaaaatgctttccctatgaaaatacttatctcattgaaaacaacacgataaagtacaattgaaaaactaggggagaattcttaagtaagacaatataaattacctgccagtaaaatggagggcaattttttggccattcatattgtttgtttacaaaacattgataagattcatttaaaattctgtaggattaagaatttttaaccttttgaagtatctgcctaggatctcttgctgttaaaacagatatgttccaatgactttataccaagatccacaaattctttggaaaaattaaaaaa

SEQ ID NO: 55604 - DNA, 403 bp, Homo sapiens
  misc_feature (1)...(403): n = a,t,c or g
gaaaagtgaggttccaggtggtctagtgagttatttatacaaggtcccagtagctgagcaagctctggaacccagtcatccccactgcctgtccagagtgtatttcaccaagctgctccctcattcggaaacactgacccatctttctctgagccttaaaatctctccatctgggcaaaacattcgagagaggcagcatctgcttggacctattgctggctggctggctgggtaactcagcaccatgtccttatttgtaccccaggggaggggatgagagtacgagctcccacttcacagagtggttagaaggatgagctacagaaacagacgtgaaatccttagaccagtgtctggcacagaagttggtaaatgttaggnattataagtctacaaagtgttt

SEQ ID NO: 55605 - DNA, 330 bp, Homo sapiens; identical to SEQ ID NO: 36680

SEQ ID NO: 55606 - DNA, 405 bp, Homo sapiens
  misc_feature (1)...(405): n = a,t,c or g
aatatcacccccagaggagttatattggtggtgatcacagctcctagcataatgagagttccatttggtattgtcacacgtctcctgcctcgcttgggttgccatgtttgagcgatggccctgttgatttcaccctgccttttactgaatctgtaaattgttgtgcaattgtggttatagtagactgtagcacattgccttttctaaactgctacatgtttataatcttcatttttaaagtatgtgtaatttttttaagtatgtattctattcatatggtctgcttgtcagtgagccagacttgcttactatattcctttataataatgctagccacttcctggattctttagtaatgtgctgtatgcaagaactttccagtagcagngaaggagggttgctctt

SEQ ID NO: 55607 - DNA, 342 bp, Homo sapiens
  misc_feature (1)...(342): n = a,t,c or g
gcaaagaagctatactggtattggacggaaagtgatcatgacagaggtggggtgagattgggttaataaattcaggcagaagtaggagagaagggaacagcatgaatcctggtgcagggtgcagagacagtgaaagctggccatgcaaggtcaacaaatccagagtcatcttgcttggctaaagtagaaagctgtagttttcaaccctcacatctgttcatttactatttttttttttcattccattcatttgactcattcatatattcaaaaactatttgctgagtacttaagttagtggatatgaggatncaganatgggcaagacttatccctgccttt

SEQ ID NO: 55608 - DNA, 340 bp, Homo sapiens; identical to SEQ ID NO: 43675

SEQ ID NO: 55609 - DNA, 512 bp, Homo sapiens
gctatgacatgattacgaatttaatacgactcactatagggaatttggccctcgaggccaagaattcggcacgagtggaagaattattagatcttttttttttatttccataatcattcacaaatgaacagctcacattaaataaatcacttgtatacttagtgaaaatagtagttatggccaggcgcggtggctcatgcctgtaatcccagcactttgggaggctgaggcgtgtggatcacgtggggtcagagttcgagaccagcctggccaacatggtgaaaccccgtctctactaaaaatacaaaaaattagacaggcatggtggtgtgcgcctgtttttccagctactcagaaggttgaagcaggagagttgcgtgaacccaggaagcggaggttgcagtgagccgagatcacgccactgcactctagtttgggcaatagagactccatttcaaaaagaaaaaagaagacagtagttatatttgattaataacttgaaatggatgaat

SEQ ID NO: 55610 - DNA, 390 bp, Homo sapiens
ctttgattaggagttttttaaatcatgaataagttctttctattttaggatagctagcctaaaatagaaagaacttattcatgatttattaatctacttttatatccgtagcactttgttttattattatagctttaggatgcttaatctctttctttttagaattatcttacctgcttaattttccagatgaattttagaattattctatcactttctgaacaaattgcattggagttttgattggagttgcataaatctataaatgaattggacagaatttctttaatttctcttcatacacaggaacatttattcagtatattctaatatttcacttttcattattaaaaaccagccctttccctgctctcccaaaaaaaaaaaaaa

SEQ ID NO: 55611 - DNA, 448 bp, Homo sapiens
gtttttgtcgaaatgtggcttcaacactattctctggagatgtaccaaaaaatgcagttcccctcatgccaagctggaggttctgcactaccgactcagtgtctccagcgccctctacagccccgcccaacccagcctccaggccctccacgcctaccaagagtcgttcacgcctactgaggagcatgtgttggtggtgcgcctgctgctgaagcacctgcacgcctttgccaacagcctgaagccagagcaggcctcaccctccgcccactcccacgccaccagccccctggaggagttcaaacgggctgctgtcccgaggttcgtccagcagaaactctacctcttcttgcagcattgctttggccactggcccctggacgcatcgttcagagctgtcctggagatgtggctgagctacctgcagccgtggcggtacgcgcctgac

SEQ ID NO: 55612 - DNA, 344 bp, Homo sapiens
  misc_feature (1)...(344): n = a,t,c or g
agccaccatgcctggctaattttgggcatttttagtagagatggggtttcaccatgttggccaggctagcctcgaactcctgacctcaagcgatctgcccaccttggcctcccaaagtgctgggattataggcatgagcacctggccacacttactgtattgattaaggttttctttattttattttttaaaattttacacacacacacacacatattttttttttctttaatttgaaacagggttttgctatgttgcccgtcgacgcggccgcgaattccagatctatgaatcgtanatactgaaaaaccccgcangttcacttcaactgtgcatcgtgcacc

SEQ ID NO: 55613 - DNA, 404 bp, Homo sapiens
gtctgtataataggtagctttatttctcactcgtatcatagcctaatgcaagccagacagctctaggtgggactccaagaagtgactttgccatgcctgaaggaggccaatataacttcaaagtttgcctcctgcttgtgggaaaatggaaagccaaggtttgttttaaggtttaaacagtgaaaggctttttcagtcagggattttgatttatttcacaatacaattacttcaaaaacttagatggcttcagacctctcattgccacacaaagtgctttctttgacaaagttctcaattgttctttatttctttgctttcctttccccatgcctttctcttgcacaagaaacagtggctacaccattactacaagctttgctaagagttgtttcatttaattg

SEQ ID NO: 55614 - DNA, 331 bp, Homo sapiens
gggagcctatttgaaattcagaatctcaggccccaccccttgcctgcagaatcagtatctgcattttaatgagatcccccagatgattcatatgcatatcttttgagaaatgctgctctggagaaggctcctgaacaatccagaagggtgattattgaagccgtaaaaaagatttgtatctgagagtttcacttttccgaatctagtctgtctctagccagttccatatattttcagttatgtttgctggaaagaggactggaactccaatttgtgtttgtttgtgtatttctagaaggcctgctaacatccacttgggaaaatctttcta

SEQ ID NO: 55615 - DNA, 2288 bp, Homo sapiens
aatcgaaagtagactcttttctgaagcatttcctgggatcagcctgaccacgctccatactgggagaggcttctgggtcaaaggaccagtctgcagagggatcctgtggctggaagcgaggaggctccacacggccgttgcagctaccgcagccaggatctgggcatccaggcacggccatgacccctccgaggctcttctgggtgtggctgctggttgcaggaacccaaggcgtgaacgatggtgacatgcggctggccgatgggggcgccaccaaccagggccgcgtggagatcttctacagaggccagtggggcactgtgtgtgacaacctgtgggacctgactgatgccagcgtcgtctgccgggccctgggcttcgagaacgccaccccaggctctggggcagagcttgccttcgggcaaggatcaggccccatcatgctggacgaggtccagttgcaacgggaaccgaggcctcactggccgactgcaagtccctgggctggctgaagagcaactgcaggcacgagagagacgctggtgtggtctgcaccaatgaaaccaggagcacccacaccctggacctctccagggagctctcggaggcccttggccagatctttgacagccagcggggctgcgacctgtccatcagcgtgaatgtgcagggcgaggacgccctgggcttctgtggccacacggtcatcctgactgccaacctggaggcccaggccctgtggaaggagccgggcagcaatgtcaccatgagtgtggatgctgagtgtgtgcccatggtcagggaccttctcaggtacttctactcccgaaggattgacatcaccctgtcgtcagtcaagtgcttccacaagctgggcctctgcctatgggggccagggcagctgcagggctactgcgcaagcctctttgccatcctcctcccccaggacccctcgttccagatgcccctggacctgtatgcctatgcagtggccacaggggacgccctgctggagaagctctgcctacagttcctggcctggaacttcgaggccttgacgcaggccgaggcctggcccagtgtccccacagacctgctccaactgctgctgcccaggagcgacctggcggtgcccagcgagctggccctactgaaggccgtggacacctggagctggggggagcgtgcctcccatgaggaggtggagggcttggtggagaagatccgcttccccatgatgctccctgaggagctctttgagctgcagttcaacctgtccctgtactggagccacgaggccctgttccagaagaagactctgcaggccctggaattccacactgtgcccttccagttgctggcccggtacaaaggcctgaacctcaccgaggatacctacaagccccggatttacacctcgcccacctggagtgcctttgtgacagacagttcctggagtgcacggaagtcacaactggtctatcagtccagacgggggcctttggtcaaatattcttctgattacttccaagccccctctgactacagatactacccctaccagtccttccagactccacaacaccccagcttcctcttccaggacaagagggtgtcctggtccctggtctacctccccaccatccagagctgctggaactacggcttctcctgctcctcggacgagctccctgtcctgggcctcaccaagtctggcggctcagatcgcaccattgcctacgaaaacaaagccctgatgctctgcgaagggctcttcgtggcagacgtcaccgatttcgagggctggaaggctgcgattcccagtgccctggacaccaacagctcgaagagcacctcctccttcccctgcccggcagggcacttcaacggcttccgcacggtcatccgccccttctacctgaccaactcctcaggtgtggactagacggcgtggcccaagggtggtgagaaccggagaaccccaggacgccctcactgcaggctcccctcctcggcttccttcctctctgcaatgaccttcaacaaccggccaccagatgtcgccctactcacctgagcgctcagcttcaagaaattactggaaggcttccactagggtccaccaggagttctcccaccacctcaccagtttccaggtggtaagcaccaggacgccctcgaggttgctctgggatccccccacagcccctggtcagtctgcccttgtcactggtctgaggtcattaaaattacattgaggttcctacaaaaaaaaaaaaaaaaaaaaa

SEQ ID NO: 55616 - DNA, 428 bp, Homo sapiens
atttcctttgctaccatactccatccagataaagaactgaatgttcctctgaaccttccaattaatttcctccattgtgatgaatcctccatagatttattggcaaaacattatttctaagtgttctccaccctactataaattgtctcaaaatagtttgtgtctaccaacaaggtagtatagactataaacttaataaatagtaattattgataattatgagataccaggatgctaatgaaactttattgcttgtattgagaaatgagagtataaattgagtataaaatgaaaagacttgaatgcttagtaaagcatataatgtagctaaagttattaaacagatatatgtatatgccaatttgaatgtctttttatcgttggtcaatgtatagaatacttattttttcctttttttagttgcacag

SEQ ID NO: 55617 - DNA, 682 bp, Homo sapiens
  misc_feature (1)...(682): n = a,t,c or g
caactttttatttattagcttgttggtcttcaacctctgtaagcctcagtttcctcacttatcaatcatctactgctgtatagagacaggtccatctcctagcatgcagggtgaggctaatgtgacatttgaaaactccagagtgctgctgacagtggttggaggtgaaggaggaggaaataaaagcaatgtgagaatagctttaaagaaaggaagggcaaaaagttgaaaagaaagaggcagtgtggagagatggagccaacagcagcatgggagtccctggctagggtcagggcttagatgacgacattgttggttgggttcacttgccctntgaactgcacagggaatcgagctggtcattagacatggcctggagccagtcactggaaaaggaaatcaatacccagactgattctcagaacagccaccatttgtatgattttaatccatagaatcattctgaaagcttcttaatcttcaccttttttctggacaggagacaggtggctgagctagccctggactggatcatatcttcacacttccttaagccacagaaaacttgaaccaggtggtgtggtcatactcctcaccaggcctcagcagcacaggagggaagcggggctgattgactgcatcaggccagttctgagtctccaggcgaaaaccgagttgtttg

SEQ ID NO: 55618 - DNA, 362 bp, Homo sapiens
acacagacccctggagtggctgggaggggactggagcctatttgaacagagggttccgcccacccagtcctggaggtgcagacacatgtcctgtgaataggcgatttcctgcttagttagctctgcatgagatgggaggttggatgctttcataattttccttgtttggaaaatcctgaagatgttgggtgagtggggaatacgagaatgggaatcaggattcgggaaccgcatctgtgagctggaatctagatggccactcagagcatcacagccgggcgctattagtcagtgacgaggatgctttttcctctccaccagcatcagatgcccagcaagtcctggtcagacatgaatgggcc

SEQ ID NO: 55619 - DNA, 370 bp, Homo sapiens
gcaacactctgacacccccgacatatcccctcgggagctgcctgggctgttccacaggaatctggccatcccaaagggcttgactgtcaccagaatcattggttgtagctattggttgacttcacagagttctccccactgccttgaactgtggtcccttgtagcttcattcttgataccccctcagcgcgtcaccactaactgtgacgtcgacctcctgctgggaaggagcacctgtgtgtatagttggggttcattctgtttctccttgtttcatgcagttactttaggagatgagaagtgtgctgccgtcattagtgtttggtccgttcttagtttttgaagaggcattcccattaatagaacatta

SEQ ID NO: 55620 - DNA, 334 bp, Homo sapiens
cctgtggcatcttgtaaacctaggcaaggaatagccactgagtcactttaatcacggcaaaagtgtaattcggtttccaaaattaggggaacactccagatatagcccggggaatagattgccaagaggctatggagaatgtcaagaaacaaggagtccattatggctggagcagagtgtttgctttcatctcctttttattttctaagactttctaagcatgctgtggtctgcaagaataaaattgctttattaaaaactttcatttatttgcttcctttttctatgtagttaaaagtctactggtgggccagccatggtggctcacacctgg

SEQ ID NO: 55621 - DNA, 391 bp, Homo sapiens
gggaaaacgctaaaaatcccacctgttactccatccatcctggattgctgcattatcagagtggactattccttagctgtatacattcacattcctggtgctaaaaaattgatgctcgaactgccattagtgatcggtacaattccatataatggttttggcagcagaaactccagcattgccagccagttcagtatggatatgagctggttgacactgaccctgccagagcagcctgaagcaccaccaaattatgcagatgtggtaccagaggaagaattctctagacacattcctccttaccctcaaccccctaactgtgagggagaagtgtgctgtcctgtgtttgcctgtatacaagaattccggtttcaacccccacctctttatt

SEQ ID NO: 55622 - DNA, 1195 bp, Homo sapiens; identical to SEQ ID NO: 12895

SEQ ID NO: 55623 - DNA, 971 bp, Homo sapiens
  misc_feature (1)...(971): n = a,t,c or g
tttcaccagcaattctctttaatcctctttcttttccttctaaaagcttttgcaaagtccaatttatttttacagtaaatagattatcttttaagaaaacgcactagcaagattgtagcaaagtgtgtttatgcaaacaggtggtgcagagacagaggggcggaccttgtgggcagctggaggaccatcccagctcatgggccacgcacagatgggagcacctcagtgttttcagccaagagaacacaagtctcgggatccatgtggctccctcaggccctggacccaggcaggcaggacacccttgaccatggggcaggggacatcccagcatcttgtctgtacccccaccacctgcgtggcacctggtcctcagacacctgcgtggcacctggccctcaggcacctgcgtggcagctccacgggccaggcccactggtccagttgctcctgccctggagttggggccgtggggagggaaagcgcagtaatagctgagtgttcagaggaggggctgggctgcaggcattgctggttcagattggtgctctccacctggctgagtgaggcggcaggaagcagcggccggaagattcctagagcttagcagagaaggatgcgaaatccggcagccctttgacaccgtttgggaacgtcaaccatgccccgccatcggccaccagcacggcccccgtcacgtaggaagccagagggctggccaggtagagcacgctgtgggcgatctcggtcttgttccccagcctctgcagcgggctggcagtgaccttggtgctcaggctggcctgagggccacctggagggcagcagaaggctcaggccccgtgagccccaagacccagcaccctcccctctccctcgtgccgaattcttggcctcgagggccaaattccctatagtgagtcgtattaaattcgtaatcatgtcaaacgggtnttcaaanggnnntncaa

SEQ ID NO: 55624 - DNA, 366 bp, Homo sapiens
taagaccgaggggtgggaatgatgcctgccaactgaaatgccattaattccaggtgatcttcctggacttgaatgtaatttagcactgttagaattcagaacatgtatgctagttgttcctgctgagaataaggttcatttgctcagtggtatgcatttatatggcacagaaaacaattagtctttcagaatttttagaagattacagtctgtaaattgactcatcaaaatcatcaatgactagcatataaagatctatccagagaaatgaatttgagacttatttgaccataagtcatacagaagacagcacagtaatttcccataggagaatctggtatttcatcttggggatcactggtaaat

SEQ ID NO: 55625 - DNA, 1294 bp, Homo sapiens
ttttttttaaattttagaatattttaatgtccatttcttcagtgaatgcattttgaaattattagaattaacaatttaaaaagagcagataaaaggatatatggaaaatgcaaacagtcggttcttgctaattcaatttcagattctaggcatgatgtgattttccaaacaaccaattaaaaaaaactccttacctcgaaaatctaggaaattcaaatgcagacgtgtctttgggaaactacaaatgattacagccccatgtgacaggaagcacgcggcccttcggtcctccggatcgtgtgcaaatgtgcagggggagcccccgcgggtgacgtcagtgtgggatgaagtcacgggtgtgggcagagctgttggggctctccaagctattcgagggttttgtaactgatgctctacatttgtttgcattgggataaaattgtgtgtgcctggtttaccatatatatatatatatatatatatggtatataattcgatctgagctgggactgagaagaaaatagcaattgcaactcaaagcaactatttacacacattcaatgctgaagtattgcttcctgccctaagttcctaagaggtattgccaccctgaagcacgaccccatgccgtcagcagccctcgtgccagctgcttagaaactcgtgtctccagcacgatgtgctcgctgccaacagacaagagatgcacggcgtttccgctgcagagattctgtggttctgcactgaggtatgcatcggagcaggggacggggaggaccccgaggggcttcgtggcccagagagaacgtctgcactggcctgtttaggaaggctcagggtgtttgaaagacaacgtttaagctctgggtgagtctgcacggggctgaaccagactccactttgcagctccttggtttcccggggtgaggaatcacaaacacctttgtggttggggaaggaaatgggcttgatggggaagaagtgtgtgcggagaactttgcggagcatgttctgagcgagacagcaaggtcgtgagcaaacgcccagcccctcaaagctacacagcctggaggggaaaggggaggggaggacattcaaatatacaccttaatactgatgcagaaagagcttcatgtgaccacaatccccacgaacaaggaaagcatcaggtagtgttttttaaggaaaaaaaaaaatctgcggtgttttataatacattctttagaagcaagaggtattgtcacaaccaccctttcttcggtattggaagaccagcaaactgacagtcacaccc

SEQ ID NO: 55626 - DNA, 399 bp, Homo sapiens
ctttgtatacgcaccatgataaatgccttgatgcacaatgtcatttaatctccccaaaaacactgacatttccattttaccaatgagaaaactgagcttataaatattagggaatttgacagatgtcatacaactaatcataacagagttagatggtgagtatgatacctttaaataaactgtatacctttctggttcaaagatacagttttggaacaacagcgaggaactacaggttagcacaaaaatcattcagagactacttaagtctccaaactaggatttaacaaatacagttggctatagaataattgtctaattaccaaaatgcacattagtgtagaaacataataaaaaggagaagtgtaaacatggactttttttagtaccattcattac

SEQ ID NO: 55627 - DNA, 473 bp, Homo sapiens; identical to SEQ ID NO: 26819
  misc_feature (1)...(473): n = a,t,c or g

SEQ ID NO: 55628 - DNA, 453 bp, Homo sapiens
  misc_feature (1)...(453): n = a,t,c or g
ctgctttggaggggatgtcctgagcttccaggccagcccaggaaggagcctcccaggccacggggcgggtccccagccctcatgtccccccagggggcctggctgtagccctcatccccatggccctggctggggaggtagagactgccacatcttggagcccaccccttgagtcctggtagctccaggcttacccggctcctgcccctgcccaggctgcaactgcgagtccgacttcacggatggcacctgcgaggacctgacgggtcgatgctactgccggcccaacttctctggggagcggtgtgacgtgtgtgccgagggcttcacgggcttcccaagctgctaccgtgagcacctgcaggggcatccaaacagacaccactgctgctggactccgggagccctgcanggggtggaggggttcccgggatggaccgtgttatctgcctg

SEQ ID NO: 55629 - DNA, 1807 bp, Homo sapiens
  misc_feature (1)...(1807): n = a,t,c or g
actttgttggaccctcgtcaatctctttcgaagccattcagtcctcaatctccttttccttggctacccgtttggtgtttatgttcctctttgctgttttcatcaagatagtagagcacatcttcttctcacagactacaactatgtggttcagcacgaggcagtagaggaaagtgcctcgactgtgggaggcttggccaaatccaaagactttctctccttgttgctggagtcgctaaaagaacagtttaataatgccacacccatccccacccacagttgtcccctatctccagacctcattcgcaatgaagtagaatgtctgaaagcagatttcaaccacagaatcaaggaggttctcttcaactccctcttcagtgcctactatgttgcatttctccccctgtgttttgtgaagagtacccagtactatgacatgcgctggtcatgtgagcacctcattatggtgtggaaccaagcctttggnccagctcaccacgcaactgttgccatccaaatactgtgatttgctacataaatcagctgctcacctgggcaagtggccagaagttggaacatgggtcctacagcaatgctccacagcacatttggtcagaaaataccaatatggcctcaaggggtgctggtgcggcacagccagatgtttatatagagccatggggcccttacaacgtggcagtgccttcagatgtatctcatgcccgcttttatttcttatttcatcgaccattaaggctgttaaatctgctcatccttattgagggcagtgtcgtcttctatcagctctattccttgctgcggtcggagaagtggaaccacacactttccatggctctcatcctcttctgcaactactatgttttatttaaacttctccgggacagaatagtattaggcagggcatactcctacccactcaacagttatgaactcaaggcaaactaagctgcctctcaacaatgagggagaactcagataaaaatattttcatacgttctatttttttcttgtgatttttataaatatttaagatattttatattttgtatactattatgttttgaaagtcgggaagagtaagggatattaaatgtatccgtaaacaaggtgatgtgatctttcatgtgttagtatattcgaataatatacatatgagaggtatgcctgtccagtaaagagattgatttgtttgtatggctctggaataactcattcgtttatgaacacatctcatgtattacttgacacagtacctttggtatgtctgcttttctttcaatcctcattatctttagccctcagctggccagtacttattgctaaagaaagggagatcaatggagttgcctaccagcacccattctcttttagttcagctggctaatagtattggaatacattgggaaaagagtgggttaaagtcctaggtggggttctctttgttgcctaccaggagaaagcagtaggcttcctttctaagatacggactcagctggtctattttaccctgtgacatttaaatatacttttgaataagctactatcctgaggctgagggttttgctgccacttttcctgtgtttccacttctgcttccaaagattttcctcttagttgtttgaaataatactttgccagacaggaagtctttagactggcccacattccatggaaggaggatggatgtggcgggctgggatcagtaggggaggaaggctggaggtgcccaantgccntgtgggngcttaggagtttggggggagggttttgaaaanttcccaagtta

SEQ ID NO: 55630 - DNA, 426 bp, Homo sapiens
cggacgcgtggggtttagttctttttgtagatcatattaaaattgcaaacaaaatcatctttaatgggccagcattctcatggggtagagcagaatattcatttagcctgaaagctgcagttactataggttgctgtcagactatacccatggtgcctctgggcttgacaggtcaaaatggtccccatcagcctggagcagccctccagacctgggtggaattccagggttgagagactcccctgagccagaggccactaggtattcttgctcccagaggctgaagtcaccctgggaatcacagtggtctacctgcattcataattccaggatctgtgaagagcacatatgtgtcagggcacaattccctctcataaaaaccacacagcctggaaattggcctggcccttcaagatagccttcttt

SEQ ID NO: 55631 - DNA, 272 bp, Homo sapiens
gaacgatctagtaaaacatatgaacgtttgcagaaaaaattgaaggatcgccaaggaacacagaaagataaaatgagcagtccaccatcatcaccccagaaatgcccttctcccattaatgaacataatggacttataaaaggacaaattgctggtggtataaacacaggatcagcaaaaatcaagtctgggaaggggaaaggtggtacacaagttgatacagaaattgaagaaaaagatgaagaaactaaagcatttgaagcacttctttc

SEQ ID NO: 55632 - DNA, 620 bp, Homo sapiens
  misc_feature (1)...(620): n = a,t,c or g
gctggaggagttcctcagcgtccgcaccctctacttcatcgcctatctcgccttcggcctggggaccgggcttgccaccctctccagggaacctctacgtggtcctgtcgctctgcataacctacgggattttattttccaccctgtgcaccttgccttactcgctgctctgcgattactatcagagtaagaagtttgcagggtccagtgcggacggcacccggcggggcatgggcgtggacatctctctgctgagctgccagtacttcctggctcagattctggtctccctggtcctggggcccctgacctcggccgtgggcagtgccaacggggtgatgtacttctccagcctcgtgtccttcctgggctgcctgtactcctccctgtttgtcatttatgaaattcctcccagcgacgctgcagacgaggagcaccggcccctcctgctgaacgtctgacatcgcggagcctcgactccggacacgcgcctgcacctgggggtctggagcaggccgaccagtgaggaccaaagggccttgttggacagggggacaggctgcctactgnnntgtaaatatgtgataaaataataaatgaccagcgaaagccaaaaaaaa

SEQ ID NO: 55633 - DNA, 384 bp, Homo sapiens; identical to SEQ ID NO: 22024

SEQ ID NO: 55634 - DNA, 355 bp, Homo sapiens
gcatggctgtatttcttcaaagtgaaaatgaaattaattgagaaatattatttgatatattaaccttttacatacaagttttcaaaggtacagaaaaggcagaaactgaacatttggattatccctaatagagagaagttggttaaatgttttcttgctcccttaaatattgtgaaggtaaagattgaatgtcttggctgggtgtgctgattcacacctgtaatcccaacactttggaagctaaggcaggaggatcacttgagcctaggagttagagaccagcctgagcaacatatagagaccccactctcaaaatatttttaaaaacgaaaacaaaggtgtgcctgtcttgttt

SEQ ID NO: 55635 - DNA, 383 bp, Homo sapiens
cagaggggaaccgccgggtgacacctgcgtggaggctgagctgagaaagggcctccgcttagagctgcgggtgaggacgtccttttctaagcgacacagtcttcctcggtctgagagaaaagcagcccactcttgtgttctcaggcaggggatctccaaatgcaaaaggaagcttgtagaggttttttgggtgagaagaaaaatgtagctaaggtaatggttcatatcatacaaacagctcccacgatcctgaaattctgttaacgaatccttctctttggacatcttcccaagaaacttagccctgagtcctaggaggagcacctctgcaccagcacggacctctcgctccacccagctctgtgcccaaggcccctgatctt

SEQ ID NO: 55636 - DNA, 379 bp, Homo sapiens
gcgagacaataaacagaatttctaatatgcaaaagtcccatggaaacagttaagcagggtaccacataacagagtggctacagaggaagagcttccagacaaaatgcaggacacccaattaaactgactttcagagaaacaatgaataatattagtatatgtatgtcccaaatattgcatgggacatacttatactaaaatactattatttatctgaaatttaaatttaactgggtgtcatgtttttgtttgctaaatctggcagccccatatggagaggtttttggttttttacattatgtgtacagggagagtctctctgagaagataaaattttgagttaagacttaatgaggacagagaaccagctattgacgga

SEQ ID NO: 55637 - DNA, 355 bp, Homo sapiens
ggagactgcatagggctcggcgtggtggcgggcggtctatagtctcagctacttgggaggctgaggcaggagaactggcgtgaatccaggaggtggagcttgcagtgagccaagatcacgccactgcactccagcctgggcgacagagctctcaaataaaaaaaaatatatatttagggatgacgacagggcatcatgttagcaacttagtcaaatggttcaggaaaaaaaatgttcaaacttttccatatgtcagtcattgtttcaaaaattaaaatttaatttaaaaatatctatagcagtgctgaaaacctgggaggggtatacctacagataagaacagaacggaatttat

SEQ ID NO: 55638 - DNA, 724 bp, Homo sapiens
ttttttttcatttttaatgctttattcattgattaaaagaatatacatttaacataaaccatacaacatcagtcatcaggtcaaacattcagctggtttccttacagtttctgtcaggagttattttatctgatcacatttataagataaaatctcaccacatctggcatttacacacactgtgccagtggattcacactactgatgtacatataaaatccgcatggtatgtgctcactggagacaaaacagtgcacacctgtcaaaaggtcattttaatataagatggtaaaaccatttgtaaaacacatataaacttttttccataaatagaatcatatctggacatctgttgcataaattgtgtttccaaagcttacaatagagcagccaggtctcagcactgctggggcacccagggttggctacttactttattattgcagactggtccctttaacattaaatggcacaacattcgtaccacttaaaactggggtcaggtggaagtctcacagagaccacgtctgtaccgcggttgccctgaaacaggttaataggcttttaaagcctctcagatataaccaagggttttaaaacatacttcatggaatgttcttcatgtatcatagcagctcatacctgtgatagaacaagctttcagtttttcctttctttcctttacattcactattcacagtgaaacaggtgcatgttttttttt

SEQ ID NO: 55639 - DNA, 845 bp, Homo sapiens
ctcgaggccacgaaggccgccaggtccggtgttggggtgtccgagttgccgccggagaggagtggcctcgcccgcttgagttttgattcatcatggataatctgtcatcagaagaaattcaacagagagctcaccagattactgatgagtctctggaaagtacgaggagaatcctgggtttagccattgagtctcaggatgcaggaatcaagaccatcactatgctggatgaacaaaaggaacaactaaaccgcatagaagaaggcttggaccaaataaataaggacatgagagagacagagaagactttaacagaactcaacaaatgctgtggcctttgtgtctgcccatgtaatagaacaaagaactttgagtctggcaaggcttataagacaacatggggagatggtggagaaaactcaccttgcaatgtagtatctaaacagccaggcccggtgacaaatggtcagcttcagcaaccaacaacaggagcagccagtggtggatacattaaacgcataactaatgatgccagagaagatgaaatggaagagaacctgactcaagtgggcagtatcctgggaaatctaaaagacatggccctgaacataggcaatgagattgatgctcaaaatccacaaataaaacgaatcacagacaaggctgacaccaacagagatcgtattgatattgccaatgccagagcaaagaaactcattgacagctaaagctactgctgttcttctttatcatttattcacttccgtagctcctccttgaaagttattaccttttcagagtttaagttttcggttccacgctcttctaattgggagataatatgg

SEQ ID NO: 55640 - DNA, 434 bp, Homo sapiens
ctacgggtgacacacctgtaccaactgaagcagcacaatattctggcatctgttggagaagatgaagagggcatcaaccccttggttaagatctggaacctggagaagagagatggtggcaatccactctgcactcgaatcttccctgctattccaggaacagagccaactgttgtatcttgtttgactgtccatgaaaatctcaactttatggccattggtttcacagatggcagtgttacattgaacaaaggagacatcacccgggaccggcatagcaagacccagattttgcacaagggcaactatcctgtaactggattggcctttcgccaagcaggaaagaccactcacttgtttgttgtgacaacagagaacgtccagtcctatatagtttctggaaaagactaccctcgcgtggagttggacaccca

SEQ ID NO: 55641 - DNA, 301 bp, Homo sapiens
ggcaaaacaaaatcaatagagcttcccttaaacattttttgttggtggccagtatagtattctatttaaaaattaagttttacagtctgtaaaatatacaggacaatgacttttttaaaatgtaagttaatacctcctcctcacttgtcttaattgaacttaggtgtttattcttaaaggtggaccttgatgaaaatgttgagatgggaagtgttattaggcaaaacttgttatagatttctcatataacccttaattgacccttagaattttaacaaccggccgggcgcagtggctcaca

SEQ ID NO: 55642 - DNA, 412 bp, Homo sapiens
  misc_feature (1)...(412): n = a,t,c or g
gtttggggacagaggatataggcatcacatcaatgtaagtagattaatttttagcgtattcaatgtataatgtatttttaaaacaaaaccactaaaggtgctccttgtgaagaaaaggacaaatcccctatgtctgacaatggaatgctaagtataatattgcaagtctaggctcgtgctaaagttagaatatcagagctaaaaatagaaatgttacactcctttttccacctcaaactcactttgaaagttgggcttcttggttttaaacttccttttttttttctgngttatgctcttcaaaaaaaaaagggaaancatacntttttananataaaatncangggcnatnaanttcccccncctaagggancccantaatgggttttnagtannttcccanngnngggcg

SEQ ID NO: 55643 - DNA, 335 bp, Homo sapiens
gtaaacaaatagttgcttctatgggttaaatgttatgacagatgtaatgtgtccagtgatgtactggttcaaagagcaggaaactgcttaggtaagtcaggaaagaattcatagagaaggtaacattggacagcattatattgtgttttgaatgtttcaaagacagaggtgttatatttatgtccattttacaagagaaattttaaaaagctggataactttataaaaatcaagagtactttgcaaatgtatcagctgtgtaaataggtaattcagattacctgggaatatagctaaacaattgtaaacagaatggatactggctgggtacagtg

SEQ ID NO: 55644 - DNA, 242 bp, Homo sapiens
taagacatttaacaatatataacaaaagttacatgaatgaggtatctctctgaaaatatcttattggactgtaccgcaggtaactgaaactgcggatagtgacgccatggatgggggtggctacagtactcggaagcatggtgtagcctgctgaatgcacacagcccatcccaaagtgcactgagaagtatagctttgttacagaaacaatggatggtggttcaaaattaactttcattgtg

SEQ ID NO: 55645 - DNA, 391 bp, Homo sapiens
ggcaaatcagattttctgtggggaccctcaaatgcaactgaagaaatagattgttgcattcattcctccccaccccccatttgtaggcagtaaacaaagtatgactgacagattgaacacctgcaaaactgctagcgtaatctcagcacatacgcagctaggaagtttgtcataaaatcaacttagaaatgagatgaggctgttcagtttgtcttaaaaaaatcagattaggtaaaagctgtcctaccaaagagtctagcaaaacaatatagtatttttttgcagaggcatgaaaaattaagacgctttagagtacttgaaagttgtgtagtcattttatttgcaaaatgaggtgactgtggcaaattatagaacacagagtattattact

SEQ ID NO: 55646 - DNA, 445 bp, Homo sapiens
  misc_feature (1)...(445): n = a,t,c or g
tgctgggttcaagccattctccatgccgcagcctcccatgtagcttcttaagatgtgaagatttttaaattaagatgactcttgggatgaaccatcttgtgttggttaaagacttttactgacacatttttaataatctttttaacttttattttcaggtcaatggcacatgcgtaggtttgttatgtaggtaaactagtgtcacagggatttgttgtgcagattatttcaccacccagctattaagcctagtacccattaattgtttttccctgatcttctgcttccntcccacccannnnnnnnnnnnnnnnnnnnnnnnnnnnnnnnnnnnnnnnnnnnnnnnnnnnnnnnnnnnnnnnnnnnnnnnnnnnnnnnnnnnnnnnnnnnnnnnnnnnngntttcngttccngcattagtttgttaagggntaaagacctccatc

SEQ ID NO: 55647 - DNA, 345 bp, Homo sapiens
caccgggttggttttgatctgataaatgcgtgacttcttgtttaggtctctgggccaggaaattcatactgttacatggataaggttgggattggggagagggaacagttgggactagaagcaaaagtgattctgggactaaaataggaagcagatgtcctttcccaatgtgtgttgctgtcttcacctgaatgcatttgtgtaaaaatagcggagggacaatgtgaacatttgtatttggaagctatgaatttactctgaagtttgcagttgtttccaatttgtgagctctaagagtttctgcctgtaagaactactctccttttattttgatttttaaaaacc

SEQ ID NO: 55648 - DNA, 1179 bp, Homo sapiens
  misc_feature (1)...(1179): n = a,t,c or g
ttttttttttttttttttatattaaagtgatcttttattaaactatttactgcttagtctaaattcaggtagagcagtcaaagaaagttatccatcaactttgttgaattcatatctttcattttagaataacagcagactttaagcatgtattatttttccagtgttcagcttagtctaagactgtgtgagtctggtttgatccattgccgtgaagaatacacagacagcagctgtaatgagcaggtgcattccctcgtagagaagttttggagaaaatacactccatataaataaatgataacgcagagatgtcaccaaaacgatgtacgtgaaaactggaatagaacaaatcagtgcgtagccagaagcaagcatgactcagtgctgaaccactgcgtgtttctgagctcaggaagtgcactaagtggctggcccacagcacaggccctgcgtacgtcccaaacgctgtcaggagcacggctgggatttccacgtaggtgtctaagcccacgaagcctgcggagatgtccacggtggcaatgttgttggagttgccctgaaaatagaagaatgcttgaccaaaccaataatgcatcacagtaatctcagctgcatcgtgtctcaggggcttccagatgaatttagtcattagagtctgaatcaagaggctaaatgctaagaccggaagattatgtggtctaaagagcaaggctgccagaagaactaatccactatatatctcccataaacctacagtcttgagtttgaagtctgcagcaatgacttgagatttaagtaagtctttgttcccgtgacagaatccaagacaaagacataacaaacgagcttcaataatacccttggaaatgtccttgctgtccggccgccacgggaaccggacactcccgatggccgcccggtagcagtagacgcccagcaccccaggccagggcagccttggacacaggggagcaccccctctgcaccagcacaaaaactacgaggagggagagggcagccaggacagagagctcggctttgtggtcagagctgccctctccctcctcgtagtttttgtctggtcagaggggtgctcccctgtgtccaaggctgccctggcgctggggctgctgggcatctactngctaccggggcggccatcgggagtgtccggtt

SEQ ID NO: 55649 - DNA, 327 bp, Homo sapiens
tcctgatcttgtgatccacctgcctaggcctcccaaagtgctgatattacaggcgtgagccaccgcacccagcggctgatatagtttttaaaacattaactaaacacacacccatgtccctctccctggggctggggcagcatcactaatgccctgcccagacttgagtgtcccctccccatccatggtcatgactcaccggcttgtcttcatggctttagcacataaggacctgcccctgaacagttattttgttgtgtattaattattctataacctgagtcacactgtatgactcttctgtgatttgttttgtaaaaaaatctg

SEQ ID NO: 55650 - DNA, 633 bp, Homo sapiens
  misc_feature (1)...(633): n = a,t,c or g
gaagaagctagtcaaaaggaaatagaagaatgggaaagaaaacttctagctcaagcagctccaacttgtatggagaccatgtgggaaattccagctattgggcatttcctttgtttaggctcaggcaaattctaaatttgccagaaatagtcttttacgaattggaacgttgtcttctgatgcctcagtgtaatgcttttctatcgaaaataatgacttctctattaagtcctccccatcgcagacctaccttacatcgaagacctactttgccttataggacctgggaagcagcgctgaggcagaaagtacaacagtggtacactgctgtagggcaaactgaaaatcctgataactgtgctgaaaaactggggttgtgtcctcagttttttaaagttcttggagaagttaatccattgggaaggaaaaaccttttcacggaactacctttttaccaaaaagtgtgggctactttaaggggtctttgtggactttgtgtatggaaacacaaaagggaagttccaagatgctgttacttgggacagcctatcccatggaatgcaggggaagttattcttggggttatggattatttgggagaatngcttatggtaccattttccacagttctgg

SEQ ID NO: 55651 - DNA, 285 bp, Homo sapiens
ttcactaaaagtttgcatccagctgtgtaggtagtgtttgtttcttgttaactttttttttcggtaaaagaatactttaaaacttttcaatctcaaatgactgtaacttgctgacaggtgttaacagaagaagtagatctttttgttttttgcttatgacctgtattttaatatttgagcttatagattagagattgtgagagaaatctgtttatagtcttattttcccttgtgtattttttcttcctagtacatgggaaaaagaggatgcagttgaatatctta

SEQ ID NO: 55652 - DNA, 963 bp, Homo sapiens
  misc_feature (1)...(963): n = a,t,c or g
ggagacaggtcagcatccagggtccttgaagggaccatgtccttaagaagaggtaggatgcctccaatgcagtggtccactgcacggtgtggctgagactgctacagaggacacatgggaagacctgccagggttgggggtgggggaggagcaagggcgtcatcctggaagtcacccccaaatagggccaagaaagatcagagagacagcaaagctctaataccaccctctgcaaaccccacctatggcgacctctcacctcctgtctcctattctcaaactggcctatgcctaagggccaacccagagacacttccacactggtccctgtcacacgagacacgctggaagatgggaatggccaacctccagacacacacacatccaggctcctatccccagagtgcgtgttctcatcctactgcatctcggaggctggcagggtgaatcccccagcaggtcaggtaggtctgaggtgtctcagcctgaactcatgactccaaaccaccttcacgccttcgtcccaacccagaaggangagatccagggaggagggcacacatcgggctgcaggccaacacactgaccctgagcctggccttcccancatcangctgangancangaaggttgaaatgaaccccattangnatgngggaaagctctgggacatgggatgatgccactgctgggatgcnnaaaaagttggangcnngggacanaancnattcaaaanaatttggccntaatccaaanctgggngttgnggnttangcctntaatcccaanactttgggaagccccaaccnnatggntcacttgaggncnggaantcaanaccancctggncaanatgcnnnaaacccnnnntttacnaaaaatttaaaanttncccgnttgnggnancccangccngnantcccaantncttggnaagctnannnngnannntnnnntnaaccc

SEQ ID NO: 55653 - DNA, 446 bp, Homo sapiens
cggacgcgtgggctcttcccttatttatgaatcacactctaataaaactggcttatattggtgcatattaaactatgttggcacttaattgatttgattcttacaatagctcttggagtaggcaggacagatgtaattatagataaagaaattaaggctcagaaaggtcataagtcaccaaaataggaaaacaagggagccaaaatgaaaccctagatatagactcttttccaattatcctagtgttactgatgacggattaattgatctgaagtatagcacttttgtagagctcagcattggctccattcccagcctgctgctagctgtattgcaagagccagcatgccaaaggaaaaatgatgcaaggcatcgaaaatcagaatactgacagcttatgcacatccatccttcccctctgctttcccatacagagcgccaggctt

SEQ ID NO: 55654 - DNA, 294 bp, Homo sapiens
acgacttttacttcctctagatagtcaagttcgacctgcccttctccacagctgttagaagcaaatgcagtattcacagacaagctggcaggacctctcaaatacatatggatctacaacaactgtgggggagatgcatgagaatcagtatcagaagaactaatcctgtagcaatgacagcaaatacagaaaaaactttaaaaaggttcaatagtacactatattcagagaaagactcaactatagatcttggacgtaaaaattttatttatttattattattattttttttga

SEQ ID NO: 55655 - DNA, 479 bp, Homo sapiens
aaagagtggcaagcagagcacttgaaaccacacataatttacaccttcaacagaactttgagacagaatattatgaactccaaattacttgtaactaacagagatatctgtggagctcatatcctaaccttgtatggtgttgagagcgggtacgttctgatgagactgtataaaaaaagaagaaaatgaagaataggaactaagaattgatggagcaaagagaaaatcaccaacagaaagagagtcatactcttaagtgcaacattactgaaaataagtccaggatgtggtatgtcagactactggctacagggaaggtacttgaaagtatgcccaacgtttgtagtctctgaaaatcagtttcttgggagtagtaaaagaagaggagaggagaggcactcttcagagactatggaataaacagaaagaagaaagtaagagggagaattttaagggtcctgcagaagtaaaagaaatgt

SEQ ID NO: 55656 - DNA, 750 bp, Homo sapiens
ggactacaggcacgtgccgccaggcccagctaatttttgtgttttgttagagatgaggttttgccatgttgcccaggctcgtcttgaacaccggggctcgaggaatctgcccatcttcgcctcccaaagttctgagatagcaggtgtgagtcatcatgcccagcctccttgaagtttactaacaattggggataactgagggaagagaagtgacaattccactcagtctattagaggtctggatataaggtagccacacaataactctaacttgacttctaaccattctatcttattgatttggaggctgtcttctgccagattttttgtggcttgagatgatattttcgaacccttctttcactacctttcttacccttaatgtgccaagcttgaaacaggatttgatttcctgagctacttgttcgccttctgtgcgtcaccaagtaatctggttcatctttcatctcattcatgttattttcaagtgaaacaagacattttgggggtcaagtctctttgggtgttttgtttttatgtatataaaaatggattttgtgttccctttccatgtaagtaccaacttatatggaaactcacaatcataatgtaaagaagaaatgaaagcctggtgtattgtacttcaagatgcctccctgatgtatagaatctccttgtaaaataaataattgcattgtatatcagtcttcccatcaatattaattattaaatattttagaatttttaaat

SEQ ID NO: 55657 - DNA, 581 bp, Homo sapiens
tttctgttatctgcaaataagcactttattaccaaatagttcagcatcagaacaagaattctaattccaaaagggtttcctttacattacatgacattgtgagatacacattagaagaatctgagactatgttccatttcagtttctcttttgcaattaggtaatttgttttgatctaaaaagtacaaatttatctcattcttgttaatgctgtccatgaaatgtaagtatcagttccttctcagctagtgctttatagttatactggtgccaggttaagagacctattttatagtgagtgacatgaaagtcaactacaagaaaagcacattgtcattttcatttacagaggcaagtccctcttaacacaaagaaaagcaaaggaccttatgtgattatgtaaggcagatcagcccaggaatttcattcaaagataatacttcatactccataatcccatgtgagaaattaatgaatgactccaagtaaaaagaaaattaaaattagcccttgggccttgacaatttaattgccagggccttttgtcaattctaaacaatgttctaaattagccacaattt

SEQ ID NO: 55658 - DNA, 444 bp, Homo sapiens
  misc_feature (1)...(444): n = a,t,c or g
ctttgaattctctggcaggaatttccttttcttctagcttcttccttctttttctctcctctgtcccctctttccagcactgttatggtgtgtttgtaccagcccagcaggatatcatccttttgctttttttcctttatgtatctcaacctggctatgcctgtctgtcttttcccttgtggggattttctacctattttctctgtctgcccttcccagtcgttatgtgtctttcctgacccttccctccctgctcagtgggcactgttaagagacccaggtccgctgtgctgctgncgtcggctgagactgctgccaacggatnggtcagctcgagcacagcacactgaanactgctcaatntacagacctgnatncacttganacngctgactnncagaacaggatngnaagaanggnatttgaagctnnnnnaaaanaagc

SEQ ID NO: 55659 - DNA, 2102 bp, Homo sapiens
gcgtcgactttattatttttaggagcagcggcccatgccatggaatttattgtgtgctactgtttataaaatactcgaatagtcctgcacatgcataatatttccaacttagacaggagaccatacagggtgcactttctggcaaacaaaacaatagatggttccgctgcctggagctctgagttgtattccagggcatgagggaagcaggccaccaaagtaaagggaaataccaaactacagtggcaatcaatacaggtcaataattgtgaaaaattagcacatggttccatttagtttaaccaagcagttcagtaactatcaaaagaaaggtttcaacatgcagtcttgacttttatgcttccactaacatctgaatgattgaacagaaccattgcttctaggctgcattgcttaatcaaaaacacttccagaacattttaaaatttcctttgcattaaaacataaaaatgatagaaagccagcagcaaatcaccctggtggctctctaagcaacttgagtactcacaataaactaaaatttctcataacatctaggtaacctatacatgtcgtacctgtacatcataggtctatatattaaatatttgcaaaatgaaaacatgcatacacaaaatacgtcaagttttacagacatgatttgaattaaaatttactttgacaatgtacaaacttcttttaaagtaccttaaatgagtaattctgtaattcttcataattttgaaatttagaggttttcttcttaaatctctggggtgtaagtcttaaaagatctgggcaaaaaagactctaaattagtttttggatttgtgttcaagtaagagagcctgcctggaaataggatatgcattcataattaaaaaataccaagactatgttacagaattagccacatttaagaactatagacctgaggtcaacattttgtataaatgccaactgggtttctcggcattttgctcacaattcaaaatacagctaggtaacctcaggaaatggtatttttaagacccatgctaattcatcctttaaagacatttccatggaaaaagaaaagtccacattagctcttaggattgcatttgaaatcatgattgaaaaacaaaatctaattctactgaaggggaaaagaaatctgatttgtaaacttaaatgtgtgaaccacaagcataaaatggaggtgtggatgccctccactggaaattgccccaagccccttgctcactgctctccaccttggcagcgatgacccaatcttatcagatagcacatgtcccagggccctcaagcctccatccaggaagggggctagggtctcagaagcacaatggtttcttcagagagactgtgaaatttacagtcagcttggccgacccctccagctcctcgggtgatctgtccatttggggcccgagatgtgagagtccctgggaagtagtgggtcactgggcagtatggttgcccgtcccgtggttctcagtggcatgtgcggtgttcagagaattgaaaccatcttgctgtacagcatctttccgaggtggcattctctcattgatcctatccaaaccctttgcctcttcaaaactgcagattctatgtggtggagagaatcctcgtattgctttttcagcctcaatagcctcaactgtggcactttgcagggtctgccgtcctccagctaacactccactaggcaacatccctgtgggagtcaggcccttgagtgtcagcacactttcactctcctccctgagaacagagaagactcttgccatcttgccaattgctcgaattttgtttcttatgatttctttccgggctgcagctgaacctactttcaatggaataaatagagagaaaggctcaagtttagggcatgcatgcttacaatattctattagcctgttccacactcatctaaaccagtaccaagacccctgccaccagcttacatggaggggactagatgaactcatgctaaaaaatgtcttgctctctcaatgtttagctcagcattggtctaatactggggtctgataaatatagaaataaaaagtaatccacaaactttaatatttcac

SEQ ID NO: 55660 - DNA, 1344 bp, Homo sapiens
tttttttttaaatttctaaataggttttattttggccaccatcatttaatgacattcaattaaggatttcttgaacaatttctaccaaaaaaataatttcctcctctaaaacattgataaaattgataactgggtacctaacagttgcaaaacaagtctacaccattctttagtatgaaaagcaacataaaaaaatggagcatcaaaatattttatttcaaatttattttatgccagatccaagctgtaactggaacctattcccagtctatgggtttctgaatttcattttcctatttattgtatttttatgagaaacttgttgtaatgagtctgtaccactttatttgacatttactaaagctgtataaaagccatgcacagtttatttacagtattgtacattaaatgataatgtttgaagatcacacaaagatttcacaaaactataactaatacagaaagatgtgtgaaaacattaggggctttcaaaattttaggtatggaattttgcaaagattattttggcttataagtgttaggcaatcactaacctgaaataagtgacaaaaacatgcagatgattaccatttcaacaaatgaaaacctataaatgtctagctaaaagctaaaatattgtgtagctgaaatactaccatataacaatgggaatttataaaacaggaaaaaaggttattctttaaaagtcttccatgagtaatagattttcagtaattttctataaaaacattcagaaattaagtttctcaaattatgtttatcaccaaaattatgttttcagtagtgactggagctatgacttttaaataattatttattgtactataggggaagtatcagcttttccctgtaggggataggctggagaaggaaatcaaccagtaaatttagattcaagtaaaagatcctagtacaaatatatcattaacacagagtggagagttacaagaactgcaggtccacatacttttaactgtactcttagaagtgtaaactttaggtttgttcaatttaaggtctcctattaggaaatacatcttcattgagagtataggaaatatcaatagatatttcttctttaaatccatctcttccagtttttactgttgtggctgaagtacatttaaatattcagactgccccaactgataagttgtgtttcttccacagtcgacatactgatacctctcctgggatatctgttcagagtggccaaagtatgttggttgtcacagtaacttgcatcatgagtactatgttatgcactttgatggatatcagagtacagaaatcatacatataactcatttcctctgctataac

SEQ ID NO: 55661 - DNA, 269 bp, Homo sapiens
gcagagcgcagaataatggctagaacacaggaaaactcagtaaaatttcattgaatgaaataggtcttccctgcctacccaaggcaaagcagcttgtagtcttcttccctccttcccattaatttctctttcattttctacctgtatttttttcatagcactcagctcccaggactagcctctttatttgtataactggttattggcaagtctcaattcagtagggtaaaaaaaaattaattttttaaatttgcttatactgcatggaa

SEQ ID NO: 55662 - DNA, 312 bp, Homo sapiens; identical to SEQ ID NO: 39546

SEQ ID NO: 55663 - DNA, 406 bp, Homo sapiens; identical to SEQ ID NO: 41498

SEQ ID NO: 55664 - DNA, 352 bp, Homo sapiens; identical to SEQ ID NO: 43452

SEQ ID NO: 55665 - DNA, 315 bp, Homo sapiens
gcttgggatacttccagaagtgagcactccatccatatctggaggctgcagtcgaaagccttcctcctcccagtcttcagtaagcaatgagtagagtgctgcctcccttaagccaagtcagcccctacccagtcctacttcttaacccatgggacaggcacattgcaatcatagagcattaaagccaaaaagacatttatgtaaattatgtccaatcctcttatgtattttagaacttgaagtcctaagacgttaagcattttgttcacaagacaatcagttagtacagagcatggcctggaacctggattttct

SEQ ID NO: 55666 - DNA, 382 bp, Homo sapiens
gaccctgcatcaactcttgcccccacactccattctccacgttaacaagtcttcagttttcaaaagcgtgcctgaaatcctgtcatgcctttgttaaagccccccaaatgcttctcattctatcagaacaaaaatatactcctgtgccaaggtccacaaggtcctttatgatctggatccagccatacacggcctactttcattcagcctctcaaacccatcagtttagccgcgcctcatggcctctgcacttgctgttgcttctacttaagatatcttttcttctagatctttacacaactgcttctttgccatcattcacgtcccagatcaaatgccatctcctcaggaatgtcttccaggaccatcctgggaaaagcag

SEQ ID NO: 55667 - DNA, 83 bp, Homo sapiens; identical to SEQ ID NO: 41851

SEQ ID NO: 55668 - DNA, 465 bp, Homo sapiens
cttaagatgatcccatcaccagagaggtttctctaccattagcttccctcttccggccattcttcacaaagtcatttttctaaattctgtgtcacatacgatgatggcatttctggaaattccttcaggtgctctcaagccctgctgcagagatccttttcagagcacacactgttccagcccatctgtctcaccctctcctgttgtatccagctccacgacaaacttctgccttccccaacacctttgtgcctttgcatatggtgttttcttgcccattttctgctcgactcgcccctgattttcaagttcaagacttaactcagggttcaggtcttccaggaggccttacttatgtcgtcagtctggggaactctccatgtgcttctatcactgtgcggttacctctttcacagcccttttaaagttctatcttccctttcccaccttttttgaccttccact

SEQ ID NO: 55669 - DNA, 184 bp, Homo sapiens
gatttttagtaaggtggaggtcagggtgacctgaacaagagtgatttcaccggagtgggggaggagagagcccaactagatgggttaagagcaagtaggggcagaggcaatgggactattagtagagatgcatgctgctcattgtgggccactgatggctgtggtcgacgcggccgcgaattcc

SEQ ID NO: 55670 - DNA, 358 bp, Homo sapiens
ctcctgaagtgctatcataatatcaagattggctttaattttcttcttatgaagaagatagctctatactttgaaaccatattttagtaaataaaggaatggtgaattttctaaacttctcagaattctggtgatctattaaggaagcacttaccacttgtaaaataccagagtatggtgagatacaaaagaattagaaaacatgttccctgctaagacaaacaagttgacaaaaggaattcgtaaataattataaaatagaagagtaacgaaaataacattctgtatgatatttggattgattgtggcataaagcatctatcatagcaaggtgaggttaaatagaaaactcctgttg

SEQ ID NO: 55671 - DNA, 447 bp, Homo sapiens
gtcttctctaaatctttctttcttttttttttaacagaaacagctaatttccaatgtattgttgggaaaaagcacaaactgtgtttttaactcaaatattgtcttcgactgctatgtgtataggaaagcagtctctgtatcaatgtttacatgttactactttttaaatttcaatacttttataactgttcttaaaaataagagttttaaatactgaatcctttgtcttctaaattgcaatagctataatcacaagagcaatatctctttgaatgactgtctggacaaacacaattgcaaataagggaagggaaaaatgcttttctatttttcagtaactggattgtcttaagaaactacatctgcttaataaacaatttctcagcaatgtttgctgggtatgggagtttaagcccggcagatgtgtctcctggttgaacatgcatt

SEQ ID NO: 55672 - DNA, 388 bp, Homo sapiens
tttttttttctttgtttctatggtaattgaaagtttgttgatgaatatttgtgtaaaacgcattcaagtctataacctttccaattacctgtggcccttagtcccacaggagtccctgttggaagggggtaaacactggatattaatgttgctgagtgagtctttctagccaggacaagctgattggaatttttgaatggtagagaagaaacagcacaaaggcacttgccattttaagtgtttggagaaagagaaccttttaagtttggattgggtgagctttcttctaaaaggagcttctgaagtaattgcaaaggaatagaatcgactatttttatagtatatttaatatatttgtatataactataataggaaccctctacatgc

SEQ ID NO: 55673 - DNA, 829 bp, Homo sapiens
  misc_feature (1)...(829): n = a,t,c or g
cggagacagcgccggggcggagggtacgatggagaatttcacggcactgtttggggctcaggctgacccaccaccgcccccaaccgcactcggcttcggaccaggaaagcctccacccccgccaccgcctcctgcgggcgggggacccggcacggccccgcctcccaccgcggccacggctcctcctggcgcggacaagtcaggagctggctgtggccctttttacctcatgagggaactgccaggtagcacagagctgacaggcagcacgaatctgatcacacactacaacttggaacaagcctataataaattctgtgggaagaaggtgaaggagaagctaagtaacttcctgcctgacctgccagggatgattgatctgcctggttcccatgataacagcagcctccgctctctcattgagaagccccctattctcagtagctctttcaatcctatcacagggaccatgctggccggcttccgcctccacactggcccgttgccggagcagtgtcgtctgatgcatattcagcctcccaagaagaagaataagcacaagcacaaacagagccgtacccaggatcctgtccccccagaaacaccatctgattcagatcacaagaagaagaaaaagaaaaaagaagaggatcctgaacggaaaaggaagaagaaagagaagaagaaaaagaagaatcgacatagtccagaccacccaggtatgggcagctcccaggccagcagcagcagcagcctacgctaataggaccactggacttttgccaggatgnttttcctgctgtactgaacctgctgataaaagctgcct

SEQ ID NO: 55674 - DNA, 606 bp, Homo sapiens
tcgcgtcgacgctagacctgcgctcctgacatcacagcagagggaggggaagggaaaggagggccaacgaggagagcaggacaccaatgcagtgtcggtttagagagagaaccttaagaccccctgcggaagggggcaaggaggtacgagacccagccaggttggcagctgcagccccgggcccttcccacacctgccttccatccctgcagttgatggtggcatcacccttgagaaggaaatctccaaagaagagctggttgccgtcctggagctctaccgggaggcacggggggcctcctcggatgtcaccaggctgctggagaccctctcccagatggagagataccagcaacattccatggtgtttctgggacggcgatcaaggaccaagagcgacctgagcctgaagatgtaccaggaggagatccaggagtggtatgaggagcatgccagggagcaagagcagcagcgacaactcagcagcagtgcagcccccgccgcccagcagcccccaggcagccgccagcgctcccagaccgttacctagcccagcgcccgaaagccgtctcttctatgcaataacacaatagtattactctaaaa

SEQ ID NO: 55675 - DNA, 299 bp, Homo sapiens
cgactacaaaagtgggttagaaactgaagtaatctaacctcatcaagcaagtaaagcttcactttactgcactttgcagatgctgttttaaaaaaaaacaaattcaatgtttatggcaaccctgcatcaagcaagtctattagcgtcattcttccaacagcgtgcactcacttcatgtccatgtgacacatttgggtaattctcacaatatttcaaatgttttcattatctgttatgatgatctgtgatcagtgatctctgacactgccattgtaatttctggaggtaccacgaaccgc

SEQ ID NO: 55676 - DNA, 419 bp, Homo sapiens
attgattgcgtttcatgttacttgctaatgtggaaagccagataatacagcatgtggagataatctccaaaaaagtaacggatatgcgtgcatggcagctgtccatgtgtgggttggaatggcacaggctgccagcttgatgttttcaaattcagctttgtaggaggccataaattattcaacacccagctgatttttatttataattgaaaaaaaattagcatgcagtgccttttgttcacatgagagtttcaaagcatagtccattggtactggcctaatggtttctgtgagatgttaactggaacctggatttttaacttttcatgtttaaacaggatcagccctgctctaactcattctggatttgacaaataaaactatgtttctcatgagggggccctggacctccttgctca

SEQ ID NO: 55677 - DNA, 344 bp, Homo sapiens
gaattgaaattttaaaactctttcaaagctctttgtacactagaaaaaaaaacttagtgaatggactcaacagcagaatggagataaaggaaagaaatagtgaactggatgatagaacaatagtaactacttagtctaaactgcagagagaaaattgaggaaacaaatgaacactacctcagggacttataggactgtaacaaaagctgacgttatatgatgcatcataagtcctagaaggagaggaaaaaggaatggctctgaaaaatactcaaagaaataatggctgaaaacttcttaaatgtggcaaaaagtatataaacctacagattgaagacagcccc

SEQ ID NO: 55678 - DNA, 332 bp, Homo sapiens
ggtattattaaactcagtttaccaaagaagcactgagacacagaggctgtgtgacttgatgtgcagggtcacattgctagtaagtagcacagctggaaaccggtcccagacagtgggatgccaggaccccttttgcaggcagggccaggcaggtagtggggacagcatgagctaaggacaatgtgcagctgagcccaggaggctgaccgccgggaggaggctgaccgccgggaggaggctgaccgccgggaggaggctgacccgccgggaggaggctggccatggggcctgtgcgcttgacccgtagcctggctccaccccaaaggtttgca

SEQ ID NO: 55679 - DNA, 331 bp, Homo sapiens
tctcgaggatccgaattcgcggccgcgtcgacgaaagggtattcaaaaataatggctgaaaacatccgtatttggagaaaaacataaacctacagatccaggaagtgatcaaatctcaaacaggtaaacccacagaaaccctgacatatcactaaacttctgaaaacaaagataaagattttgaaagcaattacagagaaaagacacattaccttataggggaacaccaattcaagtggcaagagatttatcatctgaaaccacaaaggacagaagaaaagtggcacaaaatttttcaacttctgaaagaaaagaattgtcaaccataaat

SEQ ID NO: 55680 - DNA, 264 bp, Homo sapiens
  misc_feature (1)...(264): n = a,t,c or g
gaaactacataaagcaaaatctgacagatgaaagggagaaatagacaaattcacagttatagttagagattttaatacccttttctcagtaatgatagaacaatttggcagaaaatcaataaagacatagatgatctgaataatgtcataaccttgactttgttgacggttatagaacactataatcaacaacatggaacaagaatgtattgatgggttgtgatggtggctcacgcctgtaatcccagcnctttgnnaggcctg

SEQ ID NO: 55681 - DNA, 312 bp, Homo sapiens
tatctctccacctccttttgcaccttcaccaaccttgcctcctacctttcatccggaagaatttttggatgaagacttgaaggtagctgggaaatacaaaggaaatgattatagccaatactctccctggtcatgtgacaccatcggctcctacattggaaccaaagatgcaaaacccaaagatgttgtggcagcagggagtgtggaaatgatgaatgtggagagtaaaggaatgagggaccagcgattagatcttcagagaagagcagcagaaaccagtgatgatgacctcatcccatttggagaccgacc

SEQ ID NO: 55682 - DNA, 415 bp, Homo sapiens
cggacgcgtgggcggacgcgtgggctcggtcgcttagtgtgtctcctagttcctatcctgaactacacactgaagttccactgtctgtcttaattctgggattgcttgttgttttcatcttatctgtctgttttggggctggtttattcgtctttgtcttgaaacgccgaaagggagtgccgagcgttcccaggaataccaacaacttagacgtaagctcctttcaattacagtatgggtcttacaacactgagactcacgataaaacagacggccatgtctacaactatatccccccacctgtgggtcagatgtgccaaaaccccatctacatgcagaaggaaggagacccagtagcctattaccgaaacctgcaaggagttcagctatagcaacctggaggagaaaaaagaat

SEQ ID NO: 55683 - DNA, 58 bp, Homo sapiens
ataccactgaggcagcagaatctgagacctccctaacacaatatttacttgctgctgg

SEQ ID NO: 55684 - DNA, 125 bp, Homo sapiens
  misc_feature (1)...(125): n = a,t,c or g
atgccctctcttgactttagctttgtgacttgccttggccaatgcgatactagctgatgtgaagcaggcagcagcttggatgagcttggggngttgaatgtgctttttgacctctctgctctccc

SEQ ID NO: 55685 - DNA, 370 bp, Homo sapiens
cccacgcgtccgcccacgcgtccggatctacagcatttaattagttgcagtttaaagagattattggctacaaccctttacagttaatatttacttgaacatttgacaactgaattgctgagaatagtagattaaatgaaattgagatttcaaaacataagtagaatatggcgggattttcaaagttttgttagtttgagaatctactgctgtaattttaggacagccaacttctaaatgtagttttaagaggtaaatgaaacaactgtaccaaaacagatttttatttaaatttacaactattcagccttggctttcatagtgtgacagcaagaaaataaagacctaaggttgatttggatgttgatac

SEQ ID NO: 55686 - DNA, 384 bp, Homo sapiens; identical to SEQ ID NO: 29348

SEQ ID NO: 55687 - DNA, 365 bp, Homo sapiens
gtgtgtttctttggaagaaagagctgttccgaggaagtttggtccagctgtggttgataagaggtatatctcttaaaaaagacacctaatgaaagtgagagaaaagctaaagaaaatttcaatgtgaccactattatgtgtcaaaataaaacttagattccaaagtggttttgtagtgttgggtgctatgagtaggtatggatctctgttgattgactccagttgaaggtgagaaatctgtaccaatcattcaaaaagggaatctattgttttgaaagaaactctctcatatttcctttaaattgttaatagttgttatgcaactaaagaatgttatgaagaaaaataacattgcaaaaagtcct

SEQ ID NO: 55688 - DNA, 1382 bp, Homo sapiens
ttttttttttttttgaatacaatttcagctttattgaccccctaaagtctacaaatccttgggactctactgacccttgctgtaaagtgaagggagtgaaagtatttggaatataggtaggacctctaatataataaagatgtcactttaaaatcaatttattcaacaaacatttattaaacattcatatgccaaaaactatgctatggagatgcaaaaaataaaaaggttccttttcctgcccttaaggagctcacattctagtaaagacttttgaaaaataaaacaatacagtacgatttaagtgacatacaatagaggtaggttgtaattacagtggtgacacgaaagtggaagttagatgactctccttgagtggagcaaaggaggtttcacagaggaaatgcttatgtcaggcctgcaagatgcataggaattttccaagtggggaaggatgactagcacacttgatgcaaagagtacagcatttaccaaggcgggaggcctggccaaatgtggcttctgaagaagtgtaagtctgtttcaccagaacattcggtggaggaaacacatcagaagaccttgtacaccaaacagaggagtttggctttctcctgaaagttcctgaagtcactgaaggatattagggagtaacactgtcagagtgcttctagaaagcctgctgtggtaacattgagcaacagagaggagaccagctaggtataggaggcaggttagtactgtaggtatttattaataatagcaatgaagatgaaagagtgatgtatcagagaggtggagataaaatcagtaaaacttagacactaaatgataggggaaggtggaggagaggaatgagcctagaaaacttagaatataatggttctaaaattaaccaaagtaagggacacaggcattagagtaggttttgcagagaatgaatgttttaagacacacacaggtgtctctgggacaaccaagaaaagtgcaacaggcagatggattgaggagtctggctaaagataaggatttaggaactgctgaattaaaattacccaagcgtgagaagtggtgttgtgattaagagagaaaaaaaaaatggaggtctgaggaataacatttaaggaataaatgaagaggccaaaaggtggggggtggttcaggagtgagcaaaatgtaagaagtcaagggaataaatctttaaagtaggggttgtcaaaaatgtcaaatacagaaaaaaagtcaagtactagcttgtgaattaaactgtggatttagaattaagattttagactttacaggaagggactgttaaccagagagccaaatggcagattttagttaaggagccagtagaaggtgacaaagtagaggtaagaata

SEQ ID NO: 55689 - DNA, 352 bp, Homo sapiens
tttcattccaaaaggattgttgctattacactgatgataaaatggctattagtcttaatagagtagggtgaggccaggaatatccctgtataggaataggtattctgcttgagtatggcttttgttaaactgccttatagtacactatgaacaaaaggacataactttggaactatatagagtttgaatcccagctccatcccttcaggcaccctggccaagtatcaacttctctaagacttggtttcctcacctgacttgccttgaggtgaagtttaaatataaaattttctagcctagtgcctgattatcaataggcattcctatcaatgctgtttcctgtagagattta

SEQ ID NO: 55690 - DNA, 83 bp, Homo sapiens
cccaactctgtgtactaaaatttgttgttcagaaatttaaaaaaaaaaacttaagacatgaaacctgagagcccagtttacat

SEQ ID NO: 55691 - DNA, 324 bp, Homo sapiens
gttagctcatgcatcctttccttagaggctttccttgatgtcctacctgaagcatcccatctgttattctccagtacagtaccctgtttatctccttcatagacaagtaagataattaagggttagtgtaactgctgtctcagcaaaggcaggaactgtagttgtcttgttcacctttacccaaagactaagaaaagttcctggtacaaacaggtgaacaataaatatttgttgaatgaataaaaaattactataccaaatttacatgaacacatacatatacacacaaatataggaaaatggggagtacccaatagaaaaccc

SEQ ID NO: 55692 - DNA, 1021 bp, Homo sapiens
atgggtctggagctgtacctggacctgctgtcccagccctgccgcgctgtttacatctttgccaagaagaacgacattcccttcgagctgcgcatcgtggatctgattaaaggtcagcacttaagcgatgcctttgcccaggtgaaccccctcaagaaggtgccagccttgaaggacggggacttcaccttgacggagagtgtgggccatcctgctcttacctgacgcgcaaatataaggtccctgactacttggtaccctcaggacctgcaggcccgtgcccgtgtggatgagtacctgggcatggcagcacacgactctgcggagaagctgcctccgggccttgtggcataaggtgatgttccctgttttcctgggtgagccagtatctccccagacactggcagccaccctggcagagttggatgtgaccctgcatttgctcgaggacaattcctccagaacaaggccttccttactggtcctcacatctccttagctgacctcgtagccatcacggagctgatgcatcccgtgggtgctggctgccaagtcttcgaaggccgacccaagctggccacatggcggcagcgcgtggaggcagcagtgggggaggacctcttccaggaggcccatgaggtcattctgaaggccaaggacttcccacctgcagaccccaccataaagcagaagctgatgccctgggtgctggccatgatccggtgagctgggaaacctcacccttgcaccgtcctcagcagtccacaaaagcattttcatttctaatggcccatgggagccaggcccagaaagcaggaatggcttgcttaagacttgcccaagtcccagagcacctcacctcccgaagccaccatccccaccctgtcttccacagccgcctgaaagccacaatgagaatgatgcacactgaggccttgtgtcctttaatcactgcatttcattttgattttggataataaacctggctcagcctgagcctctgcttctaaaaaaaaaaaaa

SEQ ID NO: 55693 - DNA, 357 bp, Homo sapiens
cgcctttcacccaggagatctttgcctttctcatctcactcattttcatctacgagaccttctacaagctctacaaggtgttcacagagcacccactgctgccgatctacccccctgagggggccctggaggggtccctggctgctggtctggagccaaatggcagtgccctgccccccaccgagggcccccccagcccgaggaaccagcccaatacggcactgctctcactcatcctcatgctcgggaccttcttcatagccttcttcctgcgcaagttcaggaacagccgcttcctggggggcaaggctcgtcgcatcatcggggactttggcatccccatctccatcctggtga

SEQ ID NO: 55694 - DNA, 360 bp, Homo sapiens
cctattcacaggcttctaaaatcattaatttactcaaggcacatgtgccttctttgccccaaatgcatcactttccttttagttatggctgattttgggtgtgtgtgtgtaagacatgcagtcaacaacgagatgaaggccattgcatagatctcatgcagatagtgatggattcagaaagtaggttccagtggcgtcactaccttcttgtaagccagtatacactggctatttgtggaaatctctttgggagatcaaatagagtattatgccactgtgagtgtttataaactggaaggaacaagtacctgtgtttcttgggacacaaagcactcagatcctgagtggatgcagacatga

SEQ ID NO: 55695 - DNA, 425 bp, Homo sapiens
gctgggattgccatatgcatctgcatgtgcatgaagaaccacagggcgacccgcgtgggcatcctcaggacgactcacatcaacaccgtctcctcctatcctggaccaccaccctacggtcacgaccacgagatggaatactgtgcagacttgcctcctccatactcccccaccccacagggtccagcacagcgttctccaccccctccttatcctggaaacgcaaggaaataatctatctcccagaacagaacatgtgccaatgggcgatcttgcctggaataaaatgcctctactcagaaacaggcaggaaagaattgctccaaggaatactttttggggtcagataatgtgtcaggtggaatatccctgctaggagatataggatttctactctgctcaaagctgaccccatctggagtatt

SEQ ID NO: 55696 - DNA, 346 bp, Homo sapiens
  misc_feature (1)...(346): n = a,t,c or g
gagctgcttgttatggttcctatacatggaacaattatactggcctcactgtgttatggtaaatatttaaggtcatatttgatattgctggtttgaattcagcttttccatttaaatacattataatgatgatgatgaaatcatggataatatttaacttatttttaaagtatattctgtacctttccaacaaaaaggttaaaagtcattgaaggctaaccttactggccttctttgtattcactgtcttcttaaatnaattattatgggcggggtacagtgggctcacggcngttaattcccggcacttttggggagggccgaggtngggccggtcacaagggtc

SEQ ID NO: 55697 - DNA, 532 bp, Homo sapiens
gcggaagtactgcgttgacgtacgccttagtaaggcggaagtgagttttccagcggaagtggctcctgtaaggcagcaaggtagcgtggccggcgcccgagctggggttgtgtccctgctgggctgccgttccagctggactgccgccatggaactcagcgccgaatacctccgcgagaagctgcagcgggacctggaggcggagcatgtggaggtggaggacacgaccctcaaccgttgctcctgtagcttccgagtcctggtggtgtcggccaagttcgaggggaaaccgctgcttcagagacacaggctggtgaacgcgtgcctagcagaagagctcccgcacatccatgcctttgaacagaaaaccctgaccccagaccagtgggcacgtgagcgacagaaatgagggactgggatctgcacagccattaaattataaatctggaaaaaaaaaaaaaaaaaaagttttgccctaatagtgagtcgtctttacaattgtcgaacgccgccggcaattgtagtagtagta

SEQ ID NO: 55698 - DNA, 513 bp, Homo sapiens
tgactgtggctgtcttacaggaaaattcttgtttgtccctgaatgagagcacagaggcattgaattcacagagctgcaaacttgcctgataaatgagggagtggcagtttatagataggtcatcttttttccttcctccaggtgtccttgcctttcttcccaaagtcattcatttctgatgagtatatgaatccccctcttgctagtaaggttctatttgggctaaaacaaggctgaatttttaaagagtatttgaatatattttagaatcaaattgaggctataaattgcatcaatctggacaattccattgcaggaataatatgttaaaaaccaatggggagaagcacccacatctctcctgtagcactccgtgtctcataagcaatttgaagacacttacaagtaactgattccagtcaaattaggattaactgactcaaaaaatggtgtcaagtttctttaatgtttttatgttagaagtgagtttaacagacttgaagaaaactgtta

SEQ ID NO: 55699 - DNA, 39 bp, Homo sapiens
ctgctatgtattacaaagccacatgctttggaattactt

SEQ ID NO: 55700 - DNA, 428 bp, Homo sapiens
aaattacaaatctgagggataattcaaagatccttttttgttgtcattgttcctgggggaatatgtttcctgggggaaggagcatatctgactggtcccagggaagaaatgaagtagaactggtattgaagagatatctttctatgggaatccagcaaaaatactgggttccaagaacttgcttgcctggggaactcccagattctttaaaaaccttacatgtgaaatagcttaacataaatatataggtttagacatactgattgatgtttcagtgcctatttttatatgcatttatatcgctcaggtcatctattttccacttgttctattaagtcatggttttgcaaatggtcaccatttaaatataaggaagggcctattttgcttctttcatattcttcgacatttcctcaatgaaagaaaaa

SEQ ID NO: 55701 - DNA, 1621 bp, Homo sapiens
  misc_feature (1)...(1621): n = a,t,c or g
gtgcagcgtgccgttcctccctctggctgttccagtgcgtgctgttcaccggctcctggagcaccgccaccacagcgtcacctggcccgccactgagctccccatcacacagctgaccagctccatcgtgcggcgcgtgaatgaggcttctgggctctaccagatgttcggtgtgctggccgatgtcatcctgttgaaggaaacaggaggtgaggttccgccctgcacactggcccctgcctcggcccacggccatccatcacatcgtggaagacttcttaacagactggactgccccgatcgggcacatcctacctctgaggcgcttcctggagaactgtttggacaccgatttgcgaagcttctatgcagagtcctgcttcctgttcgccctcacgcgccagaagttgccacccttttgccagcaggggtacctgaggatgcagggactcgtgagtaccgagagcctttggcagcacagagtggagagcaggctcctgcgggactatgcccccacaggcaggcgcctggaggacagcagccagcagcttggcgagccaagagccactaggttcccccctggctccagggcctctgggtcagtccgtcgatagcaacaaagaggagctctgactgtcccttcctaagctgtgggcacagtggccaggcctccccacctaggcccatggtcagtccctctttccccgcaacctcacactcccgccaatgcgtgattgccaaagancactcagatcatggcagtgtctgcagcaaagccaccagatggcaacgtgagggctgaaagtcggggatgcgtggtctctcctctgtcagggggcagaaggcatcctctgccaggtgggagctgccttccccagcccagtttgtctgcaaatgggagtgtcgctgagccccagccagcccagttctgccccgtctcaagtgctcctcttccttccaagcccctcctcagatgggcctgcatcccgcctgtggagtgcttcacaggggaaacccatccgcatcttaagagtttgtggcaagcgctttaaaacaaaagctctgatatcctcaacaaccacaacgggcaggtgggattgttgccccagatgactgctgaagacaccagctgtgggatgtcaagtaattccagggacccccagctgggagtccccgtctgtgtcacttgccacacactgcctcaacctccccgccccattttcagcagggtttgggcttagctacagagcccaagagggtcagccctgcttatcatcataggcccagcaggctgatctcgagcagcgataggacagctccctgcaaagccatcttagcaactttctcactgagaagcaggattcagagctgctctccccagttgcaccccctgactcatcttccagctggctcttctctcccatcctactcccttctgtctccctgccctctgccatcctgaaccatgccttgcttctaacctgcctggtcaagttttgtgaaacttatcctgctgtctcgggctggcacccatatgtgctcaccatgtgtaaggtgacatttccaaatgcctttgtgtgataatgatgatgaatttggaaaaaaaaaaaaaaaaaaaaaa

SEQ ID NO: 55702 - DNA, 320 bp, Homo sapiens
tgacatcttaagctttcataagacaactacttgtttatttttatttcttaaagtaaacatttgcttagtagacattatatagcctagaaatgtttattaactatcttatcactacattgttaatggatgtttgcaaagaagatgctgtaattataattttctgaaaagccttctgagccatcaggggaacagatatatatattttagagcttgaaggtttatcttgcgagcaccttcagtttacagatgttgaaactgaggctcctagagattaagggacttgttcaggtagtttatgaaagtaagaagatcttttgagg

SEQ ID NO: 55703 - DNA, 318 bp, Homo sapiens
aacgatgaaaaaaaatggagtagaaagaagagtccgggggtgagactgactaacctagaatctataaatgttgccacaagccttggctcacattcacccattcaatccaagaccttcaattatgtcttaattatgtatttgatgcccatgatgtcctgaataccttcacagaaaccatggatgctacacataaatcatgaaggagactgaaacctgatacaaggaaaaaaagcattctgtctggcctttttaaaataacttcatcacctattgtttttcccccatctagctgctatcaccatcattaactggcgaaga

SEQ ID NO: 55704 - DNA, 438 bp, Homo sapiens
  misc_feature (1)...(438): n = a,t,c or g
tttaactgtaagagtttgatcttttcaaatgtgttcagaaactaatttggattctttgattctagtatctcaacgtgtttatttttagattctgataagtgaaatggatgtccttgtggagctctggcctccccagcttatctatcagtcctgctgtcctcacctccttgcctctttccatgcttacccttaagccaccatctttctcagctagcgtgtgtgtttctagtgtagttggccctccatattcaggggtccagcatctctggattcaaccaaccgcaggattgaaaatatttgttggaaaaaatggatggttacatctctactaaatatgtgcagtccttttatttgnnnnnnnnnnnnnnnnnnnnnnnnnnnnnnnnnnnnnnnnnnnnnnnnnnnnngatgtattaggtattgtaagtaatttagaga

SEQ ID NO: 55705 - DNA, 700 bp, Homo sapiens
  misc_feature (1)...(700): n = a,t,c or g
gatttaatatatatccagtgctttgcaagtgctctgcgcaccttgtctcactccatcctgacaataatcctgggaggtgtgtgcaattactacgactactctcttttttatagatcattaaattcagaactaaggagttaagtaacttgtccaagttgttcacacagtgaagggaggggccaagatatgatggctgggagtctaattgcagttccctgagccatgtgcctttctcttcactgaggactgccccattcttgagtgccaaacgtcactagtaacagggtgtgcctagataatttatgatccaaactgagtcagtttggaaagtgaaagggaaacttacatataatccctccgggacaatgagcaaaaactaggactgtccccagacaaatgtgaacatacatatcatcacttaaattaaaatggctatgagaaagaaagagggggagaaacagtcttgcgggtgtgaagtcccatgaccagccatgtcaaaagaaggtaaagaagtcaagaaaaagccatgaagcccatttgattttcaatttttctgaaaataggctcaagagggaataaattagaaactcacaatttctcttgtttgttaccaagacagtgattctnttgctgctaccacccaactgcatccgtccatgatctcagaggaaaactgtcgctgaccctggacatgggtacg

SEQ ID NO: 55706 - DNA, 409 bp, Homo sapiens
ggaacatcccagcaggctgtgcttggatcatgctcgtctgccctcaagctggaaaacaaggggctacctaccgagaggattatgcaagtgactttctttcttacttggggtagggctgttccctctccaatcttccagcctttgggagcaggggaggggtcagtagcagaagcagagggaggcctcttgcctgagggattaaaatggcagcttgccatgcctacccttccctgtctgtctgggcagcaggttcagggctgagcccttcttttccctcttttttcctgggaatattttgtacaatattttgtacaaagacaggcatgaggaggcctattccatgcttgctttgcaatacctgcatccccagcactggtcctgggcacttcccaccccagccaggtgtcct

SEQ ID NO: 55707 - DNA, 326 bp, Homo sapiens
  misc_feature (1)...(326): n = a,t,c or g
ggaccccaaataactatctttatacctttatgtggtttatagctatcaatatttcctatttatgaattcaagaccgaggaactgaaaaatgttcatttagnnnnnnnnnnnnnnnnnnnnnnnnnnnnnnnnnnnnnnnnnnnnnnncaagcaattgacccacctcccnnnnnnnnnnnnnnnnnnnnnnnnnnnnnnnnnnnnnnnnaaatactttatgattgcattttccctctttagaacttctaacataaggaagaataaaaattatatatccaatgactacatggggaaggggagttccattcaagaaaggtttaagaaat

SEQ ID NO: 55708 - DNA, 206 bp, Homo sapiens
catggaggcagtgttaactaaaattaagcttagatttagctcctgtattattcataatatgagaaattttattaaaggcagactttggtaaaagtgccaacacacttacttgtatagaaaagacttcactctatgggatttatataagtaagtgctttctctatattcaaaatatttcataaggacctgtggtttttttcccctta

SEQ ID NO: 55709 - DNA, 405 bp, Homo sapiens
gttttttctgtttaacctaagcaaaaagaaatgaagtagcaatataaaaagaatcaacagaaccaccagatgtatgcagttttcaaattgttttattcatcataacatgtataaatttttaactttgttaaatcattatgattttctttaaaagtatgagataatatatgaacattaatatcaacagtgcacaaggatgaaattccctaatgagaaatacacagtcttgcgtatgagaagccaagaacatttctagatggggttaaaaggagtaaggcatggaaacaagtcacttgtttgagcacatgtataatagaaccctgttgtaattagagtggagggaatatatagggacttaggttcatgccagcttttcctttctatttagcattgatcttcaagtgg

SEQ ID NO: 55710 - DNA, 777 bp, Homo sapiens
cggggatccgcggccatgacggtgccggtccgcggcttctcgctgctccgcggccgccttggccgagccgccggcgttgggcagaagcacagcaccctccgtaagggcaccgggagagcccgggagtgcgttccggggctttcggagcagcggtgtgaggaccagcagagagaagagattccatcttccagaggttgccactgtctgcctccccacttgtccccatccacagtcatcttttttatatatataatgacacattagttgtctagttcttcatagttaatgtggtttaagtctgacatcttttcttttgccatgaaatttacaccttagtgttattctcactgaaaattgcctttgagtttgataaactcttatcccagtgatattgactgttttaaattaacagatttatcaccatttctgagctgtgtagggccttaattgaaaaagtatctttgattattttttcacattttggccacatgcctataataatggaatatttacagtactttttagtggagaacttttttaagtagaatttcaataattaatgtttgatggagtttggaagttaccgtattttgaagtatcgtttaacattcttctctcaatgagttttcctttaaaatttgcagtgaatttgttttcctgtttatgcatgagaatttaggtcttattaattgggggaaattaatgttaaagtaataaataagcccttgttgcagcttattgtttcttgaaatgaattaactatccaggcaaaaggtt

SEQ ID NO: 55711 - DNA, 397 bp, Homo sapiens
ggtatctgtgcgctttgaagaagatgaagacaggaacttgtgtctaatagcatatccattgaaaggggaccatggaattgtggacattgtagataattcagactgtgaaccaaaaagtaagctcctaaggtggacaacaaacaaaaaacatcatgtcttagaaacagaaaagacccctaaggactgggtgcgtcagcaccgtaaagaggagaaaatgaagagaatttatcttactggaaaacctgacttcccgctatgaggtgccttgtgtccttgacctcaagatgggcacacgacaacatggtgatgatgcttcagaggagaaggcagccaaccagatccgaaaatgtcagcagagcacatctgcagtcattggtgtgcctgtgtgtggcatgca

SEQ ID NO: 55712 - DNA, 411 bp, Homo sapiens
cggacgcgtggggacccaggtttatggcaatgggtgctggttcctccaagatagacttttctttctaaataaatttattgaaataagaaagggaatgaatgaatgaatttaggcccagatttgggtattctacttataccagacttttaaaaattcatttatttattctgagacgctggcatatgggatggagcacagaggttaacgatcagccctgtcatccctttcggagcagatcaggctgtaccatttgcctcaaatcaggagcccctgccctggaagctgccatcttgccagaaacttcctggggagctgcctgtaaaaaactctagcagcagttgattctggcccaggtggaaaagctgtgttatcccaggcggagttccggcaggttgggagatgtttccaggt

SEQ ID NO: 55713 - DNA, 447 bp, Homo sapiens
cctggcttaagagcaagaggcctgcaagctaactctcctaatcccaacattcctttccagggaaagtagggtgacaggtggaggctgggaattaacgttttttgagcaccaaatatggacaaggcacaggggttgggtgtttttctagtgagaatacatatgaaagaaggaaaacaaacttggaaaccgctattttaagccatttggtaacagtttctctagcttatgagatgagagaggtcctctcagtatccgctgcattacttgtgggcctccttggttgacgtcgctctctgaacgcttggggtggaattctagaggtgcttttcattagaggcagagagcatgacctttcttccttgcccagtttaaattaaattattttatcttacaatgtgttaattttagtgctagcaaggcacagctaaaattccatttctacttagg

SEQ ID NO: 55714 - DNA, 324 bp, Homo sapiens; identical to SEQ ID NO: 42135

SEQ ID NO: 55715 - DNA, 526 bp, Homo sapiens
gacaccaccgggcggctggtatgtgtccaccggcccctagcgcctcgagcccgcccctgggagacgcaggctcatccccgcggagagagccccgatgctgctccgagacccgcgggagggcacctccggtcacccgagccgcaaatccccgccgtccgaagaaggtgtcgccccgggctggcggcccagcgtggcttaggccaggtacaaccggcagcgcccgccaagccctgggctagggacgcctgcgggagttcacggggaggcgccggtgtctgaggtctgagaagacagcggccaccggaaaaggtgctaatgtttgcagaccccgatccatcgacaccccaaggaaatgctgtgcacaaaattccaagagggccttttcgaatagacgcatgaacggtgtttgtgtctggatcgtccagcctcccgggatcgattgggaatctagcttctgcttgcctttccagcgcgacgcacagtaggagcctaataaatgtttgttgaatgaatgctgaatatcgaa

SEQ ID NO: 55716 - DNA, 381 bp, Homo sapiens
ggctgcagaaatggaacagtcatctggcacaggcccagcagaattaactcagttttggaaagaagttcccagaaacaaagtgatggaacataggttaagatgccatactgttgaaagcagtaaaccaaacactcttacgttaaaagacaatgctttcaatatgtcagataaaaccagtgaagatatatgtctacaactcagtcgtttactagaaagcaataggaagcttgaagaccaagttcagcgttgtatctggttccagcagctgctgctttccttaacaatgctcttgcttgcttttgtcacctctttcttctatttattgtacagttaaagaagtggtgccgggtaggaaccacggttccttcgtccattagttgg

SEQ ID NO: 55717 - DNA, 651 bp, Homo sapiens
tttttttttgaaagaaccaataatagatttattcagagaagggtgagattacaacaggttggattattccatcaggttttttcttaatatttttcataaatgcaaatgtaatgaaaaatctgaccagagattcataatgcacatttttaggaggaagacacaaaatagtccctttcagtttctagactaaagccatagaggttgaggctggccctaccatgatcgtggctgtggcggtggcatattctccacctccccaacactctccaatattgggacatcgagcttcctcacatactgtatggagatttaaattccgcaaagtatttttcagtttattgtaatttttccccatgggaatctctgtctttagccatggaggtagtcttaacctttctcctttctggcgttttaggtttcctttatattcatcccaggtgctcctgtctgcaagatcaccagatacaaaatcttgaaggtctggtccattctgtaggagttccttttttttatctggcaaggagcttaacggtctgactgggctgcaaaaatatctcccaaatacccggggccccagggtgcgggctgcatccccgcagcgtagagacatttcctctttaggactagcgcagtgcaggggttgagggatcg

SEQ ID NO: 55718 - DNA, 596 bp, Homo sapiens
cttttttggtcttttattgaattctgtatataacattagcaaagaaaacactttaaatccaatgagaaatttaaaaaatcaatcagatgaaaatatcacataatcaaaactcacagatattttctgatatttacttaacaaaagacccaaaattattatgacaagaacatcagagaacatggtataaagcttatttcaacttaataatatgtaataaattaaaacaactcaatgtcaaaggataaacagaaaaaatagaatgtttgattttacatcgtattcagaattccattatcatcactgcttaagaatgattatttcatttcataaaaataatgcttgcttatttgatgaagagaactaaattcaatgttagaaaattttaaattccaatataataagttctagttaaatattcacagtaacattgcattgctaatcagtaaaagtacagcatgtatcacagactgttgacttacaagggaaagcagtaacagtgtctctctgctgtctgagaaaagaataaaaatgtactattgtgtcatgaattgaaaggaatgtcttccttattcaaactaagcagtcatattttaact

SEQ ID NO: 55719 - DNA, 514 bp, Homo sapiens
ctggaagcatctttgctaagttttgaaaaacttgaccgtgcctcaccagatctttggccagaacaattaccaggtgttgctgaatttgcagcttccttcaaaagtcctattactagttctccacccaaatggatggctgagatagaacgtgatgacatcgacatgttgaaagaactggggagtctcaccacggctaatttgatggagaaggttcgaggcctacagaacctagcctatcagctggggctggatgagtccagagagatgacacgggggaaattcctcaatattctagagaagcccaagaagtagcagctgcttgcggacaggatgtcctggggtccgaaaccaagctcccttcccggtgcacctctaacaatgcacacctcactgcttgcttgggagaggccagagggtgtacctccaggactgccctctcccctgctcctggcactctacacgtctgaggacattcagcagcaagagaagaatctgctctacccaaggatcattg

SEQ ID NO: 55720 - DNA, 475 bp, Homo sapiens
ttttttttttttttcgacgttaagacatttattacatacagagcagatatgtgggtttgcttgcagggccaaagcctgaggagaatcgtcacccctcccccagccgccccactgctcagcccggagtcacttcgagatcctgggggaacagacgagggagcggacatacatcacagtggaggtggcagggtggtggggagaagccggcagcgccagcgggctgcagccctcggtggccagcggggcttgtggggcagctccccaagatctgtgcttctctggttgggggtgggtgcgggggctgggctgccctcataagggcctcccagacaggagtgcagtgggcctggaaggtaggaataggccagagaggcccagctgggcagggagagcagtccagggtggcgtctgcctctgcgggcttggagtcggctgggggcggctccatccttccaccccacgggcctctgcttgg

SEQ ID NO: 55721 - DNA, 360 bp, Homo sapiens
  misc_feature (1)...(360): n = a,t,c or g
gctcgacgtccctcttgctcacccttgacttggaaaaaccagtttctcttttattgtctgttactaatctctattctaaaaattcagctcaattctcaaccatactccaaactctctcttttccagctacctttactccctctccttcaattccactttcctctgcttactttttttttttttnnganngggtctaantttgtcccccggccagnagggcaggggctaaatcttggggctcactgcagcctcaacctcccagagggcggggtttcaccatgttgcccagactgggtcttgaactcctgagcttaagcaatccacctggcctcgggcctccccaaagtgttgggggatcac

SEQ ID NO: 55722 - DNA, 380 bp, Homo sapiens
aaaagagtgaaatatcataagaattattgacttaagtatattggtactgtgttctttagctttctactgaattggttatagaattgaattttatgttaaaagtgggtatatggtgattggaagcattatttaacttagttctttctgaaagttctgtgcctttggaaactctaaacatagcatatgatgaatctgtttcaaaggctgtgagattgtgtgctccactttgggctcttgctccatattaagatgcacaattgcactactttctcttctctgtctcctagcttgagtagtattgcttttcatttctagaacaactacacggtgtcagttctgtcattgtccttattttctatagtcctcatttttaatttata

SEQ ID NO: 55723 - DNA, 327 bp, Homo sapiens
cttaaaactggtgacagttttacctatagaaggtaatactgggcctctggacagaagaggctcaggtaggaggccagggacttcgagcacccacaccaaggctgctgcaccacgtcctcaaataagacattaaaagaaaggcccacaggccggatgcagtggctcatgcctgtaatcccaacactttgggaggccgaggtcggcggatcactgaggccagttcaagaccagcctggcaatatggtgaaaccccgtctctactaaaaatacaaaaattagccgggtgtgacagactcacgcctgtaatcccagctactcgggaggctg

SEQ ID NO: 55724 - DNA, 361 bp, Homo sapiens
cagtgggtctgggttacacccaagattgtgtatttcaaacaagctcctgggtgatgctaatgctgctgggctggaggcctgagtttgagtcatgagggatgaacggctatcagaatatccatggagctgcaggttcaccaggggagtcatgtttgtccccagaacaggtactaggtgtttactagcatgcaactgaagctggtaatgagctaatttcttaccactcaaagttatttgcaaactggagtgcaaataatgttcaagccatggcttttccttggaaagattgctatgttctaaatttaaagaacaaaggactgaccattcaaacataactctagaaaaaggtcatatactgctg

SEQ ID NO: 55725 - DNA, 451 bp, Homo sapiens
  misc_feature (1)...(451): n = a,t,c or g
ggacggcaccatggaggactccgaggcggtgcagagggccacagcgctcatcgagcagcggctggcacaggaggaggagaatgagaaactccgaggagacgcacgccagaagctgcccatggacttgctggtgctggaggatgagaagcaccacggggctcagagtgcagccctgcagaaggtgaagggccaagagcgcgtgcgcaagacgtccctggacctgcggcgggagatcatcgatgtgggcgggatccagaacctcatcgagctgcggaagaaacgcaagcagaagaagcgggacgctctggccgcctcgcatgagccgcccccagagcccgaggagatcactggccctgtggatgaagagaccttcctgaaagctgcggtggaggggaaaatgaangtcattgagaantnctgntgacgggggggcaccgacacntgcgacaat

SEQ ID NO: 55726 - DNA, 754 bp, Homo sapiens
  misc_feature (1)...(754): n = a,t,c or g
tagcggtgtgtaggcagtgagggggaggttccaggggctgtcccacagctcgtcttttccaggctgggctccatcttccagtcccaaaaccctccttcacagggcccagaggcttgtgaggaagccaggtggacccagccttagaagagtgggcatggggggcccctgatatctggagggggcgggttggcctcagtcatctttggagcagaagggctgggtcctggggccacagaccacaaggctcagcctccctaccctgctccctggggtgctgctgtcttggagagcacagctctggtgagacggcctgggcaggccgaggctgagaaaccagggaggatagaggagaaaagggcttgggcccccagccccagaagatgctggaccccaggtgggagacccaacagtgggtgcagtttctcagtagggctggagccaatggtgggggtggccccggcaggcctggctcctcacatcccaggggttggcttctgatttggcggcttgggctccaggcactggcttctcttctctgtgtccttagcatttgagagaagaggccagggcttgnttcatggatccctggacccaaggcagatgtccaggctttatcctcctgaggatgaggagtctgaccagcccaaatctgccctggccggcctgaccgggcaaggcagtccaagagagttcagtgaggaccagctaggctctcccaggtgcaatgttggtgcaggnccctnatgtcccccta

SEQ ID NO: 55727 - DNA, 261 bp, Homo sapiens
  misc_feature (1)...(261): n = a,t,c or g
actgaacttctaaacacattgaatgagtcttttttttaagggatcaggcctcattttgttgcacaagttggtctcaaactnnnnnnnnnnnnnnnnnnnnnnnnnnnnnnnnnnnnnnnnnnnnnnnnnnnnnnnnnnnnnnnnnnnnagtcttttaaaagagtgttttgagaaacctgttgtagaaaaaggaaacagcaattctggggacaaattacaatgaggctaaaaaacataaaggattttagaagcaaaacattt

SEQ ID NO: 55728 - DNA, 345 bp, Homo sapiens
gggcagaagagcacatatgaagagaagagaaatgggaaatgggggaagacaacgcagagcaccatatcttggggtgtatatagaagctacaggacaagtgtaatttttatcattgcatggggagcattgacataatttctactgcagctgagcattttttaatatggataataggattctgcaagtgatacatttggtcagagaacttaataaactagtcaagtgggataggtcctgtgacagaattgtgtgatacaggtcaaacaggagttgggttatggggaaaatgccagttgaaatatgttttgatcttttggagaaacctattttttcatttaacctggc

SEQ ID NO: 55729 - DNA, 360 bp, Homo sapiens
  misc_feature (1)...(360): n = a,t,c or g
ggaggtggttatgctgtgacgctgctgtctctaaccaccaagtattttctgcttaaaaagaaatgtaaggggctgcctttagcaaatgtgcgtagtagtctacttaatcctcatgttaaaaatcgaaaaatgggccaggcgcagtggctcatgcctgtaatcgtagcactttgagaggccaaggtgggtggatcacctgaggtcaggggttcgacaccagcctggccaacatggtgaaacctcgtctctactacaaatacaaaaattagctgggtgtggtgccacatgcctgtaattccagctacttgggaggctgangcatggagaatcgcttgaacccaggaggcanaaanttgcatt

SEQ ID NO: 55730 - DNA, 358 bp, Homo sapiens
aattactataagtcaaattttgccagtgaatttaactatttttctttccttgcaattaaggggaaaaaagcatttatcttatcttctcataccccttgcatctaagtacttagcaaagtcaatattttcccattttccaaatgcgtccatctctaacataaatattaattgaacatagagctatgtttggagtgagtggactggcaggacagttggaagtccatcacagtctattgacagtttcatcaaagctgtatagtccaactagtggggcagcttggctactatggtggaagtctcagcaaactgcctggttttgtttgtttgttttgttttaaggtacaggaaataagaggaa

SEQ ID NO: 55731 - DNA, 403 bp, Homo sapiens
ctccgtggggtcggagtcagacagctccaaagaagagaccatctattacacgatccgggccactgcggagaagccgggcggtgccaggacggaggagagccagggcaacacgctggtgatccgcgtggtcatccatgacctgcagcagacgaaatgcattcgatttaacccggatgccacagtgtgggttgcaaagcagcggatcctgtgtacattaacccagagtttgaaagatgtcctgaactacggcctgttccagccggccagcaatgggcgtgacggcaagttcctggatgaggagcggctcctgcgcgagtacccacagcccgtgggtgagggcgttccttccctggagtttcgatacaagaagcgggtgtataaacaagccagtctcgatgagaaa

SEQ ID NO: 55732 - DNA, 393 bp, Homo sapiens
ggtgtttcattttttactaaatgctttaagatactgtaatggtttaatgctatagcttaaaagataataaatgcctcaccctgcctttccagcctgacttcctcctccacccctccatgagactaggccacatgcagccccggattgtgcttctcttcccggaccccctgcagtgttccacctcgaggcttttgcccatgctgcgccctcggcctggagtgcccttcctccgaagccctagctgtcaaagtccttctcatccttcaaggcccatctcagatgctgcccctctgtgaaatttacgctgatgcccccaggcagaattcatccctgttttctctttattcctgcagtgaatagtaggaactcctttttagtatatttcattctgcc

SEQ ID NO: 55733 - DNA, 357 bp, Homo sapiens
taacctttaaaacaaacccagccattatgagaaagaaaaataatatatatttatatatgttgtcatatataatttttaagttagcactaatctcactcatgaacttaggtatcaaaatcaaaatcataagcaaaatgttaacagactgaatccagcagcacatttctttaaaaagagatataccttgaccaaattgggtttatcccagaaatactgaaaatggtctaactctaggaaaacgcaaaatttgagtcaccaaattaaaggaaaaaaactatgaaatcatttcagtagattgcatttgatacaattcatacccatttataatgtaaaacttagtaaattccttaatgtggt

SEQ ID NO: 55734 - DNA, 395 bp, Homo sapiens
ttttaatatagtcacctagtcttaattagtaatacaaaaggcttccttagagaaaagatcaatagcttgggattgtgagggaagggaagaatttgtttgaaagggctgataatagagtcccataaagctggtggctatgaaactttaagactgaaaatggtgctaggacctcttacatgcctcaaagctttctccagtgattaagaaggtgcattagaaatacaatagtgggaaagtcaatacaaaagtgggaaaatgggggagcgcatatagagaggaaagaacttcttgattaaaatttcaggtcatccaggcaaaagtagtgaagaagtaataaactaggctacttttctcctaaccagagattgctgaattcacaccctagtctttccgta

SEQ ID NO: 55735 - DNA, 379 bp, Homo sapiens
  misc_feature (1)...(379): n = a,t,c or g
ggtagaggtaaaaactatacttacaccgtaaattagacattaaatgccatttaatcagtcagataatgattaatgttagagtaatgtttgatgggccaagctgctaaaacataagcagttctaattaaaatatataaacttatcacgtaaaaatagcaaacttagtaatgtataaagtgacagtaggtcttttttgcttaaaaatcagagttcctgtgtagtgtctctttatgatctctgtagtaaaaatattatttaacgtagcttagtgagaagtttaagaggagtataccttttactttagggtgcccatgccactttgaagttatggagtgcaaagtagtttccacacattaaaaaaaaaaaaaaggggnggccg

SEQ ID NO: 55736 - DNA, 1042 bp, Homo sapiens
ttttgagaaagcacgagtctttatggagctgtgtcagcaaaaggcaaagctgtcaggtgcccatctccacctccaccacctctgcccaggcgccgaggcccatgtccttatggattagcaccaggctgggggcggcatctggctcctctggcaccacaaagcacttctcctggctttctgaaatggtgacctcaacaacatccctggcgggggagacttcctcctctctgtgtgtgtccagcagttgtggctcagcctgcaggagcaccacagtgggctcagaagcagcagaaggcacagagggtgggctgcagggtgcctcaggccggtgactgagctgatgccgcctgaggctctgcgggagggtgtagcccatgcccacaggtggggcagcggtagggcttgtcctccaagtgagatttgaggtggcgccgcagcttggtggccagcgtgtaagcacggccacactggggacagggaaagggcctctctccggagtgcaggcgctcgtgagctcggagcgtgtgtgggtctcggagggccttgccacacaccgggcacaagtgggcctccccggtgtgtgagatgagatggcgccgcagttcaggcagctgggggaaggcatcggcacagtgtgggcagcggtaaggacgctccccggtgtggagccgcaaatgcccacgcaggttgccccgctgacgaaacgcccggccacagtgcgggcacaggaaaggcttttctcctgtatggagcctcatatggttccgcagggagccctggttggccaggggccgcccacacacagggcatgggcaaggggcaggggcagctggcacctggtgggtcttgcgatgcagccgcagggagggccggcgggcaaaggccttgccacactggtcacaagcaaagggccgggcacctgaatgtaccacctggtgctctttgaggtctcgctgggtgccataggccttgtcgcattgtggacaggggaagggccgcaccccacggtggcccagcatatgggctttgaagctctcctctg

SEQ ID NO: 55737 - DNA, 267 bp, Homo sapiens
gggaagcaggtaaagtggtatttagatatttacaaactcgaatgcatgcattagtaagaaagacaaagttaatgttattaacatccaactttagaaggttaaatatgcccaagaaagtagaaggaataatataaaacagaaaatgtataccaaaattaacgaaaaataaatatttaacatagaatattgccaaaaccaaaatttgattatttgaacaaatcaacaaattaggtaaatttctggcaatatagctaaaaaaaaaaaaaa

SEQ ID NO: 55738 - DNA, 729 bp, Homo sapiens
catggattcccaactctttttgtaacaccttaattttctctctcaggtattttcctgttaaataagatatcaaaagcatcaatcacaagacagagaaaacgtattacgaaaaacttgtattagtatattctaaactgaaatggaaaaactcattattcatattttaataaataaaactcccaaatgatcttgctcaattatcccactatttacaagtagaaaataagagaagagtgctttcaaggaaatttgtcatattctcccttctatctacaagttgacaatgaattgcggtaaaactaagaaataactgaatgctgaaaaataccatgaattaatgttatggcttctttatttttgtatatccattcccacaaaattgaatttaagattattaatgaaaattctatattaagtaataatgcttgtattagtaatgggcaaagaagtctttctttgttacattaaccgttagtaaaagatgtactttgacatttctgatgtaaaacctatatgtaaatattgtaatttaaatatgattggacagctgttaagtttgggggagggaagcagatgccagcgttctctgctgaaaagacaagatggcgcttgacggaccacagcagatggagctggaggaggaaaaggcaggccagtggactctgccagtattatctgtccaagattgaagaactccagggtcaactgccaatataaattggatggggg

SEQ ID NO: 55739 - DNA, 581 bp, Homo sapiens
ggaattaatatttatttataaaaatactaaaatgtgttcacagatctaaaggggcattttgaagtatttttaaaaggggtttggaggtagcatccgaaatcatataaagattggggataaatgttgaatttttgagatatggaatgtctattaagaggtggaataaagattgtatgtgtcatactctttggaggaaagtggtcccccaaaatgacagcaattcctaaggagtttgtgaaggggtacatgttggaatcatatagagtaaatatcataaaaactatccatacattactgttgcattggcaagagcacatcatttagaatatacatccaattattaaatttatttaataggcaagatgttatagagaagacagttctcaagattctttttcagtttccattgactaaatttctaactttagaaagctctgaatgtgacatatttcgccattcttcagcaagagtgatgtcaaacttacatccccactttgcaaaaatatatcacttcaatggaggtggcatataaacctgaatttttattttatggaaggttgctatgtgaatatacagagctg

SEQ ID NO: 55740 - DNA, 899 bp, Homo sapiens
gtggggttggaaggggaatgggcagaaccttcagagcctgagggctcctatccaggccccagggagaagcactaggatgtctgactgaggaggctgggctggagaaccagtgggactggccagctcctttggtttgggctgggctggcccctgacctctatcctcagaaactgacctggtcatctgtggtaagaagttccctcttttgcagcagaaagaacctttcaagaaaaggtggttcgccctggattgccatgagcggaggctgctctattacaagaacccactggatgccttcgagcagggccaggtttttcttgggaacaaggagcagggatatgaagcctacgaagacctgcccaagggcatccgaggaaatcgctggaaagccggactcaccattgtcaccccagagcggagatttgtcctcacttgccccagtgagaaggaacagcaggaatggctggaaagtttgcggggtgtcctgtccagccccttgacgcccctcaaccggcttactgcatcaacagagagtggccgcagcagcaggtgacccattaactgaggaactggctgccactgaacacctggaactccttgtgggaagaagtttgcacctcggccctggctgcccaccatcagtgccccgcagtcagcagccattcctggcagtgaactctgccaggactgaagctgtggctttatccatcagctccctgggccttccccgcaacccacctcggggatctgaggatctggtgcatagatgaacatctatcccctcctcccccatacacacctaggcttgaaatgccctacaggcccagaactttctcacatctgaaatggaggcattgcaatgaaaaggcacccacagcatcatgcaagtggcatcttgt

SEQ ID NO: 55741 - DNA, 381 bp, Homo sapiens
tcttctcttggtttacagaaattgctggtagctaactttgctttgaagtcttaaaagttcccaaacagactccaaaatgaaggcttgaaactggaacagtggggcctctggaacttaggagagattccaagtgcatgttatgggacagagtggcttgttaagaaagtatagagacatctgtctttccaccatctgactcagtaaaactgtctctttcccagaggggcctttcccagccacccccagccaaagtagcctttcccaaacggtcccgctacgctgctgctttctccacagcactcatcaatcaatctgcacgtgttccatctgtgatcaagtttccccaataggaggagaacccaacatcggcagggctctcgc

SEQ ID NO: 55742 - DNA, 939 bp, Homo sapiens
cggacgcgtgggctttcatctgaccatccatatccaatgttctcatttaaacattacccagcatcattgtttataatcagaaactctggtccttctgtctggtggcacttagagtcttttgtgccataatgcagcagtatggagggaggattttatggagaaatggggatagtcttcatgaccacaaataaataaaggaaaactaagctgcattgtgggttttgaaaaggttattatacttcttaacaattctttttttcagggacttttctagctgtatgactgttacttgaccttctttgaaaagcattcccaaaatgctctattttagatagattaacattaaccaacataattttttttagatcgagtcagcataaatttctaagtcagcctctagtcgtggttcatctctttcacctgcattttatttggtgtttgtctgaagaaaggaaagaggaaagcaaatacgaattgtactatttgtaccaaatctttgggattcattggcaaataatttcagtgtggtgtattattaaatagaaaaaaaaaattttgtttcctaggttgaaggtctaattgatacgtttgacttatgatgaccatttatgcactttcaaatgaatttgctttcaaaataaatgaagagcagctgtccttctttcctcttttaagtgttcagctgtggcatgctcagaggttcctgctggattccagctggagcggtgtgatacccttctttttcagctgttcgtgccttcctttcttgtatccaccaaagtggagacaaatacatgatctcaaagatacacagtacctacttaattccagctgatgggagaccaaagaatttgcaagtggatggtttggtatcactgtaaataaaaagagggcctgggaattcttgcgattccatctctaaaaaaaaaaaagtcgacg

SEQ ID NO: 55743 - DNA, 282 bp, Homo sapiens
gatcttcctatctactctcctatctacctacctatttaccagtctattatctacctatctacctacctattatctatttatttatctatctaatctagctatcatctatcttccataaacttactcagaaactagcacttacagctgctcaagataaatgtctttttcttgtcctgccctcaatttgtatagcctatggctgggtgagtttccctttgccccatgcaccatgactgccctgtggacaacggaagtgtctggtccacccacatctctcagaca

SEQ ID NO: 55744 - DNA, 4390 bp, Homo sapiens
ccaggagcagttccgccgggtttcactgtccgtgacttccttcggggcacctcagcaaaccaagatggagtatgagtggaaacctgacgagcaagggcttcagcaaatcctgcagctgttgaaggagtcccagtccccagacaccaccatccagagaaccgtgcaacaaaaactggaacaacttaatcagtatccagactttaacaactacttgatttttgttcttacaaaattaaaatctgaagatgaacccacaagatcattgagtggtcttatcttgaagaataatgtgaaagcacactttcagaacttcccaaatggtgtaacagactttattaaaagtgaatgtttaaataatattggtgactcctctcctctgattagagccactgttggtattttgatcacaactatagcctccaagggagaattgcagaattggcctgacctcttaccaaaactctgtagcctgttggattctgaagattataatacctgtgagggagcatttggtgcccttcagaagatttgtgaagattctgctgagattttagacagtgatgttttagatcgtcctctcaacatcatgattcccaaatttttacagttcttcaagcatagtagtccaaaaataaggtctcacgctgttgcatgtgtcaatcagtttatcatcagtaggactcaagctctaatgttgcacattgattcttttattgagaatctctttgcattagctggtgatgaagaaccagaggtacggaaaaatgtgtgccgagcacttgtgatgttgctcgaagttcgaatggatcgcctgcttcctcacatgcataatatagttgagtacatgctacagaggactcaagatcaagatgaaaatgtggctttagaagcctgtgaattttggctaactttagctgaacagccaatatgcaaagatgtactcgtaaggcatcttcctaagttgattcctgtgttagtgaatggcatgaagtactcagacatagatattatcctacttaagggtgatgttgaagaagacgaaacgattcctgatagtgaacaggatatacggccacgttttcaccgatcgaggacggtggctcagcagcatgatgaagatggaattgaagaggaagatgatgatgatgatgaaattgatgatgatgatacaatttctgactggaatctaagaaaatgttctgctgctgccctggatgttcttgcaaatgtgtatcgtgatgaactgctgccacatattttgccccttttgaaagaattactttttcatcatgaatgggttgttaaagaatcaggcattttggttttaggagcaattgctgaaggttgcatgcagggcatgattccatacttgcctgagcttattcctcaccttattcagtgcctctctgataaaaaggctcttgtgcgttccataacatgctggactcttagccgctatgcacactgggtggtcagccagccgccagacacgtacctgaagccattaatgacagaattgctaaagcgcatcctggacagcaacaagagagtacaagaagctgcctgcagtgcctttgcctaccctagaagaggaggcttgtacagaacttgttccttaccttgcttatatacttgataccctggtctttgcatttagtaaataccagcataagaacctgctcattctttacgatgccataggaacattagcagattcagtaggacatcatttaaacaaaccagaatatattcagatgctaatgcctccactgatccagaaatggaacatgttaaaggatgaagataaagatctcttccctttacttgagtgcctatcttcagttgccacagcactgcagtctggattccttccgtactgtgaacctgtgtatcagcgttgtgtaaacctagtacagaagactcttgcacaagccatgctaaacaatgctcaaccagatcaatatgaagctccagataaagattttatgatagtggctcttgatttactgagtggcctggctgaaggacttggaggcaacattgaacagctggtagcccgaagtaacatcctgacactaatgtatcagtgcatgcaggataaaatgccagaagttcgacagagttcttttgccctgttaggtgacctcacaaaagcttgctttcagcatgttaagccttgtatagctgatttcatgccaatattgggaaccaacctaaatccagaattcatttcagtctgcaacaatgccacatgggcaattggagaaatctccattcaaatgggtatagagatgcagccttatattcctatgggtgttggcaccagcttgtagaaatcattaacagacccaacacaccaaagacgttgttagagaatacagcaataacaattggtcgtcttggttacgtttgtcctcaagaggtggcccccatgctacagcagtttataagaccctggtgcacctctctgagaaacataagagacaatgaggaaaaggattcagcattccgtggaatttgtaccatgatcagtgtgaatcccagtggcgtaatccaagattttatatttttttgtgatgccgttgcatcatggattaacccaaaagatgatctcagagacatgttctgtaagatccttcatggatttaaaaatcaagttggcgatgaaaattggaggcgtttctctgaccagtttcctcttcccttaaaagagcgtcttgcagctttttatggtgtttaatctaatacacttaagctgcagtcccaaaattaggggtccttcagtcttggagactataagggagcctctgcacccagggaaaatgttaccctttacaggggggaagggtaaaccagtagggaatacagtacaatcccaaccctactgggaggggcgggagggaggtgttgccgtcactgtattaagtcgatgttgggaaacgttttaacatctggagcctttgtgggtggaaatatgtctccagttacaactccgcagtggatgtgaagaagcaaaaaaaaaaaatctattcagtctactcacaaaacagtacattgtggaatattatggggaattgtaccaaaacaagaaccatataaatgatgcctagggacaagaaagaggaacaattctatagcgcacaataaaggaaacctaagaatgggagttacaaatagtaaagaagcttttttttttttttaatttaaagtttttttatgtaagttttcccacatgatggggccttgttttgcatgttgatgaagaactacacaaagaaaactaatatagttaaaagtcagcttgccttcccgtagtagaagcaggttcttggaagttacaatttaaggtaccccaaaaaagttggaaataaaacaaaacaaacataaacaatgaagcaccctgtgaaatgccaaatgagtcactccttttaccttttttggggtgggcagggagggaggaataaatggggttgggcatatcaaactaaagatgacatcttaattttgcattgaacattaatgtagcggatataatttgatgattatacttcattagatttaatttctaggccaagatgttactttttaaagtgcagtttaaggttcaggcatgcattctggctcatagtggttgaaagtaatttaaattagtgggaaagtagcatgcttgcatcacatagagtgagattggtattcatttacctatgttgcgccagtttgtgttgcagtttaccaattcaatatagccctgcatttaaagttcctttttaagatttgtggattttatttttattaagaacatagatatataaagtactgtagtttacaggtaggccttgaaatatcttttttaggatctgttaggaataagattgatattgtattgtgtgtaacctgcacaatgtggaaagctgatatacctgtgcaaaatctttgcctctgtgctgtcagtgtgatgtgctttctgcatggttatatactactagtgattttatcaaaacttctaaaatttaaattacgtggtaaaagatctgtaaaaggctgcataaatgttagttggcacataaagacaattgtagaagttgaaaaatgattgctatatttcaatgtttattcccactcaacatactgccttctaagcttccctttttttgttcaaagcatgatcttaaagatatgtttaagttaatggatgtaatgcagggttcctacactgtattttggcgcatgttggtggccctctgtgccctagatatatgcacacagggtgcaagttaaaagctacagagtgaaagttggtttggatcctcttcatttcatttgtttagcttttctgttatttttctctacttacatgtattcctgtgaataaatccttgttaagttaacc

SEQ ID NO: 55745 - DNA, 412 bp, Homo sapiens
agatagtacaattaagtgtaggtgtttaaaaaaataaaatcttgagttttaacatttacagtgaatgtttgtgaaataaatttttaaatgactttttgtattaaaatgtactcattgattatgtttaaaagtgggagaatttgagtacactggaccttgaaaaattcgttttctataatggctaaatttgtgttttttaaagttccactattaaaatgtaaaatttaaacaagctactttaaaaacaaacataccaacaaaaataatctttcatcgctaaaaatttcactgctaaaaatttacttaagccacaatttatggttttatcatgtcaaacttgcattcataaattacattttaaagtatcaaaatgtttttaccttagctccaaattccacaagatttgctaagt

SEQ ID NO: 55746 - DNA, 423 bp, Homo sapiens
gggcaggcagctttgctgaactcaactgggtgccttcatctgtgggccttagctatgacttttaggttggctaaaacccattattctacctactggagataaggtctaacttcttctgtaaaatattagcattccccctctttaccatcccttctaccaggacatatttcttgtctttgctagtttcatagggaaaaaaagttttaaaagaggggaatgatatagaggaaggaacacattggagttgaaaggggtaataaatgctgtcggcatacccctacatctccttggcctactctagatgttattggcaggcagaacaaagaagaaccaaagttcagtttgcaagtgagggtggcctcaaatggaaaaagtttaactttctttttttttaggagaatgtctacggaaaaagactgggtc

SEQ ID NO: 55747 - DNA, 1200 bp, Homo sapiens
ggaattgtggcgcatgaacccagctgttaaaccaggtaccctgggactgccctctgcctctcagagccctacctgtcctggacttgaaggcgagcattaggcaggccttctcagcccatcttccaccaggagtgcagagccagggtgctgagaggagcagggactgtaactacagtaggaggcaactttgctggtgtcattcctgctcggattgactttgtgctccctcccatccacagctatggtagccagtatttccccagcagctctctagtggggaagagtggctagaaccaggccattctcagtcgaatttaggaagaccaagactcatgttcctgacaggacggtcattccctcatggcatcactgactcaagttctaattcctcccctcctgtttcattttggtttgaacaacctgtgcctgcagctgtttcttccaccttcctggagctcacaattggagcttcatgttcagtcttgagctcctaatgtttccagacagggcaggggataggacagccataatctatgaaagctgtgaaacaaaccctgggttatatagacctcagatggtctcatctgaaggctttgcccacttcccagtgagcagagggtttggggaacaaagaggtagctgaagagtggtggtttttccctgtatcctgattttcagaaagggctttagtctctgagctgtggctagtagctggctggctgaccaggggacgggggtctaatagggtgtctgaccataggacacctctcgtgtttggccttccctttcttgtgtgtttgtgtgtgtgtgtgcatgtacacacacaaatctgtatccccaggagtgcctcctgcagtcactgggggctcttccgtggtgcaccatcccatgagagcagatcagagggctgtggtcaggacttcctcccgagctgccctccctccctgggatgagtttcctctccacctgctccaaggtgccttacgaggtgcagctcttcacctggccacatggcatccatcaccgtgttgagaaatggtgggacgttggctggatattgtgtgctatgaatctgatttgtccaaatctggacctcagccaatgcacctgtggtggaaccttgcaagtcaaggtcatgaacaaatttcttgtaactattggaaataaactaatgaggtagaactgtcatatccaaaagga

SEQ ID NO: 55748 - DNA, 415 bp, Homo sapiens
gtgcattctgctcatactgttgccagtactgggtgccctctctccatttcctgctacctcatcccacatgtgtttacgtgaagacggtctgccacagtgggaagagtttcttgtgctcacaggttttgggctaggcccaactcaggtcctacactcctagcgcctcttggcacagccctctggtctacctctacgttcagctgcagctatggaagccagttctgtgtgcgctcattgggatgcacagagggtcccacctcacagccacgcctgtgtggctgtttttctggtcagagtattctctgaatctcagggaacctagccagcacagcccagttttgtggaattaaggcagttctcaaccaacatgtgacagaggtcaagtgtctcaggaccctggtctaacatcctttgg

SEQ ID NO: 55749 - DNA, 431 bp, Homo sapiens; identical to SEQ ID NO: 37448

SEQ ID NO: 55750 - DNA, 376 bp, Homo sapiens
cgaatatctttccctgcatcataaggcaaaaatctgctttgatagttgggaaataaaaattttttctaattagtttagtaatagttaattgaaattttctcagatatataaattttacagtaagaaaatcaaaatttaaaaaatgaacccaatatattatcatcataatatttgttaaattttgtcttaaatcaattattataggtagtctttgtttaatagtaattgctcatatatttttatctcatgaagaagactaaagaggaagagttattttttcaaataaaaaaagattacagcatatttctctgcataccatctttttacatatgaggtcagaaaagcaaattttgatacaagcattggttttattgag

SEQ ID NO: 55751 - DNA, 266 bp, Homo sapiens
gcagcaacactaggtgctttctgcctcgtggtaatgcaagccctatatggtgggtgatgtgaattctagtttgccacaatccccaccatgccacattgcctcacaagtaatcctctatcctcattatcacacaggccaagcccctggaggcactaagtttgtgacttctttacaagaagctctaggcagacaagtaatcatgttcagtccccctcagtcttcctgggtcaaggaaagctctcccacttccctgtcaaataccattg

SEQ ID NO: 55752 - DNA, 1821 bp, Homo sapiens
ttcacatgattacgaatttaatacgactcactatagggaatttggccctcgaggccaagaattcggcacgagggccccagatgctcagggtaaggagcaccaaagctgaggctggctcagagatctccagagaagctgcagcctgccctggccctggctctggccctggcccacattgcacatggaaacccaaaggcatatatctgcgtatgtgtggtacttagtcacatctttgtcaacaaactgttcgtttttaagttacaaatttgaatttaatgttgtcatcatcgtcatgtgtttccccaaagggaagccagtcattgaccatttaaaaagtctcctgctaagtatggaaatcagacagtaagagaaagccaaaaagcaatgcagagaaaggtgtccaagctgtcttcagccttccccagctaaagagcagaggagggcctgggctacttgggttccccatcggcctccagcattgcctccctcctcccactgcgactctgggatctccaggtgctgcccaaggagttgccttgattacagagaggggagcctccaattcggccaacttggagtcctttctgttttgaaggcatgggccagacccggcactgcgctcggagagccggtgggcctggcctccccgtcgacctcagtgcctttttgttttcagagagaaataggagtagggcgagtttgcctgaagctctgctgctggcttctcctgccaggaagtgaacaatggcggcggtgtgggagacaaggccaggagagccccgcgttcagtatgggttgagggtcacagacctccctcccatctgggtgcctgagttttgactccaatcagtgataccagaccacattgacagggaggatcaaattcctgacttacatttgcactggcttcttgtttaggctgaatcctaaaataaattagtcaaaaaattccaacaagtagccaggactgcagagacactccagtgcagagggagaaggacttgtaattttcaaaggcagggctggttttccaacccagcctctgagaaaccatttctttgctatcctctgccttcccaagtccctcttgggtcggttcaagcccaagcttgttcgtgtagcttcagaagttccctctccgacccaggctgagtccatactgcccctgatcccagaaggaatgctgacccctcgtcgtatgaactgtgcatagtctccagagcttcaaaggcaacacaagctcgcaactctaagatttttttaaaccacaaaaaccctggttagccatctcatgctcagccttatcacttccctccctttagaaactctctccctgctgtatattaaagggagcaggtggagagtcattttccttcgtcctgcatgtctctaacattaatagaaggcatggctcctgctgcaaccgctgtgaatgctgctgagaacctccctctatggggatggctattttatttttgagaaggaaaaaaaaagtcatgtatatatacacataaaggcatatagctatatataaagagataagggtgtttatgaaatgagaaaattattggacaattcagactttactaaagcacagttagacccaaggcctatgctgaggtctaaacctctgaaaaaagtatagtatcgagtacccgttccctcccagaggtgggagtaactgctggtagtgccttctttggttgtgttgctcagtgtgtaagtgtttgtttccaggatattttctttttaaatgtctttcttatatgggttttaaaaaaaagtaataaaagcctgttgcaaaaatgaaaaaaaacaaaa

SEQ ID NO: 55753 - DNA, 323 bp, Homo sapiens
aattcggcacgagaagatgagttgtaactacaacccatcttctcagtgggacatgttctactcccttgccccatggagagagcaaaagctggaaaaaacccaaagaagaaaagccctcacaacagcagttctggggcaggacaggtctgaaacattccaggtggatgagtgaacaatattcaacatagaaaattcccaaagacaggaaataacatcctctaggtctagttgtagaattattttctaaggagtgatcaagtgaggcagaagagggaggggagagacccatcagtgtgagttcctttgagtgcttactgtgtgct

SEQ ID NO: 55754 - DNA, 1091 bp, Homo sapiens
catttgtccccagatttgccgggctcaatgtggcatggttagagtcctcagaagcatgtgtcttccccagctctgcagccacatactatccgtttgttcaggaaccaccagtgacagagcagaaaatatatactgaagacatggcctttggagcttcaacttttccacctcagtatttatcttctgagataactcttcatccatatgcctattctccttatacccttgactccacacagaatgtttactcagtgcctggctcccagtatctttataaccaacccagttgttaccgaggttttcaaacagtgaagcatcgaaatgagaacacatgccctctcccacaagaaatgaaagctctgtttaagaagaaaacctatgatgagaaaaaaacgtatgatcagcaaaagtttgacagtgaaagggctgatggaactatatcatctgagataaaatcagctagaggttcacatcatttgtccatttacgctgagaatagtttgaaatcagatggttaccataagcgaacagacaggaaatccagaatcattgcaaaaaatgtatctacctccaaacctgagtttgaatttaccacactggactttcctgaactgcaaggtgcagagaacaatatgtcagagatacagaagcaacccaagtggggacctgtccactctgtctctaccgacatttctcttctaagagaagtagtaaaaccagctgcagtgttatcaaagggtgaaatagtggtgaaaaataacccaaatgaatctgtaactgctaatgccgctaccaattctccttcatgtacaagagagttatcttggacaccaatgggttatgttgttcgacagacattatctacagaactgtcagcagcccctaaaaatgttacttctatgataaacttaaagaccattgcttcatcagcagatcctaaaaatgttagtataccatcttctgaagctttatcttcggatccttcctacaacaaagaaaaacacattattcatcctacccaaaagtctaaagcatcacaaggtagtgaccttgaacaaaatgaagcctcaagaaagaataagaaaaaaaaa

SEQ ID NO: 55755 - DNA, 865 bp, Homo sapiens
cttgcagctgcccacctcaccctcagctctggcctcttactcaccctctaccacagacatggctcagtcactggctctgagcctccttatcctggttctggcctttggcatccccaggacccaaggcagtgatggaggggctcaggactgttgcctcaagtacagccaaaggaagattcccgccaaggttgtccgcagctaccggaagcaggaaccaagcttaggctgctccatcccagctatcctgttcttgccccgcaagcgctctcaggcagagctatgtgcagacccaaaggagctctgggtgcagcagctgatgcagcatctggacaagacaccatccccacagaaaccagcccagggctgcaggaaggacaggggggcctccaagactggcaagaaaggaaagggctccaaaggctgcaagaggactgagcggtcacagacccctaaagggccatagcccagtgagcagcctggagccctggagaccccaccagcctcaccagcgcttgaagcctgaacccaagatgcaagaaggaggctatgctcaggggccctggagcagccaccccatgctggccttgccacactctttctcctgctttaaccaccccatctgcattcccagctctaccctgcatggctgagctgcccacagcaggccaggtccagagagaccgaggagggagagtctcccagggagcatgagaggaggcagcaggactgtccccttgaaggagaatcatcaggaccctggacctgatacggctccccagtacaccccacctcttccttgtaaatatgatttatacctaactgaataaaaagctgttctgtcttcccacccaaaaaaaaaaaaaaa

SEQ ID NO: 55756 - DNA, 125 bp, Homo sapiens
gcggcacgagctgatacacatggtatgataatgacctcgtgataaacccctatagtttactaatatttttatgcagcatagtgggcattgtggtaatcttctaaacatgcattctaccccatcag

SEQ ID NO: 55757 - DNA, 349 bp, Homo sapiens; identical to SEQ ID NO: 34992

SEQ ID NO: 55758 - DNA, 647 bp, Homo sapiens
cgtcagagtagtaaatcagtgtccaaattaaacatttccaaaaatgtgcaaaaatgtcaatcttaataggaaaaaaaccctttgtacataattataaactgcccagcattcatctgagattaaaaccatttagagagaaaccaataggttaaatatagagaatttaatggctacatttaaaaatgtacattattatgtcaaagggtaaatttacaaattgataatcatagtttgcaacaattcaaagtttattctcaaatttatccaagtttacttttatttacaatgaataaaaagaaccatgtgaaatgtaagagatgtcagacattaaaagtatttttggtattaactcttataatatttcagaattcagggtagcaaattttaaaaccaataacaatagaaaaaatgtaaaccatttactaattaagattgcattaaaacaattgttggtctttaaagaagtattcttatccttagacactgtactttcaattgaatagggtgtattgcaagaatttggcccacttcatattgcccataagcctctccagctcaaatgtttcaactagtcctctcttcttattccaggtggaaaaaattccttgggaaaaggtaaggaatacatcaaatccattttggtagtc

SEQ ID NO: 55759 - DNA, 427 bp, Homo sapiens
tatgacatgattacgaatttaatacgactcactatagggaatttggccctcgaggccaagaattcggcacgagttgatatgccttcctcactaaacttaatcatttctaggcttttgatttaaggtgagaggcatgcgattctcactttcatgtgaacactcagagtccattgttgggttattaattggcctgattccaatattgtagtatctcaaggaatggaaggtcctgaggagagggagagaaatgcgaaacagctggtcagtggagcagctcagaacacacatgcttacaagttaagttcatcattttatgtggacgtggttggtggcaccctaaaacacttagaattgtaccatctgatcacagatcaccataacagatatcatcataatgacaaagtctgtaatgttggaagaattacca

SEQ ID NO: 55760 - DNA, 1564 bp, Homo sapiens
  misc_feature (1)...(1564): n = a,t,c or g
gcttgctccaagtacccttcagcatcccattctactgcaacgtggccaatgccttcctcgtagctcctcagatctactggttctgtctgctgtgcngaaaggcagtccggctctttgacactccccaagccaaaaaggatggctaaatgctcctgggagtcaggcgcactcancaccagctgcctcctccactcagcattccatggaccaaattgtgccctgggtagcctcagactttgggtattgataagccgatggatttgagtttttctaaagaatattcatattacctccttcttctaacttgccctatttgcaaacgcacttttgtagtaacaactattggggtcctgtcagacctccacggacagcaaagtggttttaatgcaagcccaagggatccttcttaaggtcttatctcaagagctctgggaggtggaagcatggggtgggatcggtggaccagggtggtaagtgtctgcacatctgcctgtccctgtatcagcggctacccaccttccaaaccactcaggacagtacccgtggcactgggcccgcagaagcaagggatgacttggttcttggaagtaatgtcgtcttgtgacattggcctgggacaatcattgtgggtaggtagttattgatcgtttactagataacccattggttctttgcctcatcctctcatccatgggtcagagttgaattcttatgtctatagacttccaatcagaagtctcactggtggggctgggggtggggtcaggcaggaggcatgggatggggaacctgagtaggtagtgtggccaagagatcagcacaacctttgcaggctgacttgctaagtctgacagtgacaaacttgtgagcttactgcagtcagtcacagaggctgttctttttcacacaccccttcatgcccggctttccccatatccacatgcagagggcgagctcataaaactacagggaagcgtgaaatgatggctttggtagctgtttactgggtaaccccactgtgacactgtccttttcatgtgatgtggaaacctacttctgtcctccaaaccatgaaatgtgtcatctagactgcagagtacttgagtgctttgcctcccgatatgccagagcttgtggtccaaagcccattcctgtgtgtccgtcctgccatttagccacagaaggctgcggagtgaggcggcagctagcctggccagtggctggtcccgtggaccgacacctgcgcccccttctgcaagcaggattttctggtgccaacactcattcatcattcccgatcaactaggaagaatttaagactgtgctaccatgtgttctcaagtggtagtttaaaaagtggatttttaaagtgcctttcaattgtctgtgaacgtctaaaggactgatttgtctcattttgactgttgagtctttaatgggtgccatttaaaaaacaaaatgctattttttaattgtcttttttttttaactatcagtgtatctttaaaagtcacccttacggtgattaaattgcactaacattcccaaaaaaaaaaaaaaaaaa

SEQ ID NO: 55761 - DNA, 430 bp, Homo sapiens
  misc_feature (1)...(430): n = a,t,c or g
ataacagccacttcctggcagtcattgtgccacttaggagccctcctcaccgctcttcctttagttccttcactctgtatagaccctgccagagcagctcagggtggagcagctgcagccatgggacctgctccaggcaaggccctatgctacacagtccctgggggtgaggattccagaggagtcaattccctacccgcccttccaggggatggccgagatgagcgttcccacagggaaagtgaaagttgcaaggctgttgcggannnnnnnnnnnnnnnnnnnnnnnnnnnnnnnnnnnnnnnnnnnnnnnnnnnnnnnnnnnnnnagtattgtcagggaagaaggctttatccaggtgctacagacagggtgaacaagagatcagtctcaaatccatcatcatcaactgacttaaattaaggggttt

SEQ ID NO: 55762 - DNA, 337 bp, Homo sapiens
gaactgggatgagtgttttatctggaaaaatatgtaaagatattgattcaatttctgtaagttaaataacctatttaatttttatatttcttcgggagtcaactttgctaagctattttcttctattttgccttaattttcaaatgctggcataaagttgctaacagtattttcttactattttaaaaattcctgctgcatctgttctttgtgtttgtagatttattcctttatttcattttagttttgggaggaagcagaaataattttgtgtgtttaatccaccacatttatgagagcaaaatcacacagaaggttcattcttccttatctataa

SEQ ID NO: 55763 - DNA, 563 bp, Homo sapiens
cttgactgctctggaggtagcggccgcggtgaggagagccatgggacgggcagtcaaggttttacagctctttaaaacactgcacaggaccagacaacaagtttttaaaaatgatgccagagcattagaagcagccagaataaagataaatgaagaattcaaaaataataaaagtgaaacttcttctaagaaaatagaagagctaatgaaaataggttctgatgttgaattattactcagaacatctgttatacaaggtattcacacagaccacaatacactgaaactggtccctaggaaagaccttcttgtagaaaatgtgccatattgtgatgcaccaactcagaagcaatgagttttctagaatacaacaagtctttgtactttttaactttaaaatctacaactctggcaaaagtcctggaaatgcagacattttccctgaactggcatattgaaaatgaatgaattacagaatagcttcatatttaaatttcatgttaaaaggtcattactgagaactaaagaacataattaagtatttctaaaggaaattagataag

SEQ ID NO: 55764 - DNA, 360 bp, Homo sapiens
  misc_feature (1)...(360): n = a,t,c or g
caggaataaaatcctgtgactctgccttaactcctgacatttgatctgactctgagacctcgtatttttgaacaccaggagcctgacattgttgggaagcattatagttaacattattacctgaatgattagaaagattgttgaagtttccaaattctacttggcaaagagatgcataaggactcttttcattatgagtctgttcatgtctttttaagtgagctgactgtctaaaagatttcccacaaatattacagccaaagggcctctgtccagtatgaattaaatagtggctttttagtttggatatagaaggaaataccttctccatttgncacaaggacatatcttatgnctaag

SEQ ID NO: 55765 - DNA, 740 bp, Homo sapiens
ggactcggaacattcaagatggtagtgagggcacatgaaactcacttcaggatgaaatctgggcagagacttattaattaattttgcatttactacctcagagctcagaagaaactccgaagtcagcatttgctttactctttctttatgattgcatctgaccgcaccaaggtgggccatgcgttgtttggtcttatacctgatgaagaaatggcaacagctgacagaaatgggtacagctcatcaaaaatgtgcagcaccggcagagggaagatacggggcaaatgtgcttcctgatgcttccatggggatgtgccctggtgtgcatctgcttgtcaggaagagtcacattgctgcttaacatgctggattgccctagtcttcagaatggtcctgagaaaacatcactacttcgatgttctactttgctttccaaggagcaaaaataactttggagccttctgggaagtgtgcctgggattcttcagtggtttcaggcagatagttgagactggggctttgatattcaaggtctttggcaagaatcccaggcttgaccaactggtaccaggtcaaagatttttgtattcttgtgaattttttttttttgtccctattgcccagggatgtcattgtaaatatatgtgcatttataaataatttttgtattcattgaccatatgtgttggctgcaatgtaaatatttttgatatgccaaaattatatgtaatatccagtta

SEQ ID NO: 55766 - DNA, 672 bp, Homo sapiens
aactaaaaactctaacaaataacatttatttttcttttacatatatatttcacagcctgaacatcacatcttcagagaaagttacttttatgccattgtatttactatttaccacacaggcattgaacattctcattaacatgataagacaatttgctggtaaacatttaaacacacagacattagtttcagtatctcaacatatttttggtcataaccaaggaaatacatcaaaataatgacaacattggctaatattttacaagcaaatatttaactctgcatagtttatacaataggctgtggcaataaataatgtcaccaatctcatcaactattaactggccacaagaagccctaacattcattttaattatgatatgaaatgctctattggtgtagtttcaacatatccttaaatgtttgggtgtttaaccttgaatacacgaaaagaaaaagtactaaactggactaagaaggtgtgtttggttaactacaaatatgtcatgttcacatagtacattcctaacatgaaggcaaatatttaaatagaaaaactagcagtccaaaaaatgtgaatgtgcaaattgtgagtaaaacattgcatttaaatttgcactcatttgcaagttacagtactagctcagtataaacactaacaggaaaaatatt

SEQ ID NO: 55767 - DNA, 409 bp, Homo sapiens
  misc_feature (1)...(409): n = a,t,c or g
gaagaaatgggcaaaggtatagacagcctatttaatgaaataatagctgaaaacttcccaggtcttgctagagacatagacatttggaagctggaaactcaaggagtcccaaatagattcaatctaaagaggtcttcccagagacaaatgatagtcaaactgtcaaaagtcaaaaacagagaattctaaaaacagcaaaagannnnnnnnnnnnnnnnnnnnnnnnnnnnnnnnnnnnnnnnnnnnnnnnnnnnnnnnnnnnnnnnnnnnnnnnnnnnnnnnnnnnnnnnnnnnnnnnnnnnnnnnnnnnnnnnnnnnnnnnnnnnnnnnnnnnnnnnnnnnnnnnnnnnnnnnnnnnnnnnnnnnnnnnnnnnnnnnnnnnnnnnnnnnncctcttcaaggagaactc

SEQ ID NO: 55768 - DNA, 124 bp, Homo sapiens
  misc_feature (1)...(124): n = a,t,c or g
gcaaattgtgtgctttcgatttgtgcatttcactgtaaagtttacttcaatttaagaaagagagaaaaaaattgatgtgtttctaaattgnattggcttcttcacatgaaaaaatggtctaatt

SEQ ID NO: 55769 - DNA, 398 bp, Homo sapiens
ggactagtttacatttctcagtgagcacctgaatttcttcctgagagctttttaaaaagtccttatgaaatatatgacagtgttcctgttttctcccagtgttttgttttctcatgctacataggaaagttgcttcccttaaatgtgctgagtaatttttctctttttatattaaaaatggaaagaataatttcccatctggctgaaaatggaattcatgaaggctttctcagcatcataactagatgagcccagagtccattcaagcctttacttaatatactaaatcactcctgataccaatcttctatgaaggagagagagagagagagacacttttaaaccatgagatatcaaaagaactcactgtcacaagaacagcaaaggggaagtcctct

SEQ ID NO: 55770 - DNA, 1031 bp, Homo sapiens
gtgttttttttttttttaatttaaaaaaagttttattaaatcatttagacttgaaagaagtcacaagttaacacacttaagtgtgttctgtacaccaccaacccaaatggattgatttcagaatttttataaataaaacataaacatatttacagtgaaaaataaaaacatgttagcaagtgagatgattaaactgttacctataatcagtttgggggaagtaccaacctacaggattacatataagacacttaagatttcattaggcttaaaaagtccatagttgaagaagttagttgtaatatatatgatccatttcttactacggcttttttcctcccaaaactagacctttcaaccaatttacataaaaagcttcattttccctttattggaggtaaaagtacaaaaagctgtaaacccaccctagaaccatctaaggaataaagctattgaatgctacaaataggactataaaactacggacataaaccgttatacagtttgtgctacttgtcctccaaaatagtgcagattcctaatttacccgccagggacaaaaatggagtcagctttttctagaaatcagtttcaaaatcatcatatctctagaaagcatatttctagaacaatacagttagtttattagcacaatggttgccaatatgcaatcgattagttttcggctcttctttactggaagcattatcacagccagaatcttcaaatactattgaagaggaggttctctcccttgaccttacataaggagaagcttcagaaggacaaagttcaaaggagtgcccctcatcattgccatccatagtcccatcttccacatcacagtctgtaaggcaactgtcctggaggttgtatgctgcatccactgactcactgatgtcctcatggtccattcctgagaattccagtggtgagaactggctctcagatgaacttgtctggtcacaggaaatccctactgaaaaagacctgcttcttttgtggtgaaggagctatgatttcaatatgtt

SEQ ID NO: 55771 - DNA, 300 bp, Homo sapiens; identical to SEQ ID NO: 37268

SEQ ID NO: 55772 - DNA, 749 bp, Homo sapiens
ttttttttttatatagaaaagtttcatttattcgaattaaattatggtatgagtttcatatacaaataaattctgtgtaaataatacaaaatgctacaaatttcaatcttgtaaaaatgcaaaaatacttgtaatactatacatatataattcctttcacatgaccaacatgtacagtagttgacacgatgcacacgcgcttcccccccacagctgaggctgctgagacagcatcaagccttcgcttctgtgacgtcagcgctccctcccgcggctgcctcacggtgagccagcaggccctccccctcacacccccagctcaagatgcttcagattatgagccatcatcaggagggaagctacctattctctggctagttagaaggcactgtcatggggaaactgggtcctcctacagccttaacaccagcctgctaaactgagaacacgcctctaccgtggagaagcgcggtacatcactggtctaactcgttttcattctgcagcgtcttcatcgctagcccccagagagtcatgctggagaaaaactgaccctctgagttcctataagtggtggaagatgctcgactgcccagggggtcaccgccgtggttgtccaaagcagccagagaggaacggatcatggccatgcatcggcctgcagtggttcgcaccggctggggtgtccacatccgagtaagcatagccctgaggctgtgtctgctgcatctggggcttggcaagtttac

SEQ ID NO: 55773 - DNA, 1105 bp, Homo sapiens
atcaagagtataatcactctgccctctgtaaggacccttacccagatacaggaaatcatgcccaatgggacctgcaacacagagtgtctttacaggcagacgtttcaggcattctctgagatgctccagagtttggtggtaaaagacccacatttggaaaatcttgacaccattattaagcttccactgcgattccaaagacttggacacctagtggctctgatggcactgctctgtggggacccacaggaaaaggtggctgaggaggctgcagagggcattcactccctgctgcatatcaccctgaggctgaagtatatcactcatgacaagaaagatcagcaaaacttgaaaagagcattgacaaaatgtcgagaattcctggagctccacagctctgccgctaaatgcttctacaactgtcccttcagaattgcccaggtctttgaaggttttcttgattcaaatgagctctgccagtttataatgactacatttgataccctgaaaaacctgaaacatccctgcatccagcgatcagcaggagaattactgctaactttggcgaaaaatacagagtcccaatttgagaaggtgccagaaattatgggagttatctgtgcccagttatccataatcagccagcctagagtccgccaacaaatcataaataccgtgagtttatttatatccagacccaagtacacagatatagtgctcagccttccttctgtgtcatccagtgccgtataacaggcacctggctgaggtgtggagaatgctgtcggtggagcttcccagcacgacctggattctgtggaggctcctgaggaagctgcagaaatgccataatgagcctgcacaggagaagatggcatatgtggctgtggctgtaagcccttgagctttgcccctctaatgtcagcccctcccaggatgactgaccccacaccccagtggagagtgttccttttggtccctctcaaagcctgcatctgtcatccatttataagtctacagtgtttctgccaagggattgacatggagggagctggggagagtgaaggagtcagaatgccttaatacaaactcgtccaacctgcaa

SEQ ID NO: 55774 - DNA, 150 bp, Homo sapiens
  misc_feature (1)...(150): n = a,t,c or g
ccaggtcttaaaccagtgtaagctctttttcctattgctctggagtgatagtttctaggatctttcaagaagtttggaagnnnnnnnnnnnnnnnnnnnnnnnnnnnnnnnnnnnnnnnnnnnnnnnnnnnnnnnnnnnnnnnnnncacc

SEQ ID NO: 55775 - DNA, 301 bp, Homo sapiens
ccgctgtgcgtggggtcaggtgtttccgtaccacagcaggagcagggcccgcccgcatcccagctgtgggcctgccggtcaggtcgggcacctactacaaaccgtagtggggtggaggctgctggaggtgggagtgaggagatgagggcagggtctcaaacagtcctgactcacagggcctggaaacaagtcctatgtgggcctggggcctggggtcctcatcctccttgttggtctactcaggcccagcccagagctgtgttccctgtctcaggtcaagcagtggcagacgcaaggcttt

SEQ ID NO: 55776 - DNA, 155 bp, Homo sapiens
taaataacgagcaaaatccagaaatatccaaatttgcttttataacccaaggcaggttcacaaggtgaggagtagtagtttttaatcactcgtattttcatttgtagcattgcattccgtgtatttaccttttctttaaacactcttgcttttaa

SEQ ID NO: 55777 - DNA, 976 bp, Homo sapiens
tttttggggtgcatttctagtggactttattgtcctgctccaacaccacagtagaaagggacctgcaagctccaagcctgtaccatgtgtcaccacagcaaaaacatgacccacttgaacacactcctgtcccacccaccggataaatatgttacaatttaaaaaaaagaatacaacagaataaattaataacttaagtgattaggcaccaacagtgatttgaaaattaaatgtcaattttaaatggtaacaagacaagaactcaagactgggcttccactagcccattttctcttcctgacaaacagtgacaattctgcgtgaaataattctagatttcaagacacaagtagccaacaaatacacaacacatgccaccataaatcacatgacagcctggatctcttggggaccccctcggcaggtaccccattgtgggtcccaggtcctaaacagcagggctagtcccagaaagacgacccccccacggaagggctttagcgctcctgagaccagtctggcttcccctgcattttatgaaggcccagatggggaaggaagaactctggaaatgggataggggtgctgggccgagatgtccccatgggagaaggggccagagggaggatgagctgagcccatgctccagtaacttcagaatggttgtgcttttgtcacaggaatggggcatactttgttaacttctacattggaaaccactaaagtcaagctaggaggggactggggataggtactgcccaccccgatcccccagaaagaagttacagaggagggagtctccccttcaagcagctgagcaccagctgtggatgggacctcagcgcagctaatccaacctcccattccacagacaggcagatcaaggacttaaggagacaccatctccctatttctcatcgttctcacttgacttaaccttgcagaagtggagctggaagtgggtgaagaaggctcc

SEQ ID NO: 55778 - DNA, 233 bp, Homo sapiens
atttgggattctttggttctacaggtgcccaagttattgatatttctaggtttgggctcacataaatagtctggttcttgagttaggaaaatgtatggtcttgttagtattttgtctgtcacatctgaggagaactcaaaagagcgttgctctatgattgttgcctgttcaaagaatagttttgttggtgaagttttctgttcttttaagttgcgtttctttttttttttttt

SEQ ID NO: 55779 - DNA, 366 bp, Homo sapiens
ctttagcctacttaatgcaaacataacaagtatgaaaacctttataatgatccacttaatagtaaatatattttctttccttatgattttcttagtaacagtttcttttctctagcttactttgctgtaagaatacagtacacaatacatacatatacaaaatacgtgttaatcaactgtttatgttattggtaaggcttctggtaaacaataggttatagtaaagttttggaggagtcaaaagttacatgtgaatttttgactgtgtgtgttgcaaaggtggcatcccaatccccttgttgttcaagggtcaactatacaataattccatgttagcagaaaagtatacaattagaccagtggaac

SEQ ID NO: 55780 - DNA, 401 bp, Homo sapiens
ggcagcgcgctgctcttctaagatggctgccgctaccggtgcggtggcagcctcggccgcctcgggtcaggcggaaggtaaaaagatcaccgatctgcgggtcatcgatctgaagtccgagctgaagcggcggaacttagacatcaccggagtcaagaccgtgctcatctcccgactcaagcaggctattgaagaggaaggaggcgatccagataatattgaattaactgtttcaactgatactccaaacaagaaaccaactaaaggcaaaggtaaaaaacatgaagcagatgagttgagtggagatgcttctgtggaagatgatgcttttatcaaggactgtgaattggagaatcaagaggcacatgagcaagatggaaatgatgaactaaaggactctg

SEQ ID NO: 55781 - DNA, 700 bp, Homo sapiens
gcggcggtgatggacgggtccggggagcagcccagaggcggggggcccaccagctctgagcagatcatgaagacaggggcccttttgcttcagggtttcatccaggatcgagcagggcgaatggggggggaggcacccgagctggccctggacccggtgcctcaggatgcgtccaccaagaagctgagcgagtgtctcaagcgcatcggggacgaactggacagtaacatggagctgcagaggatgattgccgccgtggacacagactccccccgagaggtctttttccgagtggcagctgacatgttttctgacggcaacttcaactggggccgggttgtcgcccttttctactttgccagcaaactggtgctcaaggccctgtgcaccaaggtgccggaactgatcagaaccatcatgggctggacattggacttcctccgggagcggctgttgggctggatccaagaccagggtggttgggacggcctcctctcctactttgggacgcccacgtggcagaccgtgaccatctttgtggcgggagtgctcaccgcctcactcaccatctggaagaagatgggctgaggcccccagctgccttggactgtgtttttcctccataaattatggcatttttctgggaggggtggggattgggggacatgggcatagcttcttacttttgtaattattgggg

SEQ ID NO: 55782 - DNA, 244 bp, Homo sapiens
  misc_feature (1)...(244): n = a,t,c or g
gagaaaggagtgttttcatggtggacagaattgggctatgagtgtggcagaagctgtgtcctcagtactccgtgatgacgagtgagcctctgtgaaatggacaggtgggaaaacagctacctgctggcctgcccacgcacccgccacgggcccacgctgctcagcttctcaatgtgagactgtccacacctgctaggtgtgctaaaggtgcatnntangtggactgacccnaggncctcnctga

SEQ ID NO: 55783 - DNA, 369 bp, Homo sapiens
  misc_feature (1)...(369): n = a,t,c or g
gtacaagtggcatgtatgccatcagacccagcaactctcaagtttttcatgtctactgggatgttatatcaggagaattttggttgggcctagagaagatatactccatagtgaagcaatctaattatgttttacgaattgagttggaagactggaaagacaacaaacattatattgaatattctttttacttgggaaatcacgaaaccaactatacgctacatctagttgcgattactggcaatgtccccaatgcaatcccggaaaacaaagatttggtgttttctacttgggatcacaaagcaaaaggacacttcaactgccagagggntattcaagaggctggtggtggcatgatgagtgtggaaa

SEQ ID NO: 55784 - DNA, 409 bp, Homo sapiens
aagaaatgtaaaacatgatggcattcctgctgaatgtaccaccatttataacagaggtgaacatacaagtggcatgtatgccatcagacccagcaactctcaagtttttcatgtctactgtgatgttatatcaggtagtccatggacattaattcaacatcgaatagatggatcacaaaacttcaatgaaacgtgggagaactacaaatatggttttgggaggcttgatggagaattttggttgggcctagagaagatatactccatagtgaagcaatctaattatgttttacgaattgagttggaagactggaaagacaacaaacattatattgaatattctttttacttgggaaatcacgaaaccaactatacgctacatctagttgcgattactggcaatgcccca

SEQ ID NO: 55785 - DNA, 341 bp, Homo sapiens
gaataggggaaaaaatgtattctcacaacaaagacaacgggttaaactctcctatcaaagagaacctgagatgtgtgcaaaaaagcaaagcaaaggcctccgtaacacagctgaaacaaatgacagggagggtggaagcagagaccaacagcaactgtagcgatgttagtacaagagaatcgggggttagagcgaaaacacactgaacaggaaaaaagaaaaaaaaaagaatccacactggcaaaaggtgcaagtcatcaaaactacgtaggaaccatcagcctgcatagccagcagcacggctcctaagcaacaccacgaggttacagagacacggagaa

SEQ ID NO: 55786 - DNA, 364 bp, Homo sapiens
gggattatagcaactgagaccatatatattcttaactagttttcttcccaagaaaggaattctccatttaaaatgctgtatataaaatgtttttaattagttcatttgaaaaacgctgtgtagtgccttttacagttgaaacaatattatttctattgagttggcttgtgggccatgtcttcatgtgactcagcttgtccctgaaatgttagccctcctccctcccatgcatagattgtgtggcagtcttatcaagaaaatgtgtggaacactctactctacttatattgccagattaaaactaaatgattggctgggcgtggtggctcacacctgtagtcccagcactttgagaggccaaggg

SEQ ID NO: 55787 - DNA, 426 bp, Homo sapiens
aattatttcagccagtatctgctgcatatcttattccttgctaaacacttacacgtcttcactgggaaagcttgcagtcttactgagagattaaaaataatcatagtgcaaagagattcacagttaaacgctaaaaaaagtggtaaagacataaatactggagaagcttatagaaagatgacctcagaatgagcaagagtggtcatggaaagcgttgtggcaaagacagggcagagaagtggcacgtacttagtgctgccacacatacattcaaagccctgctccacaccttgccctggccaggtccacctttgaggtgatgacgacagttgctgagaaaagagaaaagaccactggctcactacttgtttctgctgctataatagagaggagaaaatgatgaaatgctctttttaccttcctgtt

SEQ ID NO: 55788 - DNA, 195 bp, Homo sapiens
gaaatatcaagagccctaaaaaaattcatatttttcgacttaattcttcatttaagaatttatctgaaggatacacttagatagttgtgaatgagagcactgatcaacagtcatttattctgtgctgcaaaatattgctgaaacctgcttaattataggagagtggtgaaatctttgcatctccacatggtggga

SEQ ID NO: 55789 - DNA, 1024 bp, Homo sapiens
ccgcggccggttgggagtcgccgcgagatgcagcctccgggcccgcccccggcctatgcccccactaacggggacttcacctttgtctcctcagcagacgcggaagatctcagtggttcaatagcatccccagatgtcaaattaaatcttggtggagattttatcaaagaatctacagctactacatttctgagacaaagaggttatggctggcttctggaagttgaagatgatgatcctgaagataacaagccactcttggaagaattggacattgatctaaaggatatttactacaaaatccgatgtgttttgatgccaatgccatcacttggttttaatagacaagtggtgagagacaatcctgacttttggggtcctctggctgttgttcttttcttttccatgatatcattatatggacagtttagggtggtctcatggattataaccatttggatatttggttcactaacaattttcttactggccagagttcttggtggagaagttgcatatggccaagtccttggagttataggatattcattacttcctctcattgtaatagcccctgtacttttggtggttggatcatttgaagtggtgtctacacttataaaactgtttggtgtgttttgggctgcctacagtgctgcttcattgttagtgggtgaagaattcaagaccaaaaagcctcttctgatttatccaatctttttattatacatttattttttgtcgttatatactggtgtgtgatccaagttatacatgaatagaaaaagatggtgttaaatttgtgtgtaggctgggaattcttgctgaaggaattggagaaaacctgttgctgcaaaattttacatgttccagatggaaagggaagtctaagcgctttttaaaacaatttttttttgtatttaattaagcaattgcagttatctgggatttttgggtcagaattttaaattctgtttgattctccatattccagtgaataaaatacaaaagcattgtgttttta

SEQ ID NO: 55790 - DNA, 634 bp, Homo sapiens
cttttgaggaggatacctgggatgaactcctaattggtagtgtagaagtgaaaaaggtaatggcatgccccaggtgtattttgacaacggtggacccagacactggagtcatagacaggaaacagccactggacaccctgaagagctaccgcctgtgtgatccttctgagagggaattgtacaagttgtctccactttttgggatctattattcagtggaaaaaattggaagcctgagagttggtgaccctgtgtatcggatggtgtagtgatgagtgatggatccactagggtgatatggcttcagcaaccaggagggattgactgagatcttaacaacagcagcaacgatacatcagcaaatccttattatccagccttcaactatctttaccctggaaaacaatctcgatttttgacttttcaaagttgtgtatgctccaggttaatgcaaggaaagtattagaggggggaatatgaaagtatatatataaattttaggtactgaaggctttaaaaataattaagatcatcaaaaatgctattttgaatgttatcatggctattacacttttacttcctgactttaatattgatgaataaagcaagtttaatgaatcaaaaaaaaaaaaaa

SEQ ID NO: 55791 - DNA, 409 bp, Homo sapiens
aaggacgtaccttaagcatatcataattcctaatatattatcatttatgagactactgtggatatatgggttgattctatgccagatcttctaagacagtgacttctttcctttgctaagcataagaataaggatagtactacttagcaagttgtggtagatgctttcacaggaatattaatgagacagtatagtgttatatttatgacaagatctgaagtcaaattgcctgggtttgcttatttaacagtgtcatcttaagtgagttacttaacactatcattcaatttccttcctgtaaaaataatagtactttagagaaatcacttagaagaatatctggcccctaaaatagtgagcagttaattaatgtttgtattgtcttttctccctaagaataattattagg

SEQ ID NO: 55792 - DNA, 353 bp, Homo sapiens
ttttgttgttcagagaagtttattataatgtattgaaatataggtcagatatttacctcagaagcaatgtacccattagtagaaatctttcctttaataattatttacagacaaaatttattttaggccaaatatgtttgcaagaattctcataatctggacattacccacatatctttaaacattatatctatctgtagaacaaaaccccattacttagttaatgttttgtgaattcagtattgatccaaattctataaaatcttaatttaccaaaagagatttctattttttgaaattctttttttaatatagagaaggaatataaaacaagaatctgatatcagcagttt

SEQ ID NO: 55793 - DNA, 302 bp, Homo sapiens
  misc_feature (1)...(302): n = a,t,c or g
gcggcacgagcggcacgaggtcctagatcacaaagctagtaagtggtagataacaggctttaaatactgtctgttcaattccaaagtttacactctacactcttgtgttttagatagactattgctatgtctgccagcctgggaantgcggnggcacgatctcggctcactgcagcctccatctcccaggttcaagtgattctcctgtctcancctcccgagtaactgggactgcangcgcctgccaccattctnggntaatgntngnattgnattnntgnnnnanactgnattnnnccatg

SEQ ID NO: 55794 - DNA, 583 bp, Homo sapiens
ggacttctggtaccatttatttccctgtgacaataaaaaaaaactgctgtatcacagcttggagaatacacagtcatcactaagtgttaaaacaactgcataagtcaaaagcaagtgatttttcccagaaaaaaaaatgtttctcctgtgaccccttttcttcctctgtcaaaaaataccatacataaaatctccccctaaagtcaggaagcacccaatgccatgtggcagacacaagtgttgtgagcacagcacagtgggatgaggccacagtctccagttcattccctgcgcagggctaggcgcacaggtcaccctgatttataactcctctcgaaaacctttctgtgtctcctgcctggctttgtcttcgtcactgggtgccaaccatgtgaaatacaccttcactggatcgatgttccagtgtttgtggaacgatatgggaacttgatgagaaaggtagtccttagggtaatccaccggccgagcctgatggaagagagggctgtgtgtcacagggattcccaagccactaaagcacattcccaggaccatatcatcgggagcatcattgctgtagcat

SEQ ID NO: 55795 - DNA, 406 bp, Homo sapiens
cacctatgactcttctcagcaatccccattctccacccctggcctcaggcagctgacctcgtgagccacccgcctcggcctcccaaagtgctgggattgcaggtgtgagccaccctgcccggccccagctaactgttttaaatttttttagagatggggtttcactatgctgcccaggctggtctagatcacagcctttgttctgtgactggcagcttgatatttggagtccagacactttttaagtttggaaactaacttttaggtgagtgctgaaaagaagtctcctgaggttgagagcacctttagcctattacctgtaggaggtcggtcagctctctcagggaggaaaggcaataatggggttaaaggattattctttgcagggatctgtggcccagggagg

SEQ ID NO: 55796 - DNA, 321 bp, Homo sapiens
  misc_feature (1)...(321): n = a,t,c or g
gtcattttcatttataattaagtgttcctaaagactatttgtgagaaatttgtgtatacgctgttcaaaaacagcacaagaatcacaccaaagaggaactgaaatgtcctttcatttctgcatccatcaaatggatctgctagccgaatgcagggatggacatggagaggcctgtgctttaggctctgttctaccatgtaccagctttgtgaccttggataagcctctcactctttctgagactcagtattctcatctgtgaaatggagatagtaatagttgctctgcctgcttcactacagaggggngtaggatacatgt

SEQ ID NO: 55797 - DNA, 2898 bp, Homo sapiens
gtcagacgaggagtatcgcgagctcttcgacctagccctgcggggtctgcagcttctatccaagtggagcgcccacgtcatggaggtgtactcttggaagctggttcatcccacagacaagttctgcaacaaggactgtcctggcaccgcggaggaatatgcgcgcgccacacgctacaattacaccagtgaggaaaaatttgccttcgttgaggtgatcgccatgatcaaaggcctgcaggtgctcatgggcaggatggagagcgtcttcaaccaggccatcaggaacaccatctacgcggcattgcaggacttcgcccaggtgacgctgcgtgagcccctgcggcaggcggtacggaagaagaagaatgtcctcatcagcgtcctacaggcaattcgaaagaccatctgtgactgggagggagggcgagaaccccctaatgacccatgcttgagaggggagaaggaccccaaaggtggatttgatatcaaggtgccccggcgtgctgtggggccatccagcacacagctgtacatggtgcggaccatgcttgaatcactcatttcagacaaaagcggctccaagaagaccctgaggagcagcctggatggacccattgtcctcgccatagaggactttcacaaacagtccttcttcttcacacatctgctcaacatcagtgaagccctgcagcagtgttgtgacctctcccagctctggttccgagaattcttcctggagttaaccatgggccgacgaatccagttccccatcgagatgtccatgccctggattctaacggaccatatcctggaaaccaaagaaccttccatgatggagtatgtcctctaccctctggatctctgtacaacgacagcgcctactatgctctgaccaagtttaaaaagcagttcctgtacgatgagatagaagctgaggtgaacctgtgttttgatcagtttgtctacaagctggcagaccagatctttgcttactacaaagccatggctggcagtgtcctgttggataaacgttttcgagctgagtgtaagaattatggcgtcatcattccgtatccaccgtccaatcgctatgaaacactgctgaagcagagacacgtccagctgttgggtagatcaattgacttgaacagactcattacccagcgcatctctgccgccatgtataaatccttggaccaagctatcagccgctttgagagtgaggacctgacctccattgtggagctggagtggctgctggagattaaccgcgtcacgcatcggctgctctgtaagcatatgacgctggacagcttcgatgccatgttcacgcatcggctgctctgtaagcatatgacgctggacagcttcgatgccatgttccgagaggccaatcacaatgtgtccgccccctatggccgtatcaccctgcatgtcttctgggaactgaactttgactttctccccaactactgctacaatgggtccactaaccgttttgtgcggactgccattcctttcacccaagaaccacaacgagacaaacctgccaacgtccagccttattacctctatggatccaagcctctcaacattgcctacagccacatctacagctcctacaggaatttcgtggggccacctcatttcaagactatctgcagactcctgggttatcagggcatcgctgtggtcatggaggaactgctaaagattgtgaagagcttgctccaaggaaccattctccagtatgtgaaaacactgatagaggtgatgcccaagatatgccgcttgccccgacatgagtatggctccccagggatcctggagttcttccaccaccagctgaaggacatcattgagtacgcagagctcaaaacagacgtgttccagagcctgagggaagtgggcaatgccatcctcttctgcctcctcatagagcaagctctgtctcaggaggaggtctgcgatttgctccatgccgcacccttccaaaacatcttgcctagagtctacatcaaagagggggagcgcctggaggtccggatgaaacgtcttggaagccaagtatgccccgctccacctggtccctctgatcgagcggctggggacccctcagcaaatcgccattgctcgcgagggtgacctcctgaccaaggagcggctgtgctgtggcctgtccatgttcgaggtcatcctgacccgcattcggagctacctgcaggaccccatctggcggggcccaccgcccaccaatggcgtcatgcacgtcgatgagtgtgtggagttccaccggctgtggagcgccatgcagttcgtgtactgcatccctgtgggaaccaacgagttcacagctgagcagtgtttcggcgatggcttgaactgggctggttgctccatcattgtcctgctgggccagcagcgtcgctttgacctgttcgacttctgttaccacctgctaaaagtgcagaggcaggacgggaaggatgaaatcattaagaatgtgcccctgaagaagatggccgaccggatcaggaagtatcagatcttgaacaatgaggtttttgccatcctgaacaaatacatgaagtccgtggagacagacagttccactgtggagcatgtgcgctgcttccagccacccatccaccagtccttggccaccacttgctaagcagaagatcctgcagacccttatctggaggaggaagagaagcaggagagagaaagccacagccagcctgccataggatccaactggacaacgtgtgggatggacctggaaacaagcacctccccaaacacatcaccactccctagggcggggcctgtgcatgctctcccatgacatctccatgctggtttctccatagcataaatgaaaaaaaaaaaaaa

SEQ ID NO: 55798 - DNA, 595 bp, Homo sapiens
cccacgcgtccgctttgactccagtcgtgtgtatgctgtctgcaattgccttttcaaatgtttttgagcactatttgggggatgacatgaaaagggaaaatccacctgtggaggacagcagtgatgaggatgacaaaagaaaccaaggaaatttgtatgataaggcaggtaaagtgaggaaacatgcaactgaacaggaaaaaactgaagagggattaggccctaatataaaaagcattgtcaccatgttgatgctgatgctattgatgatgtttgctgtccactgtacctgggtcacaagcaatgcctactctagtccaagtgtagtcctggcctcatacaatcatgatggcaccaggaatatcttagatgattttagagaagcttacttttggctaaggcaaaatacagatgaacatgcacgagtaatgtcttggtgggattatggctatcagatagctggaatggctaatagaactacgttggtggataataacacctgggaataacagccacatagcactggtgggaaaagctatgtcttctaatgaaacagcagcctataaaatcatgaggactctagatgtagattatg

SEQ ID NO: 55799 - DNA, 266 bp, Homo sapiens
gggttgatgcatttgtgtcttagatcaccgttgtctacccaagatccttaggacattctcctttgttttcttttaaaagtttggtttactttattgagtctgcctggcgtcagttaggagtccaggttcccacctattattgttttctcggctccgcctgtggaagtcgtagtcaaggtaggactcatggttccacaggtggctccagtgtcactgtgccattgagctgccatctcagctcattgtacttctctgccaggttaaac

SEQ ID NO: 55800 - DNA, 492 bp, Homo sapiens
gtgaaactccgtctccaaaaaaaagggaaaaaaaaaggggttaatccttactttgtaaatgttttaaaaattgaggggaaaagattagaaatcctatagaaaagtgggcaaaagtcatgcacagactctttaccaaaagatgtataaacatatgaaaagatgttcgttcaacttcactcatggtaagagaaacgtaaattacaactacactgagataccatttctcacccatcagattgtcaaaaacttaaaagcttaaccgtactctctacggataagactgtggagaaacaggcattttcatacattgttggtgggaatgcaaaatgttttaagtcctatagagggaagttggcagtatttaattaaattattatacacatacctgttgacacagcaagcaagcgcagggataaataagaatttatcccttaagagtcacctccaggccgcatgcagtggcccacgtctgtaatcctagcactttggcag

SEQ ID NO: 55801 - DNA, 384 bp, Homo sapiens
  misc_feature (1)...(384): n = a,t,c or g
aattaatgcaagacatttaaactatttttttgcaaaactatttatttttaaaacaacttaaagtatatctagggtgagttaaaagtccctgtgcatctatattagatggcaggttttgtcacagagtcactgtgtattaataataaatgttgaaatggcttctccgtgtctccagaagcatttacatgtcctccttgtgagatcatggtgcacagaggtctttggactgccctgaacccgtcttatgtggacataacctattcccttcgttttctcatcatgccatgtgtttaagatctacccgcttagtgtcaagattattgagattttcatctaaatgtttttaaaattgtattttgtgtnttagtggaggacagncttgat

SEQ ID NO: 55802 - DNA, 426 bp, Homo sapiens
cgggtaccttgctcagcaccagctctttgaccagatcccggagttgaagcaggacatcagcatccccgactactgcagcctgggcgatggggaggaggaggaaatcaccatcaatgcctggtttggtccccagggaaccatctccccactacatcaggatccccagcaaaacttcctagtgcaggtgatggggaggaagtacatccggctgtattccccgcaggagtcaggggctctgtaccctcatgacacgcaccttctccataacacgagccaggttgacgtggagaatcccgacctggaaaagttccccaagtttgccaaggccccattcctgtcctgcatcctgtctcctggagagatcctgttcatcccggtgaaatactggcattacgtgcgggctctggatttgagcttctcggtcag

SEQ ID NO: 55803 - DNA, 2088 bp, Homo sapiens
cacccaccgccgggaggaggaggaggagccgagaggagctgagcgagcgcggaagtagctgctgctggtggtgacaatgtcaaataacggcctagacattcaagacaaacccccagcccctccgatgagaaataccagcactatgattggagccggcagcaaagatgctggaaccctaaaccatggttctaaacctctgcctccaaacccagaggagaagaaaaagaaggaccgattttaccgatccattttacctggagataaaacaaataaaaagaaagagaaagagcggccagagatttctctcccttcagattttgaacacacaattcatgtcggttttgatgctgtcacaggggagtttacgggaatgccagagcagtgggcccgcttgcttcagacatcaaatatcactaagtcggagcagaagaaaaacccgcaggctgttctggatgtgttggagttttacaactcgaagaagacatccaacagccagaaatacatgagctttacagataagtcagctgaggattacaattcttctaatgccttgaatgtgaaggctgtgtctgagactcctgcagtgccaccagtttcagaagatgaggatgatgatgatgatgatgctaccccaccaccagtgattgctccacgcccagagcacacaaaatctgtatacacacggtctgtgattgaaccacttcctgtcactccaactcgggacgtggctacatctcccatttcacctactgaaaataacaccactccaccagatgctttgacccggaatactgagaagcagaagaagaagcctaaaatgtctgatgaggagatcttggagaaattacgaagcatagtgagtgtgggcgatcctaagaagaaatatacacggtttgagaagattggacaaggtgcttcaggcaccgtgtacacagcaatggatgtggccacaggacaggaggtggccattaagcagatgaatcttcagcagcagcccaagaaagagctgattattaatgagatcctggtcatgagggaaaacaagaacccaaacattgtgaattacttggacagttacctcgtgggagatgagctgtgggttgttatggaatacttggctggaggctccttgacagatgtggtgacagaaacttgcatggatgaaggccaaattgcagctgtgtgccgtgagtgtctgcaggctctggagttcttgcattcgaaccaggtcattcacagagacatcaagagtgacaatattctgttgggaatggatggctctgtcaagctaactgactttggattctgtgcacagataaccccagagcagagcaaacggagcaccatggtaggaaccccatactggatggcaccagaggttgtgacacgaaagggcctatgggcccaaggttgacatctggtccctgggcatcatggccatcgaaatgattgaaggggagcctccatacctcaatgaaaaccctctgagagccttgtacctcattgccaccaatgggaccccagaacttcagaacccagagaagctgtcagctatcttccgggactttctgaaccgctgtctcgagatggatgtggagaagagaggttcagctaaagagctgctacagcatcaattcctgaagattgccaagcccctctccagcctcactccactgattgctgcagctaaggaggcaacaaagaacaatcactaaaaccacactcaccccagcctcattgtgccaagccttctgtgagataaatgcacatttcagaaattccaactcctgatgccctcttctccttgccttgcttctcccatttcctgatctagcactcctcaagactttgatccttggaaaccgtgtgtccagcattgaagagaactgcaactgaatgactaatcagatgatggccatttctaaataaggaatttcctcccaattcatggatatgagggtggtttatgattaagggtttatataaataaatgtttctagtcttccgtgtgtcaaaatcctcacctccttcataaccatctcccacaattaattcttgactatataaatttatggtttgataatatta

SEQ ID NO: 55804 - DNA, 402 bp, Homo sapiens
cggacgcgtgggcggacgcgtgggctagctttttttttcatcaatactatcgggtcatgttgagctgcagttcactgaaacacttaagtgtgttagaatttcaaatcctgtaaatttagattcagtaggcatttgttgaacacctgttcactactagatgtgcttgtataaatttctgctgtttattttactgatagtaagtttaaaatgtagaaattgaccagtagatttattgtactgaggatgattctgtagtttaggagacatgactagaatttcaatgagaacagattgtaaggacagaaataaataaataaaaagaatttctaaatgattttgttaaatgcaataacaactttatgtaaactacagatgaactgataatacgagcacatgtaagaa

SEQ ID NO: 55805 - DNA, 433 bp, Homo sapiens
  misc_feature (1)...(433): n = a,t,c or g
cgtcgacggctgggaggtccaagatcaaggtgccagcagacatggtgtctggtgagggccgtcttcctggcttgcaggtggccatcttctcatcgtatccccaggtggtggagaggaaaaacaccatctctcccnnnnnnnnnnnnnnnnnnnnnnnnnnnnnnttttgacggagtttgggctctgtcactccagctggagtgcagtgtcgagacttacacctgggaacaacagatcactgctccaagtgctccacagggggacagggccacctgggtccaggggctgtctgtccagctggggatttacataataggggagggccccggggagcctgggccagcttcctggggtacctttagctgccgttccctttntctgagctntacagtctgaaagcntttttcagcagcattggctggcancttttgca

SEQ ID NO: 55806 - DNA, 120 bp, Homo sapiens
cccacgcgtacgcccacgcgtccggtacaaacaccagactaagagttgggaccttccattgccttcctgaggacactctcatgtgtctcttagaaacacaagatttgatgctctcaaatc

SEQ ID NO: 55807 - DNA, 442 bp, Homo sapiens
ttgatgatagccacaaagcaagcaggctgtatggtagccttgaaaaccaacaggccacaatcacagtgaaaacctcaggttggcagccaccagagggaacagaatatggactagaatgttggagctccttccaagcctcatttctgaacaattaatatttggcctgtctagtggttccttgaaagaccccacttgcaaggctttttttattaggcatgattcaagagtgtgctcagtgtgaaaaactttttccttggggtatttgtcaaaaataattagagacaaatgattaactttacagctgcctatggtaataggtaacagttgtggtgaacattaagctaaccaaaaagcttaaaagtaaatgctggggaatgagatgtccatatggagcttagaaaacctccaacaaatacctgggaatctaaaaggctatgcatat

SEQ ID NO: 55808 - DNA, 411 bp, Homo sapiens
  misc_feature (1)...(411): n = a,t,c or g
ggggagcccgccccctgccccgcgtccctgccgacagagttagcactacatcagtatgagctggtcaccttccctgacaacgcagacatgtggggcctgggaaatgaaagagcgccttgggacagggggatttggaaatgtcatccgatggcacaatcaggaaacaggtgagcagattgccatcaagcagtgccggcaggagctcagcccccggaaccgagagcggtggtgcctggagatccagatcatgagaaggctgacccaccccaatgtggtggctgcccgagatgtccctgatgggatgcataacttggcgcccattgacctgcccctgctgnccatggagtactgccaaggaggagatctcggaagtacctgaaccantttgagaactgctgtggcttgcgggaa

SEQ ID NO: 55809 - DNA, 527 bp, Homo sapiens
  misc_feature (1)...(527): n = a,t,c or g
gtcttgcannaccagctatgacatgattacgaatttaatacgactcctatagggaatttggccctcgaggccaagaattcggcacgagtaacccctgcaaagtttctatagggaactgcctagtgtaacaatgaaaccagatttctcacttgctcttcatacttctattttgaggtaactgttgtaactatgaaatgcttatctgaaagtagtgcttaaacctgatttctaaaaattatcccattttctgatgatttgaaggggagaaaagccagtgtatgtaaagaaaatgttccagccaggcgcggtggctcacgcctgtaattccatcattttgggaggccacagtgggcagactgcttgagcccaggagttgaagaacgtggcgaaaccccgtatctattatttanaaaaattganaaagtanaaanagaaaagggaaaaaaaattttttanagaagatgttccaatacttgcaagaagaactcttagatggggaaacaggacagaaataactcccgcttttg

SEQ ID NO: 55810 - DNA, 453 bp, Homo sapiens
  misc_feature (1)...(453): n = a,t,c or g
nttanagccatgacatgattacgaatttaatacgactcactatagggaatttggccctcgaggccaagaattcggcacgagttctattttgaggtaactgttgtaactatgaaatgcttatctgaaagtagtgcttaaacctgatttctaaaaattatcccattttctgatgatttgaaggggagaaaagccagtgtatgtaaagaaaatgttccagccaggcgcggtggctcgcgcctgtgattccatcattttgggaggccacagtgggcagactgcttgagcccaggagttgaagaacgtggcgaaaccccgtatctattatttaaaaaaattgaaaaagtaaaaaaagaaaagggaaaaaaaattttttaaagaagatgttccaataattgcaagaagaactcttagatggggaaacaggacagaaataactccccgntttttggttgg

SEQ ID NO: 55811 - DNA, 570 bp, Homo sapiens
catttcttcctcaggaatgaaagttcatggggtagaggatagggtagaaggtgggtatttaaaactggtctctgatgcctttgtgtttctaaatggagagttcctttgtccttaggatatgacacggatttgttctgttttaggtgggagtgaatgtccccattccagtgcctttgccaatgttctcattcaccggctctcgatcctccttcaggggagacaccaatttctatggcaaacaggtaacttttgagttaaattttttgtcttttcctttaagacattttcttaaagatattcaggagcaaggattctgcaaggaagggactgccagcagcatctgtgaggtcataatcagtgcttctcagaaggttcctgtgtcagactcttgaggttcttttggaatagtgggtagcaccacttcaccagaagacgtctgatattgcaatttgctgggtgatgaagattttatcttgaagcttactttcatccccaaattcctttgtttccccactgtccagaaacaacatagtcctggaactggagggcctagaactctgggttgtattt

SEQ ID NO: 55812 - DNA, 2602 bp, Homo sapiens
acatgattacgaatttaatacgactcactatagggaatttggccctcgaggccaagaattcggcacgagcggcacgagggggtgcggagctagggcggccgagagccatggcggcgctattggcggcggcggcagtgcgagcccggatcctgcaggtttcttccaaggtgaaatccagtcccacctggtattcagcatcttccttctcttcttcagtgccaactgtaaagctcttcattggtgggaaattcgttgaatccaaaagtgacaaatggatcgatatccacaacccagccaccaatgaggtcattggtcgggtccctcaggccaccaaggcagaaatggatgcagccattgcttcctgcaaacgtgcttttcctgcatgggcagacacttcagtattaagccgccagcaggtcttgctccgctatcaacaacttattaaagaaaacttgaaagaaattgccaagttaatcacattggaacaagggaagaccctagctgatgctgaaggagatgtatttcgaggccttcaggtggttgagcatgcctgtagtgtgacatccctcatgatgggagagaccatgccatccatcaccaaagacatggacctttattcctaccgtctgcctctgggagtgtgtgcaggcattgctccattcaattttcctgccatgatccccctttggatgtttcccatggccatggtgtgtggaaataccttcctaatgaaaccatctgagcgagtccctggagcaactatgcttcttgctaagttgctccaggattctggtgcccctgatggaacattaaacatcatccatggacagcatgaagctgtaaattttatttgcgatcatccggacatcaaagcaatcagctttgtgggatccaacaaggcaggagagtatatcttcgagagaggatcaagacatggcaagagggttcaagccaatatgggagccaagaaccatggggtagtcatgccagatgccaataaggaaaataccctgaaccagctggttggggcagcatttggagctgctggtcagcgctgcatggctctttcaacagcagtccttgtgggagaagccaagaagtggctgccagagctggtggagcatgccaaaaacctgagagtcaatgcaggagatcagcctggagctgatcttggccctctgatcactccccaggccaaagagcgagtctgtaatctgattgatagtggaacaaaggagggagcttccatccttcttgatggacgaaaaattaaagtgaaaggctatgaaaatggcaactttgttggaccaaccatcatctcgaatgtcaagccaaatatgacctgttacaaagaggagatttttggtccagttcttgtggttctggagacagaaacattggatgaagccatccagattgtaaataacaacccatatggaaatggaactgccatcttcaccaccaatggagccactgctcggaaatatgcccacttggtggatgttggacaggtgggagtgaatgtccccattccagtgcctttgccaatgttctcattcaccggctctcgatcctccttcaggggagacaccaatttctatggcaaacagggcatccaattctacactcagttaaagaccattacttctcagtggaaagaagaagatgctactctttcctcacctgctgttgtcatgcctaccatgggccgttagaaacaagtttgtttaagactgactccatcctgagtaatctccctttatttttgaccagcttcatttgtcagctttgctcagatcagatcgatgggattggaatacattgtaactaaaatcttcctcaggactattaacccctgcaaagtttctatagggaactgcctagtgtaacaatgaaaccagatttctcacttgctcttcatacttctattttgaggtaactgttgtaactatgaaatgcttatctgaaagtagtgcttaaacctgatttctaaaaattatcccattttctgatgatttgaaggggagaaaagccagtgtatgtaaagaaaatgttccagccaggcgcggtggctcacgcctgtaattccatcattttgggaggccacagtgggcagactgcttgagcccaggagttgaagaacgtggcgaaaccccgtatctattatttaaaaaaattgaaaaagtaaaaaaagaaaagggaaaaaaaattttttaaagaagatgttccaataattgcaagaagaactcttagatggggaaacaggacagaaataactcacccgccttttggttgaccctcaaacatagcgcgtaccgtaaatgccacgtgggagagacctcctgcaaagttttcgtttagccccgtcgttttatcccacaatacacaagatataatccatttttatatatcccaaagttgtggcaacagcttctttcttttctgctcaatgcccactttgtttcctagtaattcatgaccactattaattctatcattgtcactgctcctgcttaagatcacttctcaaggatacctcagtaagcaatggataaatcaactttttgttatatgtgccaagtactaagtttcagggttctct

SEQ ID NO: 55813 - DNA, 642 bp, Homo sapiens
acttgaatttttttaatttacactttttagttttaattttcttgtatattttgctagctatgagcttttaaataaaattgaaagttctggaaaagtttgaaataatgacataaaaagaagccttctttttctgagacagcttgtctggtaagtggcttctctgtgaattgcctgtaacacatagtggcttctccgcccttgtaaggtgttcagtagagctaaataaatgtaatagccaaacccactctgttggtagcaattggcagccctatttcagtttattttttcttctgttttcttcttttctttttttaaacagtaaaccttaacagatgcgttcagcagactggtttgcagtgaattttcatttctttccttatcacccccttgttgtaaaaagcccagcacttgaattgttattactttaaatgttctgtatttgtatctgtttttattagccaattagtgggattttatgccagttgttaaaatgagcattgatgtacccattttttaaaaaagcaaggcacagcctttgcccaaaactgtcatcctaacgtttgtcattccagtttgagttaatgtgctgagcatttttttaaaagaagctttgtaataaaacatttttaaaaattgtaaaaa

SEQ ID NO: 55814 - DNA, 4471 bp, Homo sapiens
gattatgaactagcggaggcttgacaacattgccgagaaagcttgctgtggggttccctgcaagtgctctgggcagaggggagaccgcgggcccatcggcagcatcgggccaaagggtattcctggagaagacggctaccgaggctatcctggtgatgagggtggacccggtgagcgtggtccgcctggtgtgaacggcactcaaggtttccagggctgcccgggccagagaggagtaaagggctctcggggattcccaggagagaagggcgaagtaggagaaattggactggatggtctggatggtgaagatggagacaaaggattgcctggttcttctggagagaaagggaatcctggaagaaggggtgataaaggacctcgaggagagaaaggagaaagaggagatgttgggattcgaggggacccgggtaacccaggacaagacagccaggagagaggacccaaaggagaaaccggtgacctcggccccatgggtgtcccagggagagatggagtacctggaggacctggagaaactgggaagaatggtggctttggccgaaggggaccccccggagctaagggcaacaagggcggtcctggccagccgggctttgagggagagcaggggaccagaggtgcacagggcccagctggtcctgctggtcctccagggctgataggagaacaaggcatttctggacctaggggaagcggaggtgcccgtggcgctcctggagaacgaggcagaaccggtccactgggaagaaagggtgagcccggagagccaggaccaaaaggaggaatcgggaacccgggccctcgtggggagacgggagatgacgggagagacggagttggcagtgaaggacgcagaggcaaaaaaggagaaagaggatttcctggatacccaggaccaaagggtaacccaggtgaacctgggctaaatggaacaacaggacccaaaggcatcagaggccgaaggggaaattcgggacctccagggatagttggacagaaggggagaccctggctacccaggaccagctggtccaaggggcaacaggggcgactccatcgatcaatgtgccctcatccaaagcatcaaagataaatgcccttgctgttacgggcccctggagtgccccgtcttcccaacagaactagcctttgctttagacacctctgagggagtcaaccaagacactttcggccggatgcgagatgtggtcttgagtattgtgaatgacctgaccattgctgagagcaactgcccacggggggcttcgggtggctgtggtcacctacaacaacgaggtgaccacggagatccggtttgctgactccaagaggaagtcggtcctcctggacaagattaagaaccttcaggtggctctgacatccaaacagcagagtctggagactgccatgtcgtttgtggccaggaacacatttaagcgtgtgaggaacggattcctaatgaggaaagtggctgttttcttcagcaacacacccacaagagcatccccacagctcagagaggctgtgctcaagctctcagatgcggggatcacccccttgttccttacaaggcaggaagaccggcagctcatcaacgctttgcagatcaataacacagcagtggggcatgcgcttgtcctgcctgcagggagagacctcacagacttcctggagaatgtcctcacgtgtcatgtttgcttggacatctgcaacatcgacccatcctgtggatttggcagttggaggccttccttcagggacaggagagcggcagggagcgatgtggacatcgacatggctttcatcttagacagcgctgagaccaccaccctgttccagttcaatgagatgaagaagtacatagcgtacctggtcagacaactggacatgagcccagatcccaaggcctcccagcacttcgccagagtggcagttgtgcagcacgcgccctctgagtccgtggacaatgccagcatgccacctgtgaaggtggaattctccctgactgactatggctccaaggagaagctggtggacttcctcagcaggggaatgacacagttgcagggaaccagggccttaggcagtgccattgaatacaccatagagaatgtctttgaaagtgccccaaacccacgggacctgaaaattgtggtcctgatgctgacgggcgaggtgccggagcagcagctggaggaggcccagagagtcatcctgcaggccaaatgcaagggctacttcttcgtggtcctgggcattggcaggaaggtgaacatcaaggaggtatacaccttcgccagtgagccaaacgacgtcttcttcaaattagtggacaagtccaccgagctcaacgaggagcctttgatgcgcttcgggaggctgttgccatccttcgtcagcagtgaaaatgctttttacttgtccccagatatcaggaaacagtgtgattggttccaaggggaccaacccacaaagaaccttgtgaagtttggtcacaaacaagtaaatgttccgaataacgttacttcaagtcctacatccaacccagtgacgacaacgaagccggtgactacgacgaagccggtgaccaccacaacaaagcctgtaaccaccacaacaaagcctgtgactattataaatcagccatctgtgaagccagccgctgcaaagccggcccctgcgaaacctgtggctgccaagcctgtggccacaaagacggccactgttagacccccagtggcggtgaagccagcaacagcagcgaagcctgtagcagcaaagccagcagctgtaagaccccccgctgctgctgctgcaaaaccagtggcgaccaagcctgaggtccctaggccacaggcagccaaaccagctgccaccaagccagccaccactaagcccatggttaagatgtcccgtgaagtccaggtgtttgagataacagagaacagcgccaaactccactgggagaggcctgagccccccggtccttatttttatgacctcaccgtcacctcagcccatgatcagtccctggttctgaagcagaacctcacggtcacggaccgcgtcattggaggcctgctcgctgggcagacataccatgtggctgtggtctgctacctgaggtctcaggtcagagccacctaccacggaagtttcagtacaaagaaatctcagcccccacctccacagccagcaaggtcagcttctagttcaaccatcaatctaatggtgagcacagaaccattggctctcactgaaacagatatatgcaagttgccgaaagacgaaggaacttgcagggatttcatattaaaatggtactatgatccaaacaccaaaagctgtgcaagattctggtatggaggttgtggtggaaacgaaaacaaatttggatcacagaaagaatgtgaaaaggtttgcgctcctgtgctcgccaaacccggagtcatcagtgtgatgggaacctaagcgtgggtggccaacatcatatacctcttgaagaagaaggagtcagccatcgccaacttgtctctgtagaagctccgggtgtagattcccttgcactgtatcatttcatgctttgatttacactcgaactcgggagggaacatcctgctgcatgacctatcagtatggtgctaatgtgtctgtggaccctcgctctctgtctccaggcagttctctcgaatactttgaatgttgtgtaacagttagccactgctggtgtttatgtgaacattcctatcaatccaaattccctctggagtttcatgttatgcctgttgcaggcaaatgtaaagtctagaaaataatgcaaatgtcacggctactctatatacttttgcttggttcattttttttcccttttagttaagcatgactttagatgggaagcctgtgtatcgtggagaaacaagagaccaactttttcattccctgcccccaatttcccagactagatttcaagctaattttctttttctgaagcctctaacaaatgatctagttcagaaggaagcaaaatcccttaatctatgtgcaccgttgggaccaatgccttaattaaagaatttaaaaaagttgtaatagagaatatttttggcattcctctaatgttgtgtgttttttttttttgtgtgctggagggaggggatttaattttaattttaaaatgtttaggaaatttatacaaagaaactttttaataaagtatattgaaagtttcctgggtgtgacgttcttggcagtcttgtttccatagcagcgattgtcagaatcacccctaggctggggaaactgggtttggttctggccccatggagctgtgcaacaccctttcgtttccagtggaggaggcaaaagagctttatcagccagtgtgcaaagagacccggctgggagacaaggcatccccccggcttggtggattccagccccacatgct

SEQ ID NO: 55815 - DNA, 403 bp, Homo sapiens
  misc_feature (1)...(403): n = a,t,c or g
tgactgcacaattatacatttccagtagggttccagtttatccatattctcaccaatgcttttatttttctgttttttaaaattatactgatcataggaggtgtaaagcannnnnnnnnnnnnnnnnnnnnnnnnnnnnnnnnnnnnnnnnnnnnnnnnnnnnnnnnnnnnnnnnnnnnnnnnnnnnnnnnnnnnnnattttgggaaaatatttattcacatttttgcccattttttagttgggttgtcttttnttgctgttgagntgtaggagntctttatattttctggatattaaaccctcatcagataaattatttgcaaatgttttcttccattctgttaattttcttaatgttgtcttttgatgcacattggaaaaatttttaaaatcaatttcccg

SEQ ID NO: 55816 - DNA, 451 bp, Homo sapiens
ggcacgagggcatcatctgtgaaccaggaaatggggccttcatcagacaccaaatcagctgatggcttgatcttcaatttcctagcctccagaactgatgtgaaaggtggccagaagtgaaatggttggtcatgagtcactctgtttgccagttaaaatggacaaagaagactgcacagaaacctgtggccagaccaggaaatggaaaggaggggaaagtctcaaatttcttgttcaaggatctgaaaatccaacagaagatccagagcaaactcaaaataagagtgagcatttttggaaatgtgatcaactgacgcaaaatggcagcaacactggaaggaagaatcaggaggatatcttagaagataaccacagaatctttgcaagagacacagaagactaccttacacctggtttccacaggagaaatggctcaaaatatgttattagt

SEQ ID NO: 55817 - DNA, 213 bp, Homo sapiens
  misc_feature (1)...(213): n = a,t,c or g
gggagacacttgaactcgagaaagactcacatgaaagaagcagagcagtggggcctggagattaagagcttggactctggattggaaaggctcagtttcagtatctgataccttgtactatacgccttggacagattccttaatttctctgagtctgtgttttcctcatctgaaaaatactgacagtnngctgggcacantggctnttgnccg

SEQ ID NO: 55818 - DNA, 316 bp, Homo sapiens
gccaaacctggtattatttacaggtagttttgttgttgttttgtttttaaaccaaacaggttgacccattcactcaatctgagttaggaaatatattccaggcacaacctatcaggcggttgcctgcaagatcccagctgaaagcatcgctgggacaaaggtgatgctttggcagccaccctgttggctccgtccagcccacacctcagttgtctcaagctgctctttcagtgggaatgtgagatctggtagcagaggctcatttcaccccaattttctatttcagaaaaaggggccgggtgcagtggctcaagcc

SEQ ID NO: 55819 - DNA, 889 bp, Homo sapiens
ttttttttttttttatgatttgtttcagttttattttcctgtctcagtttcagtaaaagattcagagaactgattgacacacatcataagctatcacccatataccctaaatatacactgtttatgctttttctttttcacggaacaaggtgacactatctttgttcaaaccaaagtgaaaaggaagagatacaataattttaaaaagaggggtgtgtgtggtctttcactctcagatagtgaatgtacgtcaccacaacaaggaaaaagcgctgaggaagaatgtgcatcccacaggtcagagagtcaagcaggaagtaccagtagagcacctccaaatatagcaaatttggaacaactaggcattactgtgaaagaacttcctagtttttcatttgtctgccaccacattgctacattggaatttaagccctcttcacagtgcaaatatcaaaatgagccaagtcagggttttatggcaatcttttgctaaaatatattctattttaatatacatgctataaaagtatgctaaaaaggtcaatcgagagctccattaaaattaataatttgcttttttacatataggataatgtacattcaattctaaaagtatatttgagaaaagctattactgtgatcccaaatatttctagcttcctattttgtttataataatattgattttataacacacatattcagtaatgctttcttataattctggatttcaatgcctcaccaattattttaaatacaaatgtggggggatctgtgtatctcaaggagttcttactcatgcaaactactgagtttttaatgtaagttcttataaaattttcattttattctttaaactttggtagcctaaattttttttatgaccaac

SEQ ID NO: 55820 - DNA, 619 bp, Homo sapiens
ccatgtactctctgttcatgggagctgctgcccccacctccagtctgaccgcttccatttatttaagaaaaatccgacacagtggtgggtagaacccgagagaaaaatggctgtgggatggggtaggggcgacactggctcccttctgcatttgcccaccctgaagtccctcacagcattccctggtgccctctactcccctcccgggttccgtcttgtggggcataggtggctgcctgccctgtgctgcagagggaagtcgcagtcagcagggtgacgggtggctaaggcgtagtagtgttgaccttgctgtgggggacggggaaggcaaggaggtccccaggcctctggctctggggtgtgatttggctagagatggatccaggactctttcccctttaggtccctgcccaaagcccttggggcagaggtgggagtcctgagaactcaggaaggtgcctggcttggcaccagacctctctgtagagtcagctcccaggtcctgggaggcacccgaatgccagcagatgctacaactgtccccctaacccccagatatttcgtccacagcaagatccttggcagggcaggcagctgccacctccccaccctgcaggac

SEQ ID NO: 55821 - DNA, 970 bp, Homo sapiens
ggaccctctcccctgcagtaaagccaggggccctggcctgatggggcccccatggggagctggagcctgccctgcagcctggagaagagggtggctgtggtgggccgtgctcatcccctgctaaggaacaggagctgctgggccaggtctgcggcagtgctggggtggcaccaggtgggcaatggtaggtggggtggcttgaggtctgggagggtggcctggccagcaggacacatgcagacccctggctttagtctggatacaggctccctctttcctcccaatcctaagctcctgacaagtggccaggtggctctgggccctcctgccccgtgcctaggtcaggggtcctggaataccccgtagctctggcaccaccacactggcctctgatggcaagacttggcccctccacctgtccctaacggacggcaggtcaggaaagccaggactcaggggagaagcaaacccccaggattgaaggctagggttctagggcctttgggtggggagggcccgggccggacagcctcagctccgtcccctgccccacaagattcacctgggcctccagtcccacgctggccccaactgctgcagctctcggcttccgcccaacagcctctggaggtgaggcgggagcatgccctcagcgaggctgggcggcgggtcctgctgtgccatctccctgtgcgcctgagcagatcaatccaccagtgcaaaacagggctaacggcacctgcaggacagcagcacgctccatccctcatgctcagctgcctctgcggccacggacttctgcccttcatctgctctctcttactctcctgagcctagcccgtccgtaagctccctcccctgcctggttcccagggcaggctgactcagttgactgcttggtccaagcctggccctggcacttgtcagggtcagcctaaggagatgggaataaagaggccagagagcacca

SEQ ID NO: 55822 - DNA, 3497 bp, Homo sapiens
tttttttttcggtgtagcagacatttaattcttatttgccaactcctgagctaggacctgggaacacaaagttaaataggacacgattctagtcctctaggcaccaacggtcttggaaaggaaggcagacaagtaaactggccatttcaatactatgtggtcgttacaatgctagaggtaggcacagggggcgcagtgcaagggaggaagggcgttaacatctgccacctacttccaggtgccaagcactgttatcaacattattccactttattccctggtgattatgaaaaggcaggtattgatattcacactttaacagacgaggaaacagcctcagggagataagcttacttgacccagtctctctcctagtcccatatcagaaccaagattcaaacaggttttgtttagaaaatctaggatttttcagccataccaaaataaagtagcctcagggaatcaaaacattcacgaaagaaggtgacttctgaactgagtcttgcaagaattctggaaattaacctggcagttgtatcaggggtggtaaggggacggaacagcttgagcaagagtgagagttccttggggtttggggagggaggaggaaaaatgattttttacttaagaacaaatagcaaggaaggtttgtgagcctatgattggggggtggaggggaaagcctgaattctatccagtaatccttgaagggttttcatccaagtggcctgatgggatttgcattttactctggaagatgacttggggattggcaggaagtaaggacactttttttcaagagaatatagccctaaactaaggtagtagcagtggggatataagtggataagttctagatatacttgggaaatataattggaaggacttgtggactgataaagatatatttaagatgtgcagtcagtaggacttgttgattgaggacttgttgattgaaggtggggtgaaaagatgacacaggtttctggcttggttggaaaaagcatagcatcatttaccaagaagaaacgagatggaattgtttggggttgggaaggtggacgatgaaatgttgagtatcacgcatcttacatttgaggtatcaatcattattggatagaaagtcttatttagtgagatggtaatggttgtagatgtcagtgatttgttccaggggacaatgagtaaactgagaagagcaaaaatctacaaatggagcaatgaaggtcagcattccatgaagaagcagaaattgatgagagaggaagacaagagtagtcagagaagttaagacctggaagctaagtaaggagagggagtgggcaactatgatggaaaggccataaagcaaagattgagaagtatgcactggaggccattgtttctggatgtcagggtaggaaagagtaaacggtgacagtagaggtctccttgcagtgaattggggaatgaatatcaagtgaaatagtgcacagagtctgtatacaaccctttggaaaagcctgattgaaaagagaaagatgagatgcggagggagaggcattcaaaaaatgctagttacagcatcttattgaggaatctaaggcaggagtagggagacctgagtatgatggagcatggtagggttgggagtcaagtcaagctcacagcatttcagggttagggagataagctgtctgcagcagtcaatagttgagggttcagcagggcttccaacagggcagaataagggactgaactgccagcttcagggcaggggacaagccatctctcctgataggaaagggtcaggggttgagtagagtcttcagcaaagctgggaagttgggtgttccccagcctgttacaggatcccagccaggaccagagcagaaaccctggccctctacctcttcatccagacaggactcatggcagccacgggttacatcaaagagtcctgccccatgctgctggtagagccttgggttgagaaagccaagaggggggcggccactaaggatcctgtgctcattgatcaaggataggatccccccaaacactggagtagaggccgaggttccggacacccatggaatgggcactctgttgctgaccacccagtagccatcagaaagtgcagccacatctgggtaggcacggccactggcattgaagtaactggatggtggcaggtgggggctagagctcaggaacttcgttacagcttcctcctggtatgaaggccgtgggaacacattgctgaagccaccaccactgatatagtcaacaatttcatttgtgatgaggaaaggttcctggaaggatgtgcctcccactgtggtgacataggggctggaggcagggaaggtagggcggaactggtgtcttccagagacagaccaacacccggccccaactgtcaccttgaggcgaagagcagggtgagaccccgagcggcagccttcatgagctcaagtgttgacccgcttggatgtaggcgctgctgagggagtcctcatcatctccatagctcacagtatgcacatgtggcagggctgactcattactgagcagcatgagccactgcaggaagggctcctgtccctcatgccggccagggctactgtagacccaggtggagatgttggcaccagcactcatcaggtactgcacatctagactggcctcaatcccggcccggccccggccctgttgtccaaccacacgggctactgatgcctgatgtgcaaagttgccaccgaagaggcgcatgaactgagccaggtctgagtcatggaaatactgctccaggaactgggcacaggcttggctgttattgctggtgccagagcccacgtcttgtgaggtcaagttgtatcgcttacggatcacagagggggttacccccagatgcaggcctacagtccctgtcacctgcggctcaggacgttgcctcagggatgatgttgggggaaaacggtgcagtccccccacaaagtccacatggggggccaaggcctgtggaagctggtagggatgtggggaccttacaacatgggtttccgtaggtcctcccacatagtgatgaaactcagccccagggagcagcagctctgcttgtcggatgctcagccagcaagtcagaaagtcctgtgtgatcacagaatggcacttctgggctccggctgccaagagccatttttgcaccgtgtggagggtcagtggggatggcctcaccagatcagccacattctctagggtcaggtattttccgtattgaggagagctgggatccgacacagcctgcaccagctccgagagtctttccacattctgctgtctcagggcaaaggtgagactcagctcttcctcagggtccgcacggcccagggacacccagcctgggggcagcgtcctccgctggtcgggctccgggctgtaactgcatttgccagagaggatgagggcaaagagccctaggaggcaggcttggagtcccattctgcccttccgcg

SEQ ID NO: 55823 - DNA, 361 bp, Homo sapiens
  misc_feature (1)...(361): n = a,t,c or g
ccgaattcgcggatccgaattcgcggccgcgtcgaccaggaacctcatcctcaggcacttaccctgcaggtataagggacttacagttagggacagtcttcctctgactctccaccccactgactcaccagcttctttcaatactcaggtgaaaacatctttgcaccctttgctattaagaaagagactggacacagtctataagaatgaaaatcaccagaaacaccatttttgtttgcaagagacagttatgttgtcctacaacgaaagcacaagatttttaaatggcaagttacagagttttgctaagatttcttctttgggaataccaatctgtccctnanataccaancacctttgg

SEQ ID NO: 55824 - DNA, 424 bp, Homo sapiens
  misc_feature (1)...(424): n = a,t,c or g
cgctgcggtgaccttgaagcctaggcgcgggccgagtggagccgccgcagtgcagatcttggtggtagtagcaaatattcaaacgagaactttgaaggccgaagtggagaagggttccatgtgaacagcagttgaacatgggtcagtcggtcctgagagatgggcgagcgccgggatccgaggtgccgggtgacaaggccgccgaggaacagggagatgaccaggatagtgaaaagtcaaaaccagcaggctcagatggtgagcggcggggggtaaagagacagcgggatgagaaggatgaacatggccgagcttactatgaattccgagaggaggcttaccacagccgctcaaagtctccactgcctcctgaagaagaggcaaaagatgaggaggatnttnnnngtttntnnntgttttcttt

SEQ ID NO: 55825 - DNA, 90 bp, Homo sapiens
tcccagcccagagcattttacaccagatgtcaggacattgctggtaggaacagcagttggagcagaagctcggggtgtggtcatcaggga

SEQ ID NO: 55826 - DNA, 447 bp, Homo sapiens
  misc_feature (1)...(447): n = a,t,c or g
gaaaaatgtagtttaccccatgactttctagaagttagaacagtagagcgattttgagaataagccccggattcatactgctggaagttaaatcacctcctaggccagcatctctcagtctttcatgtgtatccagattacctgtagatcttcagatgcaaactgnnnnnnnnnnnnnnnnnnnnnnnnnnnnnnnnnnnnnnnnnnacaagctcacaggggatgtgtatgctgctaccgcactttgagaggtgacagcctatgatcactaannnnnnnnnnnnnnnnnnnnnnnnnnnnnnnnnnnnnnnnnnnnnnnnnnnnnnnntaattacctgtgtcataggattcattgtattaggtaaggggattggtgcaaaacacttagtatacctgaatgcttagcacattgtggttaattaattattggtatcgtccaaaaaaaac

SEQ ID NO: 55827 - DNA, 286 bp, Homo sapiens; identical to SEQ ID NO: 40661

SEQ ID NO: 55828 - DNA, 410 bp, Homo sapiens
cccagagacttaaggggcgtcgcggggaccacttatcgttatccgggtaacctctgctgggcggctctgcgcagctgtgtcctcagcctcctgcctctgacacaggacgccctgtgtcgtagggtcaggtcccctgcccgctccagcggggaactgtccgtgagcgtgggcatcagggctcttgtgccgtcagaacctgggagtcatggaagtgcccgcgtaaggcgccctccgtcgagcctcactcagcctgctagttagccagccttgggcccagacgcggctgctgtcctagagaactgcacgctttctgctctcagaggatctgtgttcacacacacacacacagtctctctcgctcaaagttttgcataaaattctaaggtcttcttggatctctgcagttcacc

SEQ ID NO: 55829 - DNA, 600 bp, Homo sapiens
  misc_feature (1)...(600): n = a,t,c or g
gacttcttcgcccagcagcagcacttgacccctgacaagatctaccacgtcacagtgatgccctgctatgacaaaaagctggaagcctccagacccgactttttcaaccaggagcaccagacacgggatgtggactgtgtcctcacaacaggagaagttttcaggttgctggaggaagagggcgtctccctccccgacctggaaccagcccctctggacagcctgtgcagcggtgcctctgcagaggagcccaccagccatcggggagggggctcggggggctacctggacacgtgttccggacgcggnccgaaagctntttggaatccatgtggctgaggttacctacaaacccctgaggaacaaagacttccaggaggtgacactggagaaggagggccaggtgctgctgcacttcgcaatggcgtacggcttccgcaacatccagaacctggtgcagaggctcaaacgagggcgctgcccctaccactacgtggaggtcatggcctgcccctnaggctgcctgaacggcgggggccagctccaggccccagacaggnccagcagagagctcctncagcacgtggagagactgtacgg

SEQ ID NO: 55830 - DNA, 321 bp, Homo sapiens
  misc_feature (1)...(321): n = a,t,c or g
gatcttattgtttagtagagcaaattctatcacctcattctttttgtttttcttgaaactctgttgcccgggttggagtgcagtggcctgatagctcactgaaacatctgcctcctgggctcaagcagtannnnnnnnnnnnnnnnnnnnnnnnnnnnnnnnnnnnnnnnnnnnnnnnnnnnnnnnnnnnnnnnnnnnnnnnnnnnnnnnnnnnnnnnnnnnnnnnnnnnnnnnnnnnnnnnnnnnnnnnnnnnnnnnnnnnnnnnnnnnnnnnnnnnnnnnnnnnnnnnnnnnnnnnngtactcggcccatctcattctt

SEQ ID NO: 55831 - DNA, 1076 bp, Homo sapiens
aggtgccgagccctgcatgtggagccctcccaccccacccccagatagagggaaataaccaaaaaactaccaaacaacagaaacccacactctagactgaaaccccaaagtgggcttgatgggtgggtttgtgtttcaaggggaaagtgaggcagaggttctgaaaagggtctctgtttttgtgttcatgtagccataggcacatggagcagaatacttaagcctggcccccaaatgcccctgcacacacacgtgccacacctgcgctgattcttgtgtgtgctgcacccccaaggtgtgtgggtgctggctgagctttgggccgggaaggcagcctgggaatctgaggctggagacaggggtttgaggtgggggcctctctggaagcacatttggagggaaagacaagagagccatgaggagagggctgaggagggcagaagggctaggcagggggcaaattgagcccctcccttccccagtttttctctaagatatacagtgcaatagctccccacccctcagttgacgccagccctgtaaagctggccacagtgtgcagggagaatggggagagggtcttcagtgaggtggctggggcgagagtcggcctggacttccctggggtgctccaggccagagctctttcattggggcgagtgtggtgaggggacgtccttggtcttgcacgcacactacctgggggagtcaacactgggatggtctgtggggtgggagggcctacggatgggtccgtagaggtcccacctccctcattcctccttggcccctctccctagcttctcctgttagctccttctgctcctgaccccacctccttgctcttggcgcccctattgtctctggctacctccttgtcccaccacctccaggctgcatcccaccttccctcttggctactgtaattgtaaatagcgacctttggaaaacgttagcggtgtaacagtccaggaaactgtttttttttgttgttgttgtattgatatgaaatgagattctatttttgtcaaagtatattgtaataataatgactcaaacggcccgtactgtaaaaa

SEQ ID NO: 55832 - DNA, 130 bp, Homo sapiens
cccacgcgtgcgaaaataactactttattataaaatctatttgggaagtacagaaaaaaatcttgtactaccactatccagggataaaatactatttttattttattttatttttatttttgtaagacag

SEQ ID NO: 55833 - DNA, 1285 bp, Homo sapiens
cccacgcgtccgcggcgcctgcgtactaagacccgtgtgcagcagcggcggcggcggtagaggcggcggcggcggcggcagcgggctcggaggcagcggttgggctcgcggcgagcggacggggtcgagtcagtgcgttcgcgcgagttggaatcgaagcctcttaaaatggcagatgacttggacttcgagacaggagatgcaggggcctcagccaccttcccaatgcagtgctcagcattacgtaagaatggctttgtggtgctcaaaggccggccatgtaagatcgtcgagatgtctacttcgaagactggcaagcacggccacgccaaggtccatctggttggtattgacatctttactgggaagaaatatgaagatatctgcccgtcaactcataatatggatgtccccaacatcaaaaggaatgacttccagctgattggcatccaggatgggtaccctatcactgctccaggacagcggggaggtacgagaggaccttcgtctccctgagggagaccttggcaaggagattgagcagaagtacgactgtggagaagagatcctgatcacggtgctgtctgccatgacagaggaggcagctgttgcaatcaaggccatggcaaaataactggctcccagggtggcggtggtggcagcagtgatcctctgaacctgcagaggccccctccccgagcctggcctggctctggcccggtcctaagctggactcctcctacacaatttatttgacgttttattttggttttccccaccccctcaatctgtcggggagcccctgcccttcacctagctcccttggccaggagcgagcgaagccgtggccttggtgaagctgccctcctcttctcccctcacactacagccctggtgggggagaagggggtgggtgctgcttgtggtttagtcttttttttttttttttttttaattcaatctggaatcagaaagcggtggattctggcaaatggtccttgtgccctccccactcatccctggtctggtcccctgttgcccatagccctttaccctgagcaccaccccaacagactggggaccagccccctcgcctgcctgtgtctctccccaaacccctttagatggggagggaagaggaggagaggggaggggacctgccccctcctcaggcatctgggagggccctgcccccatgggctttacccttccctgcgggctctctccccgacacatttgttaaaatcaaacctgaataaaactacaagtttaatatgaagccccc

SEQ ID NO: 55834 - DNA, 323 bp, Homo sapiens
cttagtctgtccatgtgaatgtgctgtgtggaagagttaaagggcccaactaaatgttccagtgattccaataggtattccaaattaattgctgcttgtacatttaatagttatgttaggcttccagaatcactttaaataggactctttttaaaagatgggggaagagagtaattggtaatcagatggacagagtctctgtaacagaaaaaaaagggtgttttctcttgcatatctgaggtgaagtgtgtattctgtgtgctcttagcaattggcagtcctcttgcttaggtttacaggtgtatgtgaaaatagacctgagt

SEQ ID NO: 55835 - DNA, 489 bp, Homo sapiens
cacaaggaaatattaacagatccctccccttcttttaggattattgtgagaattagaagagttaatatatgttaggggcttgatacctggcatgtaataagagctaattaagtgttcactgttataatttctcataactacagagtagtttgatatttcagggagaaataatatatgtttgtttcccactgctttcacaacaaccctatgttgtaattagcactgttccactggcacctaaagacacggaggctctgggagatttctggccctaggccacgaaggcccacttgggactcaagctgaggtcctgtgattccatttgggagcaggaggagggatttgcaggtgatcttcctgggcctcctgagagcagctcaggtgcccaagatggactcaggcaggcagctctgctgtatgtgaagcccagtgagggcgagtgggggggcatgctacagggagattaacttgtacctgcagcatggcccc

SEQ ID NO: 55836 - DNA, 589 bp, Homo sapiens
  misc_feature (1)...(589): n = a,t,c or g
gccaggatgttcggggcacctcagaaaaccttcctgagaggtctgtccccttacgcaagagcctctgctcccccactttcctgtggagcctcctcaccatgggcatgacccagctgcggatcatcttctacatggctgctgtgaacaagatgctggagtaccttgtgactggtggccaggagcatgagacaaatgaacagcaacaaaaggtggcagagacagttgggttctactcctccgtcttcggggccatgcagctgttgtgccttctcacctgccccctcattggctacatcatggactggcggatcaaggactgcgtggacgcccaactcagggcactgtcctcggagatgccagggacggggttgctaccaaatccatcagaccacgctactgcaagatccaaaagctcaccaatgccatcagtgccttcaccctgaccaacctgctgcttgtgggttttggcatcacctgtctcatcaacaacttacacctccantttgngaaccttgggccctgaaaaccattgttcgaggtttcttccantcagcctgtgggagtctctatgctgcagtgttcccatcca

SEQ ID NO: 55837 - DNA, 350 bp, Homo sapiens
ggaactcctgactacaggtgatccacctgccttggcctcccaaagtgctaggtttacaagggtgatccatgtacccggcctcgtttttaaacaattttttaaaaatggagatgaggtttcacagtgttgcccaggctggtctcaactcctgagctcaagtgatccgcctaccttggcctcccaaagtgctgggattacaggcgtgagccaccatgctcagcctggataatacctttttgctgtgtatgggggcaacagttagaatttagagaccttaaaactagtataaattctttcacagtggatatgatttgctctccatttgagaaaaagtttatgcatgtcactga

SEQ ID NO: 55838 - DNA, 954 bp, Homo sapiens
gcgtccgccatggcttgcactatgcacatccccacctcgggcgcaccgggcagccctgggacgctggcgctgcgcacgccccaccacgcgctgggactcagcagccgctaccacccctactccaagagcccgcttcccacgcctggcgcccccgtgccggtgcccgccgccaccggaccgtactactccccctacgccctctacggacagagactgaccaccgcctcggcgctggggtatcagtgagggcggccgggagggcgagcgagggagaggagggagagggggaggggaggagtccagggagaggcgggatcacggcccaggctgctgacacccgcgcgtggggaggactcgggccacgaaaggaaagaaatgtataccgtatctatctacccgacagcagcgaccgagacccggtgggacactccccttctccccactttcacctccccacccaaactttataaaagttgaaaaaatatcatttgactttttatagaaaaaaaaaggaaaaaataattgagaaagtgttcatctgaggactgcatcggtggacactggtatttatttatgttagctccaagcggaccggtggttcaaaagtgcattatttagtttgagctctgtaggtaaaaaggaggtgggaaaaattttaaaacttgagggtaaaaatgtggaaaacaaaccctcccatcccttgtagattataaataaaagcaaaaccgccacagaactagaggtcttctctttaatgttactttaaaattgctatgattgtattgtacgttatttaatgtctgattgaaacacaaatttacatgcatgtttgttacaaaaaaaatgataaaaaaagtcacaatttgtcagctctgatttcaaattgcaattatttttaaggtgtataccatcgaagagaatgggtatttttttgtatgtattctggaagaaaac

SEQ ID NO: 55839 - DNA, 372 bp, Homo sapiens
ccctcctttcctcaacacagcccctctccctcggccgcatcctgccccttgctcctggaaagccagagtgctgcccctcctcgccgatgctggggactctcctaaagcaggaaaactcactcctaatatggttgctttagttcaccgagatgctgtttccagctgtagcctggaaccaagggacttggatcctgactgacttttctgcctcaaactctaggaccatgaacaaaccagacaattaatatgaaatttcagcagcttaaggcacttgctagggtttttacagctgcttggtgatcctgatcctgataagctcagcacatcttggcctcagtgtgtttgtccaaagccgtcaaagctgggtatccc

SEQ ID NO: 55840 - DNA, 329 bp, Homo sapiens
  misc_feature (1)...(329): n = a,t,c or g
ggttttaccttgcaacccagtatacatatatgtgtgtaaatatattcattaaaaaggtacaggacctctcccctctcccctctctcctctcccctctcccctgnnnnnnnnnnnnnnnnnnnnnnnnnnnnnnnnnnnnnnnnnnnnnnnnnnnnnnnnnnnnnnnnnnnnnnnnnnnnnnnnnnnnnnnnnnnnnnnnnnnnnnnnnnnnnnnnnnnnnnnnnnnnnnnnnnnnnnnnnnnnnnnnnnnnnnnnnnnnnnnnnnnnnnnnnnnnnnnnnnnnnnnnnnnnnnnnnnnnnnnnnnnnnnnnnnnnnnnnnnagcctcgg

SEQ ID NO: 55841 - DNA, 341 bp, Homo sapiens
ggcttatgctttcctctagaaagcatgaatatgttttaataagactttcattaatattaaagctgtacataaatagcattttaaatgcagctttcctgacatgaaattttaaagaaatttaaagaaaattttaaagaaaaattaaatatttttcttttgcattactgcattcttttctcattatttgaaaattctaattcagaatcttcctcaaaaatcaatttagatatttcttaaggtaacaagttatgattgattgattgattgatatagagacaaggtctccgtgtatttcccaggctggagtgcagtggtgtcatctcggctcacttcaacctccg

SEQ ID NO: 55842 - DNA, 360 bp, Homo sapiens
gctctctcaggattgaattgtaagtcatattttttaattacccttcttgtaataattcctctacctctgtagtcatgtttttcttttttcattttgtcttgtccccagaatgtctaacaaaacagccaaatatacctctgtaaagacagagggtaaaataatgctagttctgtgagttctctcttcttgtgcaaatccataaactgccaccaatctgtagtcattttaattgcccctaaaccgaagagcatcatggcaactacctttcccctcatagagtgacactatcactagtcttattgaggccaaagttataaagatgggctctcgatctactaatattaagtaaaatgggtttgg

SEQ ID NO: 55843 - DNA, 361 bp, Homo sapiens
ggttagatagaggtcatcagccgggttgattgtgcgggttagatagagatcatcagctgggttgattctgcaggttagatagaggtcatcagctgggttgactatgtgggttagatagaggtcgtcagccgggttgattgtgtgggttagacagaggtcatcagctgggttgattctgcgggttagatagaggtcatcagctgggttgattgtgtgggttagatagagatcatcagctgggttgattgtgtggcttagatagaggtcatcagctgcgttgattgtgtgggttacatagaggtcatcagctgggttgattgtgtgggttagatagaggtcatcagctgggttgattgtgtgg

SEQ ID NO: 55844 - DNA, 474 bp, Homo sapiens
  misc_feature (1)...(474): n = a,t,c or g
annnnccngctatgntatgattncnaatttaatacgactcactatagggaatttggccctcgaggccaagaattcggcacgagtgctgttgtctctccctgcagccttgccacgatcctgttgtcaccccagatggctacctgtatgagcgtgaggccatcctggagtacattctgcaccagaagaaggagattgcccggcagatgaaggcctacgagaagcagcggggcacccggcgcgaggagcagaaggagcttcagcgggcggcctcgcaggaccatgtgcggggcttcctggagaaggagtcggctatcgtgagccggccctcaaccctttcacagccaannnnntcgggcaccagcccagatgatgtccaacctgggcccagtgtgggtcctccaataangacaaggacaaagtgcttgccagcttctggatcccgtcgttacgcccgaagccaaggccaccaagctg

SEQ ID NO: 55845 - DNA, 1298 bp, Homo sapiens
  misc_feature (1)...(1298): n = a,t,c or g
cggacgcgtgggcggacgcgtgggagagtgtcagggagggtgctcttgttaccccatgttccagaggaagaaactgaggcccaaagagggacaggcacttgagcttggtcacagtcagaagggtggaggggagtcagccgtcagcccctccaccaagctgccactcagtgaccaggcctgtctgcctctcaccctccagggttgacaactccctgtgggttcagcccgtggccccagcacacaggcagcggctcccaactgcctgtttctctctgagtcccccacccccaccaccgcgttgtctctgtgcctctctctggggctttggagacggacatgtctcctgttgctccgcccttcatcactctgccatctctgtccccagcggcctcgggctatgggacccagaacattcgactgagccgggatgccgtgaaggacttcgactgctgttgtctctccctgcagccttgccacgatcctgttgtcaccccagatggctacctgtatgagcgtgaggccatcctggagtacattctggcaccagaagaagggagattgccccggcagatgaagggccttacgaggaaggcaggcgggggcacccggccgccgaaggagcagaaggagcttcagcggcgcggcctcgcaggaccatgtgcggggcttcctgggagaaggagtcggctatcgtgagccgggcccctcaaccctttcacagccaaggccctctcgggcaccagcccagatgactcanatgatgtccaacctgggcccagtgtgggtcctccaagtaaggacaaggacaaagtgctgcccagcttctggatcccgtcgctgacgcccgaagccaaggccaccaagctggagaagccgtcccgcacggtgacctgccccatgtcagggaagcccctgcgcatgtcggacctgacgcccgtgcacttcacaccgctagacagctccgtggaccgcgtggggctcatcacccgcagcgagcgctacgtgtgtgccgtgacccgcgacagcctgagcaacgccaccccctgcgctgtgctgcggccctctggggctgtggtcaccctcgaatgcgtggagaagctgattcggaaggacatggtggaccctgtgactggagacaaactcacagaccgcgacatcatcgtgctgcagcggggcggtaccggcttcgcgggctccggagtgaagctgcaagcggagaaatcacggccggtgatgcaggcctgagtgtgtgcgggagaccaaataaaccggcttgggtgcgcaaaaaaaaaaaaaaa

SEQ ID NO: 55846 - DNA, 445 bp, Homo sapiens
cgagatcttctctgtggcggagacagccaggttggcagctgacgggacagccggggtctattttgttgcgggttttcagcaaatccagggctggtctggaggcgcgaaaacttaaggcatacagaacgatggagtatatggcagaatccaccgaccgcagccctggacacatcttgtgctgtgagtgtggtgttccgataagtccaaatcctgccaatatttgtgtggcctgtttgcgaagtaaagtggacatcagccaaggtattccgaaacaagtctcgatttcgttctgcaaacaatgtcaaaggtattttcaaccaccaggaacttggatacaatgtgctttagaatccagggaacttcttgctttgtgcctgaaaaaaatcaaagcccctctggagtaaggtacggcttgtagatgcagggctttgtttggactgagcct

SEQ ID NO: 55847 - DNA, 439 bp, Homo sapiens
gggaggaggccacagccaggccagagagagtggcgtggggcagactgactggtcaggtgtggaggccggagagttccttaaatcaagggagcgtggagttggacaggcagactggacacctgaccttgggctgagaaacatggccccaggggcagtctgcagtcctggagagtccaaagagcttggggtgggccatatggactggggtaacaatctgggcctgagggatttggaggtgacctgtgacccagactctggaggttctcaggggctacggggatgtggagtggggcatatggactggacccaggacttggcgccccagaatgtggagctctttggggctccaagtgaagccagggaacatggtgtgggcggcgtgagccagtgcccagacccggcctgaggcacaatggcagcttgtctcctggctggagcc

SEQ ID NO: 55848 - DNA, 875 bp, Homo sapiens
agaagaactaggtgaacttgaagcaaagctccaatgaaaacctgcgcagaaatattgaaaggattaataatgaaattgatcagttgatgaaccaaatgcaacagatcgagacccagcaaaggaaatttaaagcatctagagatagcatattatcagaaatgaagatgctaaaagagaagaggcagcagtcagagaaaaccttcatgcctaagcaacgtagcttacagagtttggaggcaagcttgcatgctatggagtctaccagagagtcattgaaagcagaactgggaactgatttgctttctcaactgagtttggaagatcagaagagagtagatgcactgaatgatgagattcgtcaacttcagcaggaaaacagacagttgctaaatgaaagaattaaattagaaggtattattactcgagtagagacttatctcaatgagaatctgagaaaacgcttggaccaagtagaacaggaacttaatgagctgagagagacagaagggggtactgttctcacagccacaacatcagaacttgaagccatcaataaaagagtaaaagacactatggcacgatcagaagatttggacaattccattgataaaacagaagctggaattaaggagcttcagaagagtatggagcgctggaaaaatatggaaaaagaacatatggatgctataaatcatgatactaaagaactggaaaagatgacaaatccggcaaggcatgctattgaagaagaaagaagagtgtatgaagaaaattcgaggaactttggatcacttccccaggaagcatttgaaaagtaccagacactgagcctcaaacagttgtttcgaaaacttgagcagtgcaacacagaatta

SEQ ID NO: 55849 - DNA, 633 bp, Homo sapiens
gatggaccctgtgcattgtggcctgccttggtgtcctagaattggagccagtctttagcttaatgtctgaagtatttatacggccaatatgtgttttcttatgtcagaccacactgtctttttgaatatcagttcatttcctctcaccgagtgcttttcggtgagaggcaaagagaaagaatgaacaatcaagtattgacagactggcattagcaggacagagccatactagtgacaagggcatcccaaggcacttgcccagagctgcagagttgtgtgtgccatacctgcggctcaaagggaaggccttctatcccctgagtttctatcagctgaaaatggcaactgctgtctcagtaaaagctctgtcttgactgcagaggctccaaaagcattcacagttgagggggagaaagacagaaagaagaagccaaagataacctgatccctgcctgtctgttggcacctgtcatcctctgggcttctgctcccaaaagcaagtctggatgactgagttttgtgggacatgggcactcccggagacagcagtggccaccatgggcacccagagttttgcccaagtacttgaatgttttttgttgaggcaaccatgtttccccaagtaggtaggcc

SEQ ID NO: 55850 - DNA, 329 bp, Homo sapiens; identical to SEQ ID NO: 43236

SEQ ID NO: 55851 - DNA, 304 bp, Homo sapiens
gctaaaattaatgagagaacttgaattaccaggtattgaaacactgtaaagccacaatcatgtaaacagtatgttataaccatgggaatagaggtctgtgatacagcagaaaaaagtgaaaaaaagaataactgtattcataaaaatttaaatgtggagtcactgggggaaaggattaaatattcgataatgtagaaacaactcacctatttggagaaatgtaaatttagagccttatctcatgccatataccaaaatactatttagatttgattaaaaaataaaaatgtaaataaagaaaagt

SEQ ID NO: 55852 - DNA, 345 bp, Homo sapiens
ctggaccacctgcccccctcgatacagtgtgaaattcgcccccgggaagttcccaggggccatgcatgcgatgtggatggggtcctcttggctgcttgggtacgggggcaccagccggatggatggtgctgggatcgccaaggagccagctgcaaagagcaagatggtccagggcatctctctctgcgtttggctgggaaatccggctgaggccagaggggcccaaggctccccgccaactcctcctgtgaggcgtcgacgcggccgcgaattccagatctatgaatcgtagatactgaaaaaccccgcaagttcacttcaactgtgcatcgtgcaccatctcaa

SEQ ID NO: 55853 - DNA, 144 bp, Homo sapiens
aaaagagtaacagctgaggtcaagataaatgcagaaaatgtttagagagcttggccaactgtaatcttaaccaagaaattgaagggagaggctgtgatttctgtatttgtcgacctacaggtaggctagtattatttttctagt

SEQ ID NO: 55854 - DNA, 864 bp, Homo sapiens
tttttttttttttttttgcaaagaccacagtgctttactttttgtcttaacagaggagataacttgagggacagcccccaaggcgccaggtagccttcaggggcgggcagggttgggggaggtaggagactcggaccggcagccctggctccagcttcatcatctgtgtcttccctctctggccaggctcttcgaggggatgcaggaggctgggcacggtgagctggcagggggcttggtcttcgggtgcccagcaggttgtcagctcctgtttctgatggactcacctgcaatgattccggcataaccgggacagctgcctgcacttgccactggtgaggatgatgatgcctgtgatgaacagcacagctgcgaccaacagcccccgtttccggagggtgtgttcatcatagaagaaggggtcatcctcatgaaaaccagatggcttgagggtctgggggtctgtctggacgtctgtgcttggggatggtctctcagagagcgtcgtggtgtcatcagtgggatgagctgctttggtgctcttgtgtgtctctggatctgtcactagaggcccatccgttccttccagttgctgggtctgggtctggggttgtggtgtttcatcagcaggcccaggttggggtcggagaggtgggctggagttctgtgtagactgcatctggggctcgtgtcgggacctgaatgtccatgatagttgagtctgctgaagaactggacgtggtatctttcaacgtctgtcctctggtggggagaatcaggccaacgatggtgagaagacacaggcgaccagagggcgacatgtcggagctgggggtcctaagccggcagcctcgtggagagagg

SEQ ID NO: 55855 - DNA, 522 bp, Homo sapiens; identical to SEQ ID NO: 22040
  misc_feature (1)...(522): n = a,t,c or g

SEQ ID NO: 55856 - DNA, 6886 bp, Homo sapiens
  misc_feature (1)...(6886): n = a,t,c or g
cgtcgactttttttttttttcttttttgcatttctcatttttatttgacagaaaaagttgctcttgctgtacagattttaaaaaaccaaaatgcctttaagaaacatgaaaagttggggggaggggttcacaacctcatgggggacagtagggaccaactaattccaactcctgccccttccttccaagaacaccttatacaacctccagtcccaaccaccatcacaatcacccctgggaacttctggatacaagtggggccatgcctccctggccctgactccaggctggggtatcctgaactgtatcctcccctcccccaactcccatctgcattccctcccaccccaaaccccccagaacacatgaaccaggaagaactcacggagattaacatttcacaggaacaaagaaaaaaaaaaggggagggaaagggagccctccatccaagggctgccaaggttcaaaggagagcagacaaggaccctcccacggctctgctggggaagaagggacactccttgtggctccagagcattgggtgtggtggaatcccccaaagacaatttatggagacctggaggagcggtgtctcatgggccgagggctaggtgtctccctcctgcgcttgtggctgggggagcggctgtccccacgctggcctctccgggaaccccgctcactgctgctgctctgctggtcccgtggtgagggctggggcgagggacggcgacgctccacaggcgagtagctgagggaccgagagtccctgagggagtctattggcttccgggggctgcgggacctggggaacacagtaggacccaatagcaccacaccctttcaagcacacgggccagcactcaggaccacccgcccaggtcctgaccaccaaacctcacaccacacagggccagcctcagacccacctttgtccgctcactcacccatccgcccgcacaccatccaccgagtgcccagtgggccagncacagggtgcagcgggggatgcaaagataaagacagtccctgcccttgaaggagctcagtggtgaagaaaggcacgcacggcccccgtgtgtgggaagcagggctggatgtgcgtggctctggggaccccaagggagggggacatggggcaaggcagggaaggggcagggcagtcttctcgaaggtgctgttttgagcggagtcttgcagaacgaggagttcaccaggcggacaaggaaattccaggcagaaggaacagcatgtccaaaggcatgggctctccttagactgcaaggcgctgggtgtggctggagcacagggcatgtgtgggggcgggcaggaggagaacagcagggcgggcaaggcccgttggtgaagagcctcacacgccactcccgcagaggtggggctttgtcctgcaggccacagggcgtcccgaaggatttgtggagtggagggaagtagccagatgtgcgttttagaaaggtccctctggctacatgtggaagagaatggcgtggagacggggagacagggaggaggctccgctcgccagggggtggcttcttggggcttgcaggtttgggcaaggcctgagggccaggcttagcaggggaaggggaggaagacgacgaggaggaggaagatgaggaggaagaagaagaagaggaagaggaggaggaagaagaggaggaggaggaggaggaggaagatgaagaggaggagctggaactggaactgctagagcgcctcttccgtttggctggggttggctccggaggacgtccctctcgaacagcctcctttggggctggggtggggctggggaccctcttcagtgccacctcaggttgcacaggaaggctagagccctctgagtcactagaactggagccagaggaggaggaggacgacgacgacgatgatgaagaggaggaggagctagaggacgacgacgacgaggaggaactccgccgctcctttgctggctgcagggcggctaatgcagaaggctgctgggccccagtagaggcaggtggctcccccacatcagagtggggcaccccaggggcagggacagagagcatgccattgtgatcaccagcagaggacgtggtcgttgccactgccccagaggaaagggactgagaccctgctacaggggtggtctgggcaatcaaacaacgggattggtctgaaaaagcagaaggcacaggagacctcggctgatcctgtgctggagggagaagagactgtgaaggagcctggcccattctagaggaaggggagggagcccgttcagaggtcatcctagattggcttggggcagacggtggtgttctggacctagctcggtcaaggagcggtggtgaggttctgccactgacacgctcgtaggcagaaaggggcaccctggggctggtgaggtttgcaccagacaatgctggagccatcctagcactggtgaggctcgcgggggccaaggctgcggcggttctggagccggcaatattcacaggagctgtggcatgtgcagaccgaggacccaccaggtttgcagaggctggagcctgtggtgttctggagctggagggatagtttgcagcagttggtggtgtgccagagcctgtgagactcagagctgccaaggcagctggggttctggcccctgctaggttcacagctggggctgtgggagtgcgagggtcagccaggttcacagccgaaggtgccaccgctgttctggggctggccaagttcatggccgctgctgcagctggcgttcgagagtcagccaggttcactgctgttggaatggcaggtgtcctggcgctggctaggttcatggctgccgcagaggctgcaggaatcctgctggcaaggttggctgctggtgcggttctgagactcatgagaggcaccggggctggaacctgggacattcttgcagcaaggccagcagcagacatggacggaggaggccgagcggtgccaagactgatagctgttcagggcaagtgcaatcctggactgagcatgattttctggcacagatgttctctggtggtcaggtattcggggacctggaccatccatcatggagccgccggcttgctgcaggacagacatgggtgttctagagctgccaaggggttcaagcattccaggtgatctgcagcgatcaagaggtgttggggacatgctaggacgactgaagcagctcattctggaactgttgagtgctactggaggtgtccgtgaaccagaatgatttcttgttgctggaggagtagcagatcgtgaacgatcagaactacttccagatgcagaacgcctgcggatggctggaggagatcttgttaaggaccgtttaccccgagctgttcgtggagtacgggatctggagcggcggcggatagcaagtggtgagcgacttcgagaacgtttgcgtggtaacagtggcgttcgagatctagagcggcgccgaatagctggaggtgtccgggacctagagcggcggcgtgtcactggtgaggttcgagagcgggaccttcttcgagttactggagatgtgcgagatcgagatctccttcgggtgaccggagatgttctggatcttgatcttctgcgagtgataggcgaagttctgcttcgagatcgcctcctggttactggtggagtcctggatctggaccttctgcgagtcactggtggagttctagaacgggagcggcggcgtgttgttggcgttctagaccttgaacgacggcgggttactggtggcgttctggatctggatcgccttctgctcactggggatgctcttgaccgggatcttcgtcgagtcactgaagtcctggaccttgaccgtctccggctgactggtgaagttcgagatctggacctacgtcggcttatcaggggggttctggacctggatcgccggtgagtggctggagaggctcgagatctagagcgtttccacggggctggtgatgtgcgtgagcgagaacgcttccgactggttgggggtgtccgagagcggcctcttcggcgtcgagaggaggtccgggaactttcctgccgggcaggtgaccttgagtgataaccagagcctcccctccgccgccgagtaacccgcgaccttgaccggctccgctgtcttcgccgagaggttgactgagaagatccagacctatctcgacgtcgggttgttcttgttttctctctccttgagcgggaacgggacctctggagtccacgaggctttggcgaaggagagcggcctctccttgaggttgtcttagtgcgtggagatgaagctgagcgccgtcggcgtgaagacctcgatttttcggctggctccggggaagacactgagggacttctccggtgccttgggggagttctagagcgagtttctggtgaggatgaggcagagcggcttctacgggacagtctggccttccttgttagctccggagatgatcgagagctgcgacgtcgaggtggtgtacgagacttggtcttgggctctggtgatgacctggaacctctgcgagcagttctggatttgggcggatgttcaggagaggactcggtactgctgcttccttcaggagaagggcctctgcctttgcttgatgaacctgatctgcttcgtctgggaaaggcccgaagggctggagctttaggttcaggagaggaatcagaaccactctgtgccctgggtgctgctcttggcttatctttcacttcaggggaggaaccagacctactgcgccgaggggatagtcgagatttgctgtcaacctctggagatgatccagaccgactcctctgccgaagtggggttcgtgtcttggctttagaatctggagaagagtctgactcacttctttcctgaggggatgcactgggtttcacatcaagttcttgagaggatcccgaacgacttctctgccccaggggagtccgagccacagttttctgatcaactgatgattctnacccgcttctttctctctggggggtaagacacttgttgttgagctctggggatgatggagaacgactcctcggcctaggagtctgaggcaaagctttcggttctggggaagaatcacattcgcttctccctctagatggcgttctaggtatatctttcattccaggagaggacccagacaggctgtgcctcgagggagtcccagacccatctctaagtcctggagaagacccagacctgcttctccttgatggagttctgggtaaaccatctttcatttcaggagaagatgcagaactacttctttctctcgagggtgttctgggtacagcatcaagcacaggtgaagagatgctctgatttgaagacatccctgccttttccactgcatctggggataactcagaactgctgtgtccagaggatcttgtcgattgttctttcatgtctagagatggatctgtttccagctgattaagaaacggtccattcaaatcttctttaacctcagaagaaaatccagtattcatttctgtaccaagtgggcctgagtttctaaattctaaaggtgatccaaagctgttctccctgagtggggagttagacagttctttatgttctggagaaaaatgtggcccaccccaagatgaggccattgaagggacttctactgcttccaaagaagcctgtgactggctctgatcaagagtcaaagacacagcaggcctttcttctacttcaggagatgattcaaagttacttgtggacatttctttaagttctgaagacaaatgagacaggatttggcctgcgggttcttcagacttctctaccacctccattaactcttcatcttggcttgacgtaggcaatgcactattttgctcttttgtttctggagatgacccagcaccacttctttctcttggcggggttctaagtgtgtctttgaataccagtgaagactcaggcctatcctgtactggaaagggactaaatttgtctttctgtctaggaggtgatgcagtagcatcctcctgagggggtaaggccattttctcttttgattcagcagtctccaatctactctgccccaagagagaattcgagtccactgtaggatatgaagaagagtcagactggaacctgctctgctcaggagacattccagatttcaacataggactcgctgagaactcacctctatcttgtcttattggagatctggatgccagctcagtgactggagatgaagacctggaccgacctcccttaggtgatgtttgagatttgctctgcagagatggtgattctgaatgactctgtctcacttctggacttgaagtatcagatctgtggtctggtgaagtttgagattgtcctttcagttgcagagatgagacaccaaaatagctctcgcctggtggtgtgctagattttactcctgcacagagagagagggatccagggcaactttgaactagtgagtctttagacttctcttggggacatggtgactttgatccagaaagacttggccccggtggagtttgggcctttactttggggtatggtgaaatagaccctgagtgactttgtcttggcggtgtttcaggtttcactttggtatctggtgaggaggacccagaatgactgtatcttggcaacaatctggattccacattggagcagggagatactgatctgcttcgccgtggagttgttctcgacgtcaccctactaggacttggagaagaggagccagaatggcttctttgtcttggtgatattattgccttcactttgggttgtggagatgatgacctagatgggctctgtctgggaggtgtgctagatttcactctaggaggagaggaccctggtcga

SEQ ID NO: 55857 - DNA, 313 bp, Homo sapiens
ctgctgcatagtagatggcaatgacaggaaacatcctgatcattcgtcctgaagactactttctgttactgctaaaatttaatagtattatcatcctgcctcctaaatttttacatcaaaataattgttaagcacaggacttagaaaataatttgaaaggcgatgtcatttaaaataatttttaaagtgattttgtagattcatagcactacactttataaatacctcatctgaagaaacctttgtgttagacgttcccaaatagctgggcaaactgcccatgaaatgatctcagttacaaactgtgatttct

SEQ ID NO: 55858 - DNA, 1276 bp, Homo sapiens
tgacagaacaaccagtttatttgcacataggtagcttctgtttgaaggaaggtaaagttataaggaaactcaaatactataagatgtgtcaaggtatttctccagaattaattgcaaagctagtgctgaaggattttaatcagcttctaaaattttcttctcaataagacatatgttttgattacttagggaagattcctcatttttatttgccctttatgcatttaatccacatgataggacattaaaaattaatataaagaaaaatcgtgctcatactgtacatctatttctgtgcttggaactacttgttaatagtttttatcgaagctgtcagcaataagggacataaaactgctgtatttatacattgtggaattgaataaacagcctaatttttttttttctagtatagggtacttaagcatttccacttttggaagaaaagtgtattagtattttatattgcatttcatttaaaaggacagtttttttttttttttgtaaatccattcattgaaatggtttctaaactgtataatgtaatttggagcctatttagtaatagaattaaatgtcctatgtagtgctacaatttttgaattagaaagtgatcaaatgtaagaaaaaaatttaaaaattcagcccagaaaacaaaatagtgtattaaattagtttaatgtaaaaggaatttataagatttttttcctcaatatagatacctcacttgaaaagaaagccccagcatacttaaagtagttctagtacacatgtcctagaaaacagttgctaaatgtaggacatcttttgaggaattagtttatgagaaataaaattttacttgtttttactatcctgttagaagtatttgtttatcctgataattttaagccaacatagtagtcttaaattacttttgaatttctaatctgtgaaggcagtaaatgaaatatctgttctgcaactgttgaaacaaataattggctacattgaccataattaaagttaaaattttgccaatgatgtacagttttatggttaaagttgctgtggttggttgcattacatgacacagaaaactgtcctctacctcacgtgaaataaatattttatatggttttactaaaaataagactcatgtatctggtcacctagtttacaaattttgaattatatttattgaaacatgacatactgtgctctgagcttatacctcaattgtattttgtgctgttttccattttcatgccttgtaaataacttgtatagattgtgg

SEQ ID NO: 55859 - DNA, 354 bp, Homo sapiens
gtgaggaccaggcgaaggaaggtgcaggagctccagtctctaggctttgggcctgaggaggggtctctccaggcattgttccagcacggaggtgatgtgtcacgggccctgactgagctacagcgccaacgcctagagcccttccgccagcgcctctgggacagtggccctgagcccaccccttcctgggatgggccagacaagcagagcctggtcaggcggcttttggcagtctacgcactccccagctggggccgggcagagctggcactgtcactgctgcaggagacacccaggaactatgagttgggggatgtggtagaagctgtgaggcacagccagggaccgggcctt

SEQ ID NO: 55860 - DNA, 169 bp, Homo sapiens
taatccacaagccatttctacttaactttgcaatgaactgtacctgaccctagatccctcccagtttggccctccggtatacaagggcctcctataggcccttgtgatttctctggggaaaaggaggactggagttgatcatttattgaggccatcagaagcggatggc

SEQ ID NO: 55861 - DNA, 672 bp, Homo sapiens
gcataattaaatagtcccaccatcattttctgatacttggcaattggttgaaagagtttatctaaagcctggaatccatagaaggcagtctctgtgtaaggggttgttcttattatgcagatgaagcctccaggtagcaggcttcagagagaattgattgtaaatgtttcttatcagacttaaaaaggtgccagactcttagttaattctctcctggatcaggaaaaagacctggaaagggattccctgtagcatgtagactttccccacaagagacagctttgcagggccatttcaaaatatgtcaaagaaatatattttggggtaaaatactttgtatttctttcagggcctgctatctgtcatgtgatgctatactagagtcaggttggaatttggtgtcttattgctacaaaaagtctgttttgtcagtcttaagatctctgttttaatggttaatgcaggtcagctgtgtcggaatttcaaagggctgagagtataatgaggtatgcccacttccatgaagatctgaaatagattttcaggtttactttggaaagccttttgccaagggctggtgggggaaggtggtccatcagtcagttgcggggcttaaaattttatttttggtttataccagggataagggaatgggcagtctgacctttcatc

SEQ ID NO: 55862 - DNA, 722 bp, Homo sapiens
tttttttgaaatgaatttgtgcttaactgtcttcactattaatactatttagaaataagctaattggatcagtggcttaaataatagctgactgtgtgtacatatgtatataatatgtatatacaatatcaggcatgcatgtggcttggaattttgtttcctccataaaatgtggaagtgaattaaacaagttttagtcatttatacaaagtcacaaatataaagttcagtttgtcacaagattaaattgctcacaaggtaaaattgtattgtttggcaaaatcacaagtaacaatcctgtgagttttctattatgaaggttaataataaatgggctcatttagttgcctgggcacctattcacaaattcatttgtcagcctctttttagttctcttaaaaaaaaaaaaatcatatgatcattttcctttttgggggtacttagcttccatgcctataaagtctggtaccagactgacttgaaattcataaacaagttgtccaattgccaagaatatgttaacaattaaaagttccaaactaaagccaatagcaccaagtcttcataagaatacaaagtatacatacagtattgcttacctggaggattcagatcatttaggaattctctttgatgaaagatcagttcccatttgagttcctccttgcactgagttttagtgatatagaactagcttgtagttagtgtttcattacattata

SEQ ID NO: 55863 - DNA, 346 bp, Homo sapiens; identical to SEQ ID NO: 44357

SEQ ID NO: 55864 - DNA, 412 bp, Homo sapiens
gtgatgccaaactgtgttcattacttacaccttcacagcatcaacagatttcagagcttagtttcactactcagttactgtgtaattttgagtaagtcactttccaaataagtacatacttaccagcagttactgctatgtctctattagaatgaaattaggttagttgacttccttttttataaagaatatgaagatactatgaagaacattacagttatggcaaacgcatgcagcaagaaaataagccacttttttggtatattatataaatatgaattttaaattattcctttataggtactgaaccttactattgtagaactgcttaatagactgacctaaaatagaattaaactaatgcagaattagctatttaggaatgctttttgaagtgttaagtaatggacat

SEQ ID NO: 55865 - DNA, 743 bp, Homo sapiens
  misc_feature (1)...(743): n = a,t,c or g
cttgccagagcacgacctccctgaacacttgaaagccaagacctgtcggcgctgtgtggttattggaagcggaggaatactgcacggattagaactgggccacaccctgaaccagttcgatgttgtgataaggttaaacagtgcaccagttgagggatattcagaacatgttggaaataaaactactataaggatgacttatccagagggcgcaccactgtctgaccttgaatattattccaatgacttatttgttgctgttttatttaagagtgttgatttcaactggcttcaagcaatggtaaaaaaggaaaccctgccattctgggtacgactcttcttttggaagcaggtggcagaaaaaatcccactgcagccaaaacatttcaggattttgaatccagttatcatcaaagagactgcctttgacatccttcagtactcagagcctcagtcaaggttctggggccgagataagaacgtccccacaatcggtgtcattgccgttgtcttagccacacatctgtgcgatgaagtcagtttggcgggttttggatatgacctcaatcaacccagaacacctttgcactacttcgacagtcaatgcatggctgctatgaactttcagaccatgcataatgtggacaacggaaaccaagttcctcttaaagctggtcaaagaggggagtgggtgaaaggttcttcagtgggagggctttggatncgtggaattttttgaacac

SEQ ID NO: 55866 - DNA, 1459 bp, Homo sapiens
ttttttttttttttcactggacaagaagtcattttttttttaattgggaaactcatgtaacaaacctacatttattgaaaatgaaatcaagtaactaagactctgcaggccccaccccaaccagcaccaaggcctctacttggtctggtcccagttctttaagccccagaatggacaaccatgtgaagcagctcaggtcaactgcagggccacattcccacactgcaaacccctccacccaccctcaactcacacacaccctggatcagcaggtctaggctgaaagagagaacagtgaggttcccagggtggcaggtgggtatgacaggcaccataccccaacctgctcaaaaccctaagttagcaaaggaagacagaagactggcttgcctgcccattcccctccccccacccccaacagcagcctcacatccctgatcagtaacactgtgattctgaggtgccaagaggaggggctttaccagcccctgggtgattactaccaaacggcccagaggccagagagagagggcaggaatttgccccactacctgctcagtattagccaagctgctgccttcagcttgtgcctgtgggtgcctccagcccctctcccttccagaacaggtatggctggaaaccagtcctcctgacagaagaagtcagttccaggaggtcctttctcccccagcctgggaggatgggttgtgacgcctgggacagctacacaagcttcttggcttcaaagaagctcttgaggtgccgcatctgccagacaccgatggccacgaggatgagggtctgcagaatggaccaccacagcacccgctggttggtgctctcactggtctgccggaagcgctcctctcgccaccgctggtagttctgctctttctggatctgctccacttgttccaccagctgtcgcactcgtagctgcaactcactcaacttgtctttagcagcaatttctgcatagtcattggcatgttcacctacctggatgtccaggtgaactctcagcatgcctccagcaaagagggagaacttggtggaattggagtgaagacagatctggtgctcaccaggggtatgggaagtgaaagtgaacctgccctcggagccatactgccgggccaggatgaccttgtcctctgggtccttcacctccacaaacatgccaagccccggggtggccggctggtactcctcccgctgcttgtcatacagctgcgtccggtagtttcctatgaccatggtctcgtccgggatctcctcaataaagcacttcttctccgtctctccgatgtgaaagtagagcgcgcttccgcgcgtcgccagccacagcaccagcaggagggtccgcatcactctacccagcccggttccgggccggggccggacgagcagcacgcccaccgaatggccgtcgttttacaacgtccgtgactgggaaaaa

SEQ ID NO: 55867 - DNA, 422 bp, Homo sapiens
cactgatccattctccctctttgccatgatctgtgccctggaaggttgactgtatcacccgggctccctagccagctggtttctgttgggttcaacccacaggaaactacaaggcaggaggaaagacaaattgggatatttcttcccctgcttcctcgctgtttaggactgtgtttctgacagtagctgcatcccccatatgacctcagttcctgttgggtagccctagtggtgggctggagctgattcatagtgacttgcaaaagctgatatgcacgcttctgtccaactgtgtatttgttgatgtcatactggtagctagaaaatcatcatggtgagactgtatacaccttagaaatcagtaaacactatatgtcaatgctttatgtatttttttcaaaaggctagttgtgaaatattta

SEQ ID NO: 55868 - DNA, 324 bp, Homo sapiens
gagcagaagttattcttcttagcagagaatattatacgggcattttccagaactgtgaaaactctatcatttgttttaaaccagatgatgtgcttcatttctgtctttgacgtcttcagtttcttctcccctggctttacctcctttgctatcagtttgtgctttggttttgctgccaaccttataggcttaggtttggcggcaaaggcactagactctggtgccttcttttccttcgttgtcttaagcccttcttttcctctgccctcatgccctcaccacttcactcttttgaaggtcataatgaacacaaggtcagagatc

SEQ ID NO: 55869 - DNA, 405 bp, Homo sapiens
cacgccggcctgctccacttctaaggcttcttgtgacaatgtaagagaaaggagatgacagagctttgcaacgggaggagggctatgtgttctggtgaccaattcactgtcttgtgtcgggacaggaagaagcccttcatacgggcagcaggctgggagccagggaggaggaaagatcacgatccactccctggtacatggcccttctgcaccccgcagtctccttccaggtgccacaacgagaaggcacacatccttggcacagcacttgaggcttttcaccactggctgcactcacccctccagactcactgccttgcaccaaccctttttcgccaccccactctatgctgtccacagtctccaccccaagccaccttgattctgcaggccaatgtcacattc

SEQ ID NO: 55870 - DNA, 317 bp, Homo sapiens
  misc_feature (1)...(317): n = a,t,c or g
gattaataagtgtcaaactgcctagagatgtttttgcaagaatatttctacatcactgaggatcattttatattctaggcaactgacgggaataacttcaccagaactgtatggctttcacacttctaagtatctgaaacctcattactatttcattttttcccaaaagcattcctgagatctgtattttttttttttttttnganagggngttttnnttttnttncccnggnnggngggcangggnntnatntcggttnnccnnaanatccncctcccnggttaangngattttcnngcntcaaaaaaaaaaaaaa

SEQ ID NO: 55871 - DNA, 419 bp, Homo sapiens
gagagaaccagcctcacctcgcttgggtggtgggttcagctgtctcctggctcgcttgtgaagttgattccagaccccgatccatgactgcgttctgggtactcagtgtgccctttctgtaatgtggcaccattgagggggaggagctgtacagaaagagggcaagatgtttgcgtttagaatcttcgccccagcccttcactaaccctgtgagccgtaggcagagccttgtgtgtcaatgctttcgtcggagacgtagcctcgggttgctgtgttattgtgggcattgctgctgcacgtggtaatacagctcagtgtcaggtgtggggttcacgatatttcagactcggaacttgggggctctcacatggccatctcatttgctttgtggtcttaaggtgggatactttcagatttct

SEQ ID NO: 55872 - DNA, 295 bp, Homo sapiens
ggctggtgacactcagattctagtgtggcagtactagcttcaactctctaaataaatttcaaggctttgtgaaaataacctctcttctcattcaagggtatgtttactggttccattcaacaaatatttactgagcacttcctaactgtaaaaggatagtgtttgcatctatgaggactattagacatgcctgcacatccctcaccttcaaaggtgaactctacacaggattcttgtcctagtcattgtggcaaccccatctgacaccttgtgtagtacctagctttatagcagg

SEQ ID NO: 55873 - DNA, 225 bp, Homo sapiens
tgacgatagctctgatgggcacagagcttgctgatggcttccaaaggatggctcctgccttttaccttgttaccacagctcctcatatggcactttgagtggcagttctggaatccccaggtcagagcagcccaggcgagagggtgggggtggtgagcgcggctggggtgcggggttcagtccctcagcgtgggatccctcaggggagcgggtggaagccttttc

SEQ ID NO: 55874 - DNA, 420 bp, Homo sapiens
gccgggagggcaggcaacagtgagtgcatgccatggaagcactggctcgtggcgacaggcagtcgttgggggagactgggggagattccactcaggggatcaagaaacagctgtctttctcgtgactcactctaccactgcggacagcctttctccctgcgttgaggagagcttcatggccacaaacagctcctgaattctgtggtcccagcttagtgaccccagaggaaaacaggtttctcccagctttggcctgaataaacctacaagacctggcctggcccatgagccagacactcccactggagagatggaggatcgtgatggacaggccagggtcactgcctctccagggcctgggggcagagtattggaattggcagcccccgagaaccaagtgtacacggggagggcatttct

SEQ ID NO: 55875 - DNA, 355 bp, Homo sapiens
acagaattattggagttttaaattaagtgtattggaaaagaaaggatggtatgtgtatgaaatgttaagatcctacgcaacactgctatttttttcctttaatatttgtgctgcataacaaaagccactagactgttactgtcttgtctgtccatgtgttaacagcatttcttaatgatgtatatatggagtggtcttcaatcatagtgaagaatttaaagagaaagtcaattgtattggcatttttaataagaacaaaattagttcgtctaaggggactggctggccacatatttgttccttgcccatatgctttctacttcttgttcttattatgaaattatgaatttgaagc

SEQ ID NO: 55876 - DNA, 932 bp, Homo sapiens
tttgtattcttataaatgtgtttaattacaactgcttcaaaagaatcccagcttttcaaaagtttattttaagtttggagactagacaaggtcatactggttttacatcctacgtgatataagtatatatacaaagaaaaaaacaacattggaatattacacagcttgaaggtttgcaaaggttatttgtgtcttagttatttctgcacttaatgacacatcagacgcattgagtatatttcataagttgttgactagcaaagatacaatcattagtaacccaagtcttcaaaattcacaccaaactttatgaagtcattcagaaagagaaagtcaatcctaaaattaaaattggcaactatgataaataccttcaaaaggatgtagatataatggagatgtttaaaagtttagtttcattaattgtaaaattagcatgttatatttactcaatatagtgaagactaggtgattcttacatgtattctacttatggtactgtactggttttagtgtgaatttacatagaataaatttacttcactttcatgtcatcgacatgaatgacacaaaagctacttcataatactactttacaatagttttcaacatttccatatggtgcgacccctttgctctcatcaattttgggtgtcatgagaacaataggtatcccgttggacatgatgtattgcgaagagcatataaagcagagggaaaatgaaaaagcaagagaaactcatttcaatgctttttctaaaaggtaacaaatataattttaatcaacttccttggaaaatatttttaaaacaggtatcaatagaaaaaattacaaaacatcatatgaagctataaataattttgaaaaactatatcatcataaagcataagtaataatcttaaaaatacactcttaagaaggtatgtaattt

SEQ ID NO: 55877 - DNA, 1082 bp, Homo sapiens
ttatgacatgattacgaatttaatacgactcactatagggaatttggccctcgaggccaagaattcggcacgagggcgcgatggcaggtgtcggggctgggcctctgcgggcgatggggcggcaggccctgctgcttctcgcgctgtgcgccacaggcgcccaggggctctacttccacatcggcgagaccgagaagcgctgtttcatcgaggaaatccccgacgagaccatggtcatcggcaactatcgtacccagatgtgggataagcagaaggaggtcttcctgccctcgacccctggcctgggcatgcacgtggaagtgaaggaccccgacggcaaggtggtgctgtcccggcagtacggctcggagggccgcttcacgttcacctcccacacgcccggtgaccatcaaatctgtctgcactccaattctaccaggatggctctcttcgctggtggcaaactgcgtgtgcatctcgacatccaggttggggagcatgccaacaactaccctgagattgctgcaaaagataagctgacggagctacagctccgcgcccgccagttgcttgatcaggtggaacagattcagaaggagcaggattaccaaaggtatcgtgaagagcgcttccgactgacgagcgagagcaccaaccagagggtcctatggtggtccattgctcagactgtcatcctcatcctcactggcatctggcagatgcgtcacctcaagagcttctttgaggccaagaagctggtgtagtgccctctttgtatgacccttcctttttacctcatttatttggtactttccccacacagtcctttatccacctggatttttagggaaaaaaatgaaaaagaataagtcacattggttccatggccacaaaccattcagatcagccacttgctgaccctggttcttaaggacacatgacattagtccaatctttcaaaatcttgtcttagggcttgtgaggaatcagaactaacccaggactcagtcctgcttcttttgcctcgagtgattttcctctgtttttcactaaataagcaaatgaaaactctctccaaaaaa

SEQ ID NO: 55878 - DNA, 409 bp, Homo sapiens
ggaaaacaggaagagctacctggtcctgggagcctggctctttccctaaactgggagccagcctggactcctaaactccgccatcttggcactctctggtccattcactgccagctttgccagccccagctgccctttgtatgggaatatagcccattcctttccacccgagtcatcattcatgctgtgccagtagcccactgcacttgagtgaacttgagcaagagacttcatgcctctgaactgcagtttgctcaatctgtagaatagggacagcagtaccaagctcataggttggtggtaaataacagaggcgtggcacagagaagcttcacgcccccagaggcaatgatccttgtcagtcaccctaaactactcctgtaagacaacacactcctggctatgtggg

SEQ ID NO: 55879 - DNA, 309 bp, Homo sapiens
ggtgtaaattggcttagaagaaaaacgccatttaaccttgcctaggacaaaaataaaacatggctgagggcagtctcctcttggactcagttcagagaccgtgtgagattgtccgccagggggagctggaaccttggggagcctcccgctggtccctagggctggctcccaggagccgggcccttgctgcccaggccacccgcagcagagaccatcgtggcttcctttgctttgggcttgaatggccagagccctcggggagcaaggacctgggggcttaagtgcagcccgtgaggaagcgcactgtcc

SEQ ID NO: 55880 - DNA, 725 bp, Homo sapiens
tgagttcatctggcttgagcttcactgcatgcatgtctgacttttccctttatgtatttcatccatatggagccagggaaacaaaaaactgctgtttctggcctcacacctggatcaggaggattagggaatgtggatgaggagcccacttcagtcactggtcgaaaagattcactcagtataaaccttgagtttgtaaaagtgagtttgtcacggatcaggcgttcaggaggtgcctcattttttgaaagtcagtctgtaagcaagtctgcaagcaaaatggatactacgttaataaatatatctgctgtttgtgatatagggtctgcctcctttaaatatgatatgcgccgactcagtgaaattctggcatttccaagagcatggtatagaagaagtattgcaagacgtctattccttggagaccaaactataaatttgccaacatctggcccagggacacctgattccattgaaggggtaagccaacacctttcccctgaatcatcaagaaaagcttactgcaagacctgggagcagccaagtcagtcagcctccttcacccacatgcctcagtcacctaatgtgttcaatgagcatatgacaaacagcaccatgtcaccagggacagtaggacagagcctaaaatccccagcttccataagatcaaggagtgtatctggattctttcagttcctcgaagggatttcacttttcaaaaacat

SEQ ID NO: 55881 - DNA, 541 bp, Homo sapiens
gcagctggagaaggcggcctggcgctgggcggagacgagtgcggcccgaggaggtgtcgcaggagcatatcgagaccgcttaccgcatctggctggagcctgcattcgcggcgtgtgcagacgaaactgcaaaggaaatccgaattgcttggttggtattggtgagcatatttggttaggagaaatagatgaaaatagttttcataacatcgatgatcccaactgtgagaggagaaaaaagaactcatttgtgggcctgactaaccttggagccacttgttatgtcaacacatttcttcaagtgtggtttctcaacttggagcttcggcaggcactctacttatgtccaagcacttgtagtgactacatgctgggagacggcatccaagaagaaaaagattatgagcctcaaacaatttgtgagcatctccagtacttgtttgccttgttgcaaaacagtaataggcgatacattgatccatcaggatttgttaaagccttgggcctggacactggacaacagcaggatgctcaagaattt

SEQ ID NO: 55882 - DNA, 326 bp, Homo sapiens; identical to SEQ ID NO: 41643

SEQ ID NO: 55883 - DNA, 695 bp, Homo sapiens
gctcgacatccaaaagagggatgtaaagttcaggtggtcttcagcacagagcgctacaacccagagtctttacttcaggaaggtgagggacgtttggggaaatgttctgctcgagtgtttttcaagaatcagaaacccagaccaaccatcaatgtaacttgtacacggctcatcgagaaaaagaaaagacaacaagaggattacctgctttacaagcaaatgaagcaactgaaaaaccccttggaaatagtcagcatacctgataatcatggacatattgatccctctctgagactcatctgggatttggctttccttggaagctcttacgtgatgtgggaaatgacaacacaggtgtcacactactacttggcacagctcactagtgtgaggcagtggaaaactaatgatgatacaattgattttgattatactgttctacttcatgaattatcaacacaggaaataattccctgtcgcattcacttggtctggtaccctggcaaacctcttaaagtgaagtaccactgtcaagagctacagacaccagaagaagcctccggaactgaagaaggatcagctgtagtaccaacagagcttagtaatttctaaaaagaaaaaatgatctttttccgacttctaaacaagtgactatactagcataaatcattctagtaaaacagctaagggataga

SEQ ID NO: 55884 - DNA, 712 bp, Homo sapiens
gtgattacagaaaactggaagaaatgcaccaaagattcctggtttcagagcgttcaaaagatgatcttcagctaagacttacgagagcagaaaatagaataaaacaacttgaaactgactcctcagaagaaatatcacgttaccaagaaatgattcagaaacttcaaaatgtattggagtctgagagagagaactgtgggcttgtcagtgaacaaaggctaaaacttcagcaagaaaataaacagttacggaaagagactgagagtttaaggaagattgccctggaggctcaaaaaaaagccaaagtaaagatcagtacaatggaacatgaattttcaataaaggaaccgtggatttgaagttcaattgagagagatggaagacagtaatagaaattccattgttgaactgaggcatctcctagcgactcaacagaaggcagccaataggtggaaagaagaaacgaagaaacttactgaaagtgcagaaattagaatcaataatctaaaaatgaaaagctaattctagagcatcaagaaaaagccaacagacttcaaaggcgtctaagtcaggcagaagagagagctgcttcagcttcccagcagctcagtgtgattacagtgcagagaagaaaagcagcctccctgatgaatctggaaaatatttaaaaatattcatagttcactcacagaactttagagttgggaaagca

SEQ ID NO: 55885 - DNA, 123 bp, Homo sapiens
aggtgagggcactcacccacccaccttttacaggggcggtcacaggctcagtcaggtgagggctgactcagccgtgtgtccaggccagatggttctttctttcctccctcctttaaaaaatta

SEQ ID NO: 55886 - DNA, 358 bp, Homo sapiens
gtgctattaccgccctagatagtgaatggatggtttcaaagtccaaaggtacttatttaagttaaaaggctcagctgtttttgttatcaaccaaggcatcacaaaaggatggctgacatttatggagtacttacagtgcatagataggaattacgatgaaaaccacatggtccctgtctttaaagatcccctcctagtttaggagagagagtagcaagttggactaatgaaaattgaagtatgcagaaacagacaccaaatttgggataacagaagtcattcttacaaatcagccaggtttcctcctcagaatccctctcactaagtttttgttagccactgccattgattatgctgg

SEQ ID NO: 55887 - DNA, 620 bp, Homo sapiens
  misc_feature (1)...(620): n = a,t,c or g
aatagattctatgtgtcagtatgtgatgtactcttttagtttgactgacttcaataccattcaaaaagatcctcaatggagttacagggtttataggggaaaaatacatgtttatgagacattgggcaattcaaatcatgcatgtgttacataagcaaggcaaagcaaaacaccagtggggtctctggaaagtaaaaggacagactacagtagaaggactgatcccagagtgcctgtacaaggcctaaatctggcaggcaaaagcatcccacactgtctgtcagcacccacatggcctttttgcctgccttctataacgggtaagtggacctacccttggagatagagaagaaaaattatcttctctgatattcggatgtaatggtcatctcagttcagccccctagggaaacatgttttattttccatggggaaaatatcagcgttaaagctctatcaaatcaaaacaactttgccaacatcttctcttctgctacctttttaaaccaatttaaataccttttcttctggatatttttgtccctttcagatccggaggaccttttaaaggantgtgggtttatttttgtgttttacattccttgggttgaataatttgg

SEQ ID NO: 55888 - DNA, 373 bp, Homo sapiens
ggaaacagagcagaactgtccatgcttctggggactctctggggcacgtgtctggcccagggagacctgagctcctcccgctgaggaccgtctccgagtccgtgcagaggaataagcgggactgtctcgtgcgacgatgtagccagccggtctttgaggctgaccaattccaatatgccaaagaatcgtatatttaggagggaggccatacgctatgccatagcttgtgctatctgtaaatatgagacttgtaaagaactgcctgtagattgtttttaaaaggtcttgaataagctccttgagaaagttgtggaaagccctcctcagtgaggatagctacaccatggccatggcgcatcagatagtctctgtg

SEQ ID NO: 55889 - DNA, 440 bp, Homo sapiens
attcagctagccatggttattgcccgtttatatgaatctgaatttgagacttcatccacttatatatccatcctaaatcagaagattttgggttgccaaaaggatggctcaggattcagttgcaaaagattacatcctgatcctttcctgcgtagtcttgcctattgggtaatgaaagattacacccgagccttggacacattactggaacaaacaccaaaggaggatgatgaacatcaagttatcatcaagtcttgtaacccggtggcatttagtttttataactaccttcgaactcatcctttgctcattcgaagaaatcttgcctcccctgaaggaactttggcaaccttaggtctcaaaactgagaagaactttgttgataaaattaacctcatagaaagaaaattattctttaccactgcaaatgctcattttaa

SEQ ID NO: 55890 - DNA, 1287 bp, Homo sapiens
  misc_feature (1)...(1287): n = a,t,c or g
accaaggccccctcagaccgtgccatgggtgacagtgatgacgagtacgatcgaaggcgcagggacaagttcagaagagagcgccangcatnancgcaccgttcccgcgagagagatgaaagacgtcgaggggaacgattggaatgacagagagtgggaccgtggccgtgagcgccgtagtcggggtgaatatcgggactatgaccggaatcggcgagagcgcttctcgccacctcgccacgaactcagcccgccacagaagcgcatgaggagagactgggatgagcacagctctgacccataccacagtggctatgagatgccctatgctggggggggttgggggcccaacttatggcccccctcagccctggggccaccctgacgtccacatcatgcagcaccatgtcctgcctatccaggccaggctgggcagcattgcagagattgacctgggtgtgccgccgcccgtgatgaagaccttcaaggagtttctcctctccctggatgactcggtggatgagacggaggccgtcaagcgctataatgactacaagctggatttccggaggcaacagatgcaggatttcttcctggcgcacaaagatgaggagtggtttcggtctaagtaccacccagatgaggtggggaagcgtcggccaggaggcccggtgggcccctggcaaaaccgactgagggtcttcctgtccctcatggagactggctggtttgataaccttctcctggacatagacaaagctgatgccattgtcaagatgctggatgcagccgtgattaagatggaaggaggcacggagaatgatcttcgcatcctggagcaggaggaggaggaggagcaggcaggaaagcctggggagcccagcaagaaagaagaaggacgggctggagcaggcctaggggacggggagcgcaaaaccaacgacaaggatgagaagaaggaagacggcaagcaggctgagaatgacagttctaatgatgacaaaacaaagaagtcggagggtgatggggacaaggaagagaagaaagaagactccgagaaggaagccaaaaagagtagcaagaagcggaaccggaagcacagtggtgacgacagctttgacgagggcagcgtgtcagagtctgagtcggagtcagagagcggccaggctgaggaggagaaggaggaggccgaagaagcgctcaaggagaaggagaagcccaaggaagaagaatgggagaagcccaaggacgccgcggggctgggagtgcaagccgcggccgcggttc

SEQ ID NO: 55891 - DNA, 487 bp, Homo sapiens
tcccaagccgacaggtgcttcttaaatgttttctttgagcaggaattggtccaggaattggttctcaagttagaaggaaaatttgaggggaagaacttgttttttctccaatcagtctctgattaaaatagttattaggaaaactccttgcttatgtctttgtattgcacatttttatatatgtatatatgtgtaaatagagatatttatatattcacagacaaacacgtgtatgcacatttcacaatggaggaagaagggatatggtgtgcactgaggtaaagtgagcagggatacagaagagagctggagcctcacagtctgattctctcattgtacataacctttagggtctttgtttccctgagttctctggtatggggcactgttggcttgggctggtaccctgttattctctgtgatgaagggattcactggaggtaaaaacgtaatcatttccaaaggttgagaataaatgactttgagg

SEQ ID NO: 55892 - DNA, 816 bp, Homo sapiens
ttttttacttatttttactttcattttatttcagagcatttaatgcggtttacaaatcaatcacatcttccaaaaacacactgtgttgtttttctcctcaaagcagtttttcatacattgcatcattttctgttcataacagtcccaaggactggagtagggtcggctttgctgtctccattttaatgacaggaacttagatgtggaggccttacgctgtccaggaaggggttttacagacgttacttcgtttggtcttctcctcccaccctgcacggcgcaaagagcccatcagtttgcggaagtctggggtggaggacagtctggagtgacaggctgctaccagaccagtcgatctggttcgggctgtgacataagctaggggtcgaagtcaggggcacccgcacaggcggacctgcctggcacctagccaaggcgaatccaccttcccggccagccaccagggccttgaattggcaaagtatcgaatcctgttgtgtgtgaagcaagctcttcatgcgacaccttcagggcgacctcgggtcaagaactactcattgtgctgcttggacgcgccggggcccgagtcttcgtggatcggccaggccaggagtgaaaggtctgggagttcttccggccaagagcacccgaagagccactgggatcagaaatgcgccccggtggaccccaaaccctgcagccgggggcggggggtgtcgtggagtgtccgctcgccccatgccgtgaccgggacaaccggtacagcaaactcacatggagccccaagactctggatccccaagactctggatccca

SEQ ID NO: 55893 - DNA, 247 bp, Homo sapiens
caagtaggtttttaatgaatttcttatacttttaaaatacaacattatggcaataaaagactattccacttcttttctaatctggagattgtattgatttttctagtataattttctggctcatacctccagtacaatggtgaatagtggtataagtagaaattctcgtcctgttttcaaacttgcagataaagcccctagtcattcaccattaagtatattagcttttggtgtggagtttttcatc

SEQ ID NO: 55894 - DNA, 1672 bp, Homo sapiens
aaacttcccaagccccttaacatttagcacatttgaggatgttcgtgatgctgaagacgctttacataatttggacagaaagtggatttgtggacggcagattgaaatacagtttgcccagggggatcgaaagacaccaaatcagatgaaagccaaggaagggaggaatgtgtacagttcttcacgctatgatgattatgacagatacagacgttctagaagccgaagttatgaaaggaggagatcaagaagtcggtcttttgattacaactatagaagatcgtatagtcctagaaacagtagaccgactggaagaccacggcgtagcagaagccattccgacaatgatagaccaaactgcagctggaatacccagtacagttctgcttactacacttcaagaaagatctgaaagcggaaaaagaaccaaagaagggcagttcaagcgaccaaagggtgggtggaaggtgctgcagtatgaatactgtacgaatattttgactctggtctgaaaagataaaagaatgttatcgaaaactacatggaataattgaagtcccttcaagtttgaaagtaagcattttaggacaaataaaaggaaattcaactttgtacttgtgggaaactaatccctaaatatggaataggtttatattgattcatgggtaacaggtccataataaattattggaaactaggatgtctgaatatcaaggaagacagccatagtctcttacagtgcctctgttggtctgtctcaaactgaattgggtgggaaaaggtatggtccaatataaaagttccatttttgccattattggcaaatcttgcctttgtttattttggtgccagtgttttctgcttaatcatttgctttgttggcatctgtgtttatttacttgtacaccacatgcagtttacatctgtcttaactactccttcccaggtaaaattccaattatatttgacatccagctaagagggcccatctcttctcacctctttcctagtcagtatattcagcaaatatttattgagcccttactgtgggcaaatcattgtactggataattgagaaaaatagataattcccttattcagtaaatgtctactgagcacaatctagtgaatcattacagtatggcctcattgttttgtttgaggtgtgttattcataacaatattttacaccattcgtatcaatgtaattatagaacacaatatacgatcaaggataagtaattgtgtggttatctgccatttaaaagtatccagtatttgatcacattattataaataatgaaaaaatgatttaatctgtaataaactggtttattgtgcagtgactgtaatatactagagttataataaattgtttactctgcctcaccaaacacatgctaggatataacccccaaaataagtatttaactttgcattaggtataaaggagactgggtgctataattagattattttgaggcagacagagagctgttatcctaactgatttagtatgttctgtaattgagaaaatgttcaccaaattatactttttagtgatttacatgtacattttataggggacatgttctgtgtatagcgaataaataacttttatagtatcacaaaaaaaaaaaaaaaagtcgacgcggccgcaattttagtagta

SEQ ID NO: 55895 - DNA, 676 bp, Homo sapiens
tgtcctaataacaaaggtcagtaatgtcatcttcatatatgaaggacacatgtgatacattgttcgtggaaatagaaatgtataattatgataaatgtttcacttgaatcttattgtaaggcttttcttgcttttattttttaaagtcagcaaaactcattttgtctgtcatctataagtcatagtgaggactacgagataagttgataagttcaattgatattaaggtgacatggcaatattaataactcaaatgtgaatgtttcagtattgacttcttgtccctatgggacatttagtaaataaaattaatgggactcttgcaaagtagccttaaaagtgttaatgagtctattaataaatatgaacacatactattattagaaccaactttactcatatctcaaatacagtacatttacattactgtagaggatgaagctctaatttctattacatgtaattttctttagaaagagaaccctgaaagctgccagtttttctattaactttgaattattgaaattgtatttatttaattttattgtttttacaaaattgcaccttgtgtccaaagggcgaagatatgacattgcataagggatttatgtttttcaaagagctaactgttttcatatccatactatatacacttgaagcaattggtaggaagaga

SEQ ID NO: 55896 - DNA, 1075 bp, Homo sapiens
cgaccctaccgttgccgcctgtgtcactacacaagtggcaacaagggctacatcaagcagcacttacgagtccatcgacagagacagccttatcagtgtcctatctgcgagcacatagcggacaacagcaaagatttggagagtcacatgatccaccactgtaagacaagaatataccagtgcaagcagtgtgaagaatccttccattataagagtcaattgaggaaccatgagagagaacagcacagtcttccagataccttgtcaatagcaacttctaatgagccaagaatttccagtgatacagctgatggaaaatgtgtccaggaagggaataagtcttcagtccagaaacaatatagatgtgatgtgtgtgattatacaaagtacaacatatgttggtgtcagaaaccacaggcgaatccataactctgataagccgtacagatgctctctgtgtgggtatgtgtgtagccatcctccttctttgaagtctcatatgtggaaacatgcaagtgaccaaaattacaactacgaacaagtaaacaaggctattaacgacgcgatttcacaaagtcggcagagttctgcgggaaatcccctggaaagactcaattaaagagcagtgaagagagtgcagatcccgtcactggaagttcggaaaatgcagtgtcatcttcagaactgatgtcccagactcccagtgaagttctgggtaccaacgagaatgagaaactgagccctacaagtaatacctcatatagtttagaaaaaatctccagtctggcccctcctagcatggagtactgcgttttactcttctgctgttgtaattgtggttttgaagtcaaccagcaaagaaaacctcttggatcatatgaaagagcacgagggtgaaattgtaaacatcatcctgaataaggaccacaatacagctctaaacacaaattaggtggaataatgactcgagcaggaaagcagtagaagaggattccttcaccacagtttcacctttacgctgtcagacaacttcctgccacagaagaagtcgttgatgtgatttttgaggaaatgg

SEQ ID NO: 55897 - DNA, 1797 bp, Homo sapiens
tccggccgcgtcgacgccaaaccagaagctccactcgcccgtaggctgtccctgtagcctgctccctccctggaggctgctcttctgattctgagagctggcctagtggtgctgagggcccctttctgcttctctgcccacctgctgagttgccactcgcagtgttgtcagttcccgtgttctgagaagaggtcatgcctgggaggaagggatcgtcatgctgcatcgaaccctccctcactgctctctgcacatcacggccacacagcacctgcagggaggctgtggggaggtgtgaagcaggtgcaacaggcagctactctcctgggggccacacggcggagagaggattcgatgcagcatgacgatcccttcctcccaggcatgacctcttctcagaacacgggaactgacaacactgcgagtggcaactcagcaggtgggcagagaagcagaaaggggccctcagcaccactaggccagctctcagaatcagaagagcagcctccagggagggagcagggctacagggacagcctacgggcagtggagcttctggtttggcacatgggaaaggctggggcgcatgcgtgcaacacatgacaccatcagggaagccagaaaggacaacatggacaaggccatcgatctgaacccccagccaaaatgggtgctctcggcttgctcaaaaagtgctgccagcagcgataggttggcaaattaaaagcaaacaaatagaggtcacggccacacaaaggcagtaactgcactcacaaggtggctcagccccaaagaggtctgaatctgaatatgccgcactgtccctgccccaggggagaaggggaaggctgggccctgggaactagagatgatggcattcctttcattccttcctgaggcgggcctggagggctgtgccctggtgactcctgtctcctaaaggagggcagggccggctgaaggatccaggcattgatgtctagttctgaggacacccaggacccgcaactacaagggccatctaaaacgtggcctggaggggatgggggcaggcgggcacaaaacttctgctcagctcactccagctccccacgtgctcatctgttccccagatctggggctgcctagtgagccgttaaacgcctgggttccgcccagggctgccttccaccgggacgccgggcctgctgtggctggaccctgccgctgtggtggtcttctcaccaaggagcctggtctggctgcctggaataacctgcaggtcggtgttctcaggggactgtggcaggttctgggctcgggtagccaggagtgcattgaggtactgcagtcgcgtaaccttgatgagctgcagatcagagagcgccctcacggtgtagtcgggacaatacgcagatgaatgcgtgccgtcacctgggtcgggctgcaggtcatggcggatgggctggagcgaggacaccggggactggtgaactatcaaaggaacaatcagtgatggcaggagccatgctggcagctgggagcctcctcccctggtggggacaactgtacagtttcgaagacccaccccaccaatcactctggagaggcaatgtgcatgggaagctgggagagaaggacaaacacagccgggagaggttttgcaggggtggagtgggccacaaagttgagcgatgaagaatgctgccctccctcctggaagcccaggggctacaccaccttgtggggtggtggctcaagtggaaggagaggtgaggaggggcactgaaagcccagtgatgatgggggacaagctct

SEQ ID NO: 55898 - DNA, 376 bp, Homo sapiens
  misc_feature (1)...(376): n = a,t,c or g
tggtttcctaacaggccatgaactgcccaggggttgggggcccannnnnnnnnnnnnnnnnnnnnnnnnnnnnnnnnnnnnnnaatagaaagttgatacaaacagtaatgtgtgagagtactttatggcctttttcacagtgtattgaacttggatttttgtcagtgagatagatgagaaattgtatttcaattcgtgttaatttatatttcttttcatctttaaaaaaattgatagttggtccttcttaatttttggacctctttatagactagggatattatttctctaacataaattgcaaatattttccccaatgttttgtcattcagaaaaattttaataaagtcacgtttgtcgttcttgttgctcttga

SEQ ID NO: 55899 - DNA, 2372 bp, Homo sapiens
attcggcacgatggcgcgctctcgggaaggcttggaccgacgcggccgagaggccaggaacattccgcgcgtggaccagccgggccagggcgatgctgcgggtgcggtgtctgcgcggcgggagccgcggcgccgaggcggtgcactacatcggatctcggcttggacgaaccttgacaggatgggtgcagcgaactttccagagcacccaggcagctacggcttcctcccggaactcctgtgcagctgacgacaaagccactgagcctctgcccaaggactgccctgtctcttcttacaacgaatgggaccccttagaggaagtgatagtgggcagagcagaaaacgcctgtgttccaccgttcaccatcgaggtgaaggccaacacatatgaaaagtactggccattttaccagaagcaaggagggcattattttcccaaagatcatttgaaaaaggctgttgctgaaattgaagaaatgtgcaatattttaaaaacggaaggagtgacagtaaggaggcctgaccccattgactggtcattgaagtataaaactcctgattttgagtctacgggtttatacagtgcaatgcctcgagacatcctgatagttgtgggcaatgagattatcgaggctcccatggcatggcgttcacgcttctttgagtaccgagcgtacaggtcaattatcaaagactacttccaccgtggcgccaagtggacaacagctcctaagcccacaatggctgatgagctttataaccaggattatcccatccactctgtagaagacagacacaaattggctgctcagggaaaatttgtgacaactgagtttgagccatgctttgatgctgctgacttcattcgagctggaagagatatttttgcacagagaagccaggttacaaactacctaggcattgaatggatgcgtaggcatcttgctccagactacagagtgcatatcatctcctttaaagatcccaatcccatgcatattgatgctaccttcaacatcattggacctggtattgtgctttccaaccctgaccgaccatgtcaccagattgatcttttcaagaaagcaggatggactatcattactcctccaacaccaatcatcccagacgatcatccactctggatgtcatccaaatggctttccatgaatgtcttaatgctagatgaaaaacgtgttatggtggatgccaatgaagttccaattcaaaagatgtttgaaaagctgggtatcactaccattaaagttaacattcgtaatgccaattccctggggagggaggcttccattgctggacctgcgatgtccggcgccgagggcaccctacagtcctacttggactgaacaggcctgatgggagcttgtgggctgggccttcaggatacacctaagaagcttaggggcaaggttcattctcctgctttaaaaagtgcatgaactgtagtgctttaaacaatcatctccttaacaggggtcgtaagcctggtttgcttctattacttttctttgacataaagaaaataacttctgctagggtattactctctactcctaaagttatttactatttggcttcaagtataaaattttggtgaatgtgtaccaagaaaaaattagtcacctgagtaacttggccactaataattaaccatctacctctgtttttaattttctttccaaaaggcagcttgaaatgttggtcctaatcttaattttttttcctcttctatagacttgagaatgtttttctctaaatgagagaaagacttagaatgtacacagatccaaaatagaatcagattatctctttttttctaaaggagagaaagacttagaacatacacagatcctaagtagaaccaggtaattgtctctttttctaataaggaatttgggtaatttttaattttttgttttttaaaaaataacctagactatgcaaaacatcaaagtgaattttccatgaatgtttttaatattctcatctcaacattgtgatatatgctactaaaaaccttttcatatacatcttacctcatttcaagtgaattattttaatctttttctctctttccaaaaatttacaggaatgtttagtgtaattggatttcgctatcagttcccatccttaagttttgatattcaatatctgatagatacactgcatctttggtcatctaagatttgtttacaaatgtgcaaattatttagagcatagactttataagcattaaaaaaaactaatggaggtaaaacctaaatgcgatgtgaaataattttagtgttgatactgtatgtgtatttttattctaataaacttttgtgttccagattgaaaaaaaaaaaaaa

SEQ ID NO: 55900 - DNA, 472 bp, Homo sapiens
cggacgcgtggggacgcttttagtattttggatatgctgaaattagaaggaaaaatgatgaatggccttcgcaatcttgggatcaatggggaagatatgagcaaatttttaaaattaaattcacacatttgggaatatacttatgtattagatattcgacattcttctataatgtggattaatgacttagaaaatgatgatttgtatattacatggcctacaagttgccagaaacttctgaagccagtatttcctggaagtgtaccttccataaggcgcaattttcataatttggttctgtttattgatccggcccaagaatataccttggattttataaaacttgctgatgttttctattctcacgaagttcctcttagaattggttttgtgttcattcttaatacagatgatgaagttgatggagcaaatgatgctggagttgctctctggcgagctttcaactatattg

SEQ ID NO: 55901 - DNA, 402 bp, Homo sapiens
  misc_feature (1)...(402): n = a,t,c or g
ctcctttccatttctggaccaaggggctgccataaggagtctgtgactagagatgggaggtggtggccacggcctctcgctgtatgctgtgtggaaggtcgaatcatcatcatcataaaacttaatattgcccttatgtgccaggaactactatctcagcaatggagatgtggtgcttggccgcaatcgtgaatcggccctggaggggacacaggaaggggctgcctgcgactcatgacctcctgcgtgcctgcctgctgacctatgacccttcaagttcccacccctcagccacgcctgtgatggagggtctttgttttgtcgcctacgcctggangtgcangtggtgtgatcacaagctcactgcaagcctcaacttcctggactcaaagcgattttcct

SEQ ID NO: 55902 - DNA, 687 bp, Homo sapiens
cttactcaaggctcctcccaggtggcggaggagagcccggagctgctgaaccctgagcccaggagactgagcccagagttgaggctactgcctaatatgatcactctgggcgacgcgtgcacaacttcgccgacgggctggccgtgggcgccgccttcgcgtcctcctggaagaccgggctggccacctcgctggccgtgttctgccacgagttgccacacgagctgggggacttcgccgccttgctgcacgcggggctgtccgtgcgccaagcactgctgctgaacctggcctccgcgctcacggccttcgctggtctctacgtggcactcgcggttggagtcagcgaggagagcgaggcctggatcctggcagtggccaccggcctgttcctctacgtagcactctgcgacatgctcccggcgatgttgaaagtacgggacccgcggccctggctcctcttcctgctgcacaacgtgggcctgctgggcggctggaccgtcctgctgctgctgtccctgtacgaggatgacatcaccttctgataccctgccctagtcccccacctttgacttaagatcccacacctcacaaacctacagcccagaaaccagaagcccctatagaggccccagtcccaactccagtaaagacactcttgtccttggaaaaaaaaaaaaaaaaaaa

SEQ ID NO: 55903 - DNA, 1637 bp, Homo sapiens
caactcaggttagcaactgcaggaaaactttcttcattttcactgaattttaaagagagaatcctgtctctatttctcagagaaacttaggtgaaaagtaaaagagaggcaaaatctctttccttcatgagatacttttatttttatctctttctctactcatgtgcttaactggtgaaatgattctgtagaaatagatccttctgattctgcatctcatttccttatggcaactacaacaggaggaatccagctggaaatgccactaaccccacaatccagcacctgagagaggaagccagtcggagcgccgtgctgggctcactcactctggcctgcgcactggggttgtcacatccattttccactggctatggggaataatatttggttaaggctgttgaagcccttgcttttgaggttttacattatttggtaatgaaagccgttttttcttccttccccaggcttatgtgaagaagcccacgcccactctcaacaaaacagactcctccttgggaagcatctccagccctggggacaggacacctcgctgtgacttagggagggacaggattagcccaggaataaaagcatttttagaaattgttttctgcaccttcagaagctacaacactccttgtaacctttcagatggaagggatcagaggtgacagaatcgtgtatttctacatttatctgcggaagataaaatacaataaaaagtgagaagtgttcaaattccaccactaggaaaagaaacatcttgggtagagatgagttcgccttttgctgctgctgctgaagtggcttcaaatgttaaagctctggtgcccagggcatgccccaaaccagcaaaacctggctctgcaagtgttttctacagctccccaggtgactagagcctatgaccagtttgaggacagggcaataaagggaactctgatttctctcgctctctctctacaaatgtgagcttgaggcctttccaccctttacattacattacagacaagaaacaacatatttctttaaattaaatcatctctcttatatatgcatccatcttttgttgaatacaagaggctccttttaaatatatacattcagtacttctacatttatgtattcatttaaactctgtactgtagtaaaatatgcattgttttaattcataaggatttcctggcaacaatcaggttgatactcactgcgtttgctgattaagagcttagtgagccactccagggaccaattctcccttctggatgcggagaagcccatgagctattttaggactataatgagactctactgtgaaagcaaaatctgtctaatcttattcttatcacttacatttgtgtaatctgtctatttaagctacctttgggagtaggggtaaaatgttactgaaagcaactctaagtgcatggaatgaaatcaacgttaatctaagctgctacggaaagtctgtctttgttgttgctgttaggctgggggcgtggatctgagagtcgtgtcgtcagaactcctgaagccctgtcctgctactgctgccagcccctggtggctttcaggccgagcaggcgaggtggagggaagagatgaaagtgagaggaggtgagtggcagggagcg

SEQ ID NO: 55904 - DNA, 433 bp, Homo sapiens
cttttgtctttttttctacttgttagttgtattagtatcaaatggcataataaagttactttgtttgccatttcccactcatctgaaaatcacaaaaagcatttatttctaagatttatatccactgaccttttccccaaagttattttcctgttacttgtatttcatctttgcccttatttctttaatatttgtattagaattagcttgctcttgtttccttcacggcaaatgtgttacattgcccactgggtggcttctgcggatgcccctacccacccctcgtctggagcagagaagtcctgttagcctaggcagcatagtggctgctgtcagtgcgaggagttgtgcttctctagcatggtctgtgatgtcatctggacataattaattagactaatccgaatagaggaccaagacagccctgcctgcg

SEQ ID NO: 55905 - DNA, 406 bp, Homo sapiens
  misc_feature (1)...(406): n = a,t,c or g
ccctactctgcccctaagctggctgtacctgttcctcccccataaaatgatcctgccaatctaaggtgagtgtgaagctttgcacactagtttatgctacctagtctccactttctcaatgcttaggagacagatcactcctggaggctggggatggtaggattgctggggatttttttttttttnaaanagggnctaattntgttgcccaggntaaagngcaanggggcattcanagntnacttgnancntnaacctncngggttaanncaatcctcntaccttaacctccngggtanntancnccatggntgcccccnatgcccnatttttttttttaaanaanagggtnttnttnnntttncccaggttggtttnganctggtntnanggnaaanancttttg

SEQ ID NO: 55906 - DNA, 2828 bp, Homo sapiens
  misc_feature (1)...(2828): n = a,t,c or g
ttttttttttttttgcaacatacgtttttattactcaaggacaacctggacgtcaccaatgcccagcttcacgggggcatgtagtgtgactcacggctgaacacaaaatcactgtgaagcctgtgctacagccctgggctacttttggacacgcaagaggacactcggttacatgaaacctgacttgcttctgaagacatgtgatacatgtcttttccctgaaaatgtttcccttccctgtctgccatgctcccaacttttctgccttccaggggcttctcactgtctgggtaactaggtcttgggcctagctagaccttgggtagtggcccctctgccacaatcagtgcctgggcctgaggctgaagcttgtggcctccgaagcctgacctggctcggagctcgtctgtggcgcccagggatggcctggcttgcaggccaccacattaggccagctcgcaggtccccagtaaagcctgaagacactggcccgaggttggaggtgggtgctgctcgactttctggaggatctcagaattctcgcttcttgctaggactgaaccatgagacttacagccatacttcacttttcccaggnnnnnnnnnnnnnnnnnnnnnnnnnnnnnnnnnnnnnnnnnnnnnnnnnnnnnnnnnnnnnnnnnnnnnnnnnnnnnnnnnnnnnnnnnnnnnnnnnnnnnnnnnnnnnnnnnnnnnnnnnnnnnnnnnnnnnnngagngtngctaccgacgccaggctaatagtttnnnnnnnnnnnnnnnnnnnnnnnnnnnnnnnnnnnnnnnnnnnnnnnnnnnnnnnnnnnnnnnnnnnnnnnnnnnnnnnnnnnnnnnnnnnnnnnnnnnnnnnnnnnnnnnnnnnnnnnnnnnnnnnnnnnnnnnnnnnnnnnnattgtaagcaggtaggagggccctaggcctcgtcggccccattgtgcagggtggccactgtccaaagagatgggcaaagagctgctgccagaggcctgggctgcagacggccctgcatggctctcaggggagccagctccctactccacacccctgcacagcagcccctctcctcccctcacgggtctgtgcagccagcagcctcccaacatgcgccagcctcctcactggatgatgccagccttccttgcccccagatgctggcatggaggcagggttccactctgcctgcctatgcccacagagcctagaacagcagggccacctccttctctcccccgcgggcatgggcccccacccccactgccggcagagtgctgaggactcgtgcaccatgagaacttctgaccatgagaactttgacttccggatttgggggatctgcccaggtgaacacatcagctctgaaattcatcactttcttcgggcccctgcctgtcctgttccaggcccaatgcctgggagggagctggacgacagcagctgcaggctgtccagggccccatcctcgtacagggccagcttctggaccatcttctgtcgggcagggttgatgataatctgcggtggctctgacgacgatgatgcagagctgccaagggccagtccttccacggctgtgggccgggatcctgggccactcccccagctcgattctcctgccgtgtccccctgaggacagccggcctccctgaggggtgctgggtccagagggcagcttggagtcaagtgccaggagcgcagggcagcagagaggccgcctaggctctcgtcactctccacgggctggttggggcctctctgcagctgctctgctgcctgggcactggctcctgatggcgctgccaggggctgccatggagcagccccactgtgggctctgccagtgctggacacgtaggagttctcctgcggggaaggggggatgcagctggcggcctccaaatgcccgggcacccccgccaccactgcctgcagcttctctagcctctcgtacacctgggtcataggaggcctccttttggcccggcggtgcaggcagcagcaggccagctggcccaggcccaggcccagctcaggtgggcagggcccgggcctggggtccaggtgcttcttgtagatctgcatggcgatgggagcagcccaggcatctgcagccagacctgcttgcagtgtgctctgggtgcttctcaaagccactccagcctcctcagcctcctcttccaccaggtctttcagatacttggtcctggcaccgtgcgtcttcacagccctctgaccagccaaggtctctagcactaccaccccaaagctgaaggtgtccgtgtccacagccagccttcccgtcttgatgtactcctcgggcaggtaggccagggtgccccgcactgtctgtgtccgggccaccatgctgctctggctggggctggacccggcaaagcggctgaaccgggccaggccaaagtctcccagcttgggtgtcagcctctcatccagaaggacgttggaactcttgatgtctccatggatgaggcttggggctgtcctgatgtagaaactgaattgcccgggctgtacccagaaggatgtccagtcgctgaggccaggagagaggtgggcaggcctgggtctggcagtggagacggtcctccagggagccgttgggcaggaagccgtacaccaggcagtagaagccgttctgagcacagtagccagcaaagtccacaatgtttgggtgacgaaacctggacagctgctccacctcggtcaggaagctctgcttcactgcagtccactccaggtcagcgttctccttcagcctcttcacagcatacaccgtgttcctcatcaccgcccggt

SEQ ID NO: 55907 - DNA, 562 bp, Homo sapiens
  misc_feature (1)...(562): n = a,t,c or g
agagttgttcctactgatgggggcagatatgatgttcatttgggggagaggatgcggtatgctgtatactgggatgaactggcatcggaagtgagacgatgtacgtggttttacaagggggacaaagacaataagtatgtnccctactcggagagcttcagccaagttttagaggaaacttacatgcttgctgtaactttggatgaatggaaaaagaaactggaatctcccaacagagaaattattattttacacaatccaaagcttatggtgcattaccagccagttgcagggtctgatgattggggttcaacacccacggagcagggtcgaccaagaactgtgaagagaggagttgagaacatctctgttgacattcattgtggtaatgttaatcgtttattttttcttacctttggatgtatttgtttactccttaaattgtgacctttttctgtggatttagattacctcaaggcttaaaaatcatctttaatcatatgggtttattccaagttgagattaccatcacttcgtctactaagaatcttantanatgtac

SEQ ID NO: 55908 - DNA, 1509 bp, Homo sapiens
ttttttttttttttcaagtttccaaacaagaatttattctttcttttttaatctttttttctaaaaaaaagtaccaggtacaattttttcctgtttttgatttgctttgttttttcaagtttcagcaaatgcttgttcccctcagcccagccccaggagttaggactgaggctgggtcagagtctggagtggggaatggggtagtttggaaccacatgactgagtttgaggggtgcccctcaccccagctgaggtaggtgggtcagagtctggccaggtgagaggaggcaccccagtgcttggccctgactctgccccctggacaccttcttcagtcaggacccccaaaacaaggagacacaggtaggaggagagggacaactggagtctggagccctaggtgaggggtggttaacccctgtgtgtgtgcatacatgcacactcacacacacataccacacaaagacaagcttgtgcacacacacatacgcataacttggctttcagagataggtcagagggtaggggaagtgaagggactggggaaggacaggggaagctgagtctttggctactgactcagtccctctggaatagcccctctttcccctcagctgagggaaagcagttctcctcctgcccccaccgcataagccctcttcaactcctgaggttggagcaatatctgagagtgggaagcggggaggagtgatgccaattatcaggtgtgggaggttaccaaggcaatccaatttgaataaattataaattaaaaataaataaaataacaagtggcccctgcccaggacagggaggcaacgcctggcataacttgcctgggaacttgagaaaatctcagggtagctccagttcctccctactacctaagctggcctgggaaacccaagggaggggacaggcacatggagtacccgaagtagggcagggtgtagtaagaatcagaagctttaaacacccaaataatccatttgggcgtgagcatggtgagggctttaattcaagcctgaagggtctcttgctgtctctccatatatgttctctaagatggagcaggatgggcaggtcattagcccgcatgggttcagagtgctggcaatcagggcaaaggtgaataacgtggattatgaggggcctcggtcacagcctgcagttcgtaggggagccctgtgtccagctccaggctccggcgggaaaaaagcaggcggatatctccatgcaggcttaagcggcctgagcgggagctccggaacctgaggtgcagcaagtagcagaggaggcggtgggtggggttagcatttccctcctcacccacaggcaccaaaaagaggcgatggcgcaggaaggtcatgtgggcagcaggcatgtccgagaagtcaaaggtcacaaggaacatctttaccacagtctggttggggttaaataaggtctagggataggacagtcaaggttggtagggcctgagggctgctttcctctctccccactccc

SEQ ID NO: 55909 - DNA, 345 bp, Homo sapiens
ggtttttttttgtttttgtttttgtttttaatggtagcaacaaatgcacattttaaaagaaaactagagaaaaattggtggcggccaaagcatccctaacccggcacactcttctccggtggagcaaaatgccaggttcctggggtatcctaagatccatgtgcatttatgggatgcttactgtatgccaggtactgttctagaacttttcttgtctgaattcattgactcttctccaccccaccctgcgaggttgttagtggtacctcacagaggaggaaatgaagcccagagaggtagtggagtttgcctagagtcacacagcagggaagacgaagggctgag

SEQ ID NO: 55910 - DNA, 344 bp, Homo sapiens
gaaattttgataaataattgttgtggcaccaaatatgccttttattcagctagttatgtgagaattatttttaatttactacacttgacaaattaccttggatagttaaaaagttaattctattctgtgaaattaagctttgtaaaaatagtataattgacctaatattcaaggccagcttaaatttgtttaacttttaagtcttttaaaggactctttagcccacaaattggagtgttagctagattacagtgttttcctttatcttccttcccctagtgcttctgctatgcccagacgttcaaggtcactcaagggatttgtgcataatggggcaaaagggt

SEQ ID NO: 55911 - DNA, 327 bp, Homo sapiens
atgccattgaaatagttcagatttcggaagcctaaaaatggcctttaccttacccttaggtgtaacctgaggattaagttgggattgttcctttatgttttaaaaccagctttttggttatcatctttaaggaaatgtcaccagctctgcactgtgggggcagccatgcctggactggatgcctctagggatggagacattggtaccataaagtcgacagagccaaccatggcttgtggcttgttgcctctggcccaactggccttcactaaataatatcctagatattattttgttgctcaagcccaaggtgtcccaccctctttt

SEQ ID NO: 55912 - DNA, 717 bp, Homo sapiens
aggaaagatactgaggagtgggagccgcggggttcagagcgatgattcccccacaggaggcatccgctcgacggcgggagattgaggacaagctgaagcaggaggaggagactctgtccttcatccgagacagcctggagaagagcgaccagctcactaagaacatggtgtctatcttatcatcctttgagagccgccttatgaagctggagaactccatcatccctgtgcacaagcagacggagaatctgcagcggctgcaggagaatgttgagaagacgctgtcctgcctggaccatgtcatcagctactaccatgtggccagtgacactgagaagatcatcagagagggccccacaggtaggctggaagagtacctgggaagcatggccaagattcagaaggcagtggagtatttccaggacaacagcccagacagcccggaactcaacaaagtggtaaggggtccgcagaataacgtgagaagcttggggatatcagtctctgccctggtctcatgagggacatggagccagcttgaggatgtatgcagtagaatacacagaaggatatagcacagtacatcctataggcattaggatctctgcttcaagaattgcacattttttattattaaaaattctttattataaaacttgttaatgtattataaaaattaaattataaattacatataaaatataaacttaacatttg

SEQ ID NO: 55913 - DNA, 560 bp, Homo sapiens
aggtcctcgctaagaaggagctgctctacgtgcccctcatcggctggacgtggtactttctggagattgtgttctgcaagcggaagtgggaggaggaccgggacaccgtggtcgaagggctgaggcgcctgtcggactaccccgagtacatgtggtttctcctgtactgcgaggggacgcgcttcacggagaccaagcaccgcgttagcatggaggtggcggctgctaaggggcttcctgtcctcaagtaccacctgctgccgcggaccaagggcttcaccaccgcagtcaagtgcctccgggggacagtcgcagctgtctatgatgtaaccctgaacttcagaggaaacaagaacccgtccctgctggggatcctctacgggaagaagtacgaggcggacatgtgcgtgaggagatttcctctggaagacatcccgctggatgaaaaggaagcagctcagtggcttcataaactgtaccaggagaaggacgcgctccaggagatatataatcagaagggcatgtttccagggagcagttaagcctgccgagccgtgacc

SEQ ID NO: 55914 - DNA, 398 bp, Homo sapiens
gaggtcagagacttcagatcgcaccttactttcctccttcttaactcttccccttggctactagggctccaggtggggtcctctggcctagagggaagaaaaggcttagggtttggcagttggagctgaagactattccctccctctctctacccagcctctctgggtgtacctgggagcccatgtcctccaaagctcaggctgtggtagggtgccaagcacaagctccctgtagtaactccaagagggggacaggtctctggggatgtccttcacaggacaggcaagggccctggctggccacccacagccgggaccccaggagatccagcaggtactgtagctggaacacagcagttcccatagatggtccctcctcaaacccaatcacagacagc

SEQ ID NO: 55915 - DNA, 2597 bp, Homo sapiens
gctttctcctagggactgtgaggggcgcttctgactttggacttgagcactgcctgggacctgtgctgagagagcgctagcatgtctcagtggaatcaagtccaacagttagaaatcaagtttttggagcaggtggatcaattctatgatgacaactttcccatggaaattcggcatctgttggcccaatggattgaaaatcaagactgggaggcagcttctaacaatgaaaccatggcaacgattcttcttcaaaacttgttaatacaactggatgaacagttaggtcgtgtttccaaagagaaaaacctactcttgatacacaatctaaaaagaattaggaaggtccttcagggaaaatttcatggaaatccaatgcatgtagctgtggttatttcaaactgtttaagggaagagaggagaatattggctgcagccaacatgcctgtccaggggcctctagagaaatccttacaaagttcttcagtttcagaaagacagaggaatgtggagcacaaagtggctgccattaaaaacagtgtgcagatgacagaacaagataccaaatacttagaagatctgcaagacgaatttgactacaggtataaaacaattcagacaatggatcagagtgacaagaatagtgccatggtgaatcaggaagttttgacactgcaggaaatgcttaacagcctcgatttcaagagaaaggaggctctcagtaaaatgacccaaatcatccatgagacagacctgttaatgaacaccatgctcatagaagagctgcaagactggaagcggcggcagcaaatcgcctgcatcgggggtccactccacaatgggctcgaccagcttcagaactgctttacactattggcagaaagtcttttccaactgagaaggcaattggagaaactagaggagcaatctaccaaaatgacatatgaaggtgatcccattccaatgcaaagaactcacatgctagaaagagtcaccttcttgatctacaaccttttcaagaactcatttgtggttgagcgacagccatgtatgccaacccaccctcagaggccgttggtacttaaaaccctaattcagttcactgtaaaactaaggctactaataaaattgccagaactaaactatcaggtaaaggttaaggcatcaattgacaagaatgtttcaactctaagcaaccgaagatttgtactttgtggaactaatgtcaaagccatgtctattgaagaatcttccaatgggagtctctcagtagaatttcgacatttgcaaccaaaggaaatgaagtccagtgctggaggtaaaggaaatgagggctgtcacatggtgactggaaggaacttcattccataacgtttgaaacacagatctgcctctatggcctgaccatagatttggagaccagctcattgcctgtggtgatgatttccaatgtcagtcagttacctaatgcttgggcatccatcatttggtacaacgtgtcaaccaacgattcccagaacttggttttctttaataatcctccacctgccacattgagtcaactactggaggtgatgagctggcagttttcatcgtacgttggtcgtggtcttaactcagatcaactccatatgctgggcagagaagcttacagtccaatctagctacagtgatggtcacctcacctgggccaagttctgcaaggaacatttacctggtaaatcatttaccttttggacatggcttgaagcaatattggatctaattaagaaacacattcttcccctttggattgatgggtatgtcatgggctttgttagcaaagagaaggaacggctgttgctaaaggataaaatgcctggcacctttttattaagattcagtgaaagccatctcggaggaataactttcacctgggtggaccattctgaaagtggggaagtgagattccactctgtagaaccctacaataaaggccggttgtctgctctgccattcgctgacatcctgcgagactacaaagttattatggctgaaaacattcctgaaaaccctctgaagtacctatatcctgacattcccaaagacaaagccttcggtaaacactacagctctcagccttgcgaagtttcaagaccaacagaaaggggtgacaaaggttatgttccttctgtttttatccccatctcaacaatccgaagtgattcaacagagccacattctccatcagaccttcttcccatgtctccaagtgtgtatgcggtgttgagagaaaacctgagtcccacaacaattgaaactgcaatgaagtctccttattctgctgaatgacaggataaactctgacgcaccaagaaaggaagcaaatgaaaaagtttaaagactgttctttgcccaataaccacattttatttcttcagctttgtaaataccaggttctaggaaatgtttgacatctgaagctctcttcacactcccgtggcactcctcaattgggagtgttgtgactgaaatgcttgaaaccaaagcttcagataaacttgcaagataagacaactttaagaaaccagtgttaataacaatattaacagaagaaa

SEQ ID NO: 55916 - DNA, 378 bp, Homo sapiens
accacgcgtacgctaatttctccttctcaggtagaagaatgccattcactcccaagtggtgagagacaagcagccagtggtaggaaggtcatcaaatcagcatccccagaacacacctgtgttaagtcaaagaccttggacccaatggtcatcttcttcaccagtgggaccacaggcttccccaagatggcaaaacactcccatgggttggccttacaaccctccttcccaggaagtaggaaattacggagcctgaagacatctgatgtctcctggtgcctgtcggactcaggatggattgtggctaccatttggaccctggtagaaccatggacagcgggttgtacagctttatccaccatctgcacagtttgccca

SEQ ID NO: 55917 - DNA, 212 bp, Homo sapiens
tttgagtagtcatttgtaaatatttacacgctgtaaatattaaaacagtaatcctgcttctccactaaagtcagctccttataaaatcagatgttggatgcaaactgggttagatgtgggctgcatctaagtttatcaagcatgtatgtgaccaacatgcagagcaatcaaaataaactttgattaaaaagcttagctgggctgggtatagt

SEQ ID NO: 55918 - DNA, 658 bp, Homo sapiens
cggcacgaggcgatgtccagttcccagcaatttactcagagatggtaccatcaagcccccatgtttgtccggtagataacacccagagccccctcacctgtcactttgtgatgaatttgaagctcctgcacctggaactgttttcctgtaaccatttgtctttaacttttttgtctgttttttcttctgtaagtttattgcagctggaatcccccctcccctctctaaaccaatgtataaaagaaaatctagcccattctttagggccgagagtatttcctgtgttagccatctctcagtcaccagctaataaaggactcctgaattcgtctcaaagtgtggcatttctctctaactcgctcggttacaacaatgcagttactgactcaaggatttaagttttcttgattcaggcccaagagccagggccctttgtcatccacccactgaatcccaatacccatctggccgctgaagcagctgtatttgttcacatattagcctgtgtgagccctgtgcatggctggccagctgtctgacaggtcaggatcaacagcactcccttgggctgacaatgtcctcctgcttgtggtggcccatcctcagccctgcaggaacctgaaagaagctgacaggttcaatgtaaggaaggaagaac

SEQ ID NO: 55919 - DNA, 424 bp, Homo sapiens
ctttatactcatcctagataaaaagagcttccagccccaatggaagtgcccttggggctggaagctctttatactcatcctagataaaaagctccttgaaagactgctataggaacatacccgacagtgaagacacatggaggcagaggcagcaggagtccttagaatcatttattcccgcccagctgcatcttggtagaggaggctgaggccaagggcttcgtctggctcctgccaaaactagaattagaaggagtggggatcctgtaagtccagcccatgctctcccttggtgttgggctgtaaaaagatcacgaggagttcagttgggtgagcctccctccttccatcactaaaacacaatcatctcacattataaatatctcagaatcttcctaagagatcagtgtagttcttcttattg

SEQ ID NO: 55920 - DNA, 130 bp, Homo sapiens
gttcgaagatgatgaatatgcctaattaccctgaatctgaatcactacacatttatacatatcaaagcattactatgtactccatgaaaacgtataattattatttgtcaattcaaaaataaaattttaa

SEQ ID NO: 55921 - DNA, 389 bp, Homo sapiens
  misc_feature (1)...(389): n = a,t,c or g
gacaggctgagaacagaaagggattctctgaaggaaaccattgaagagcttngttgtgtacaagctcaagaagggcagctcacaacacaagggttaatgcctcttggaagtcaggagtcttcagacagtctagctgcagagattgttacacctgaaatcagggagaaacttattcgtcttcagcatgagaataagatgttaaagcttaaccaagaaggttnggacaatgaaaaaatagccttattgcagagccttctagatgatgcaaatctacgcaagaatgaactggagacagagaataggctggtgaatcaaagacttctggaagtacagtcacaagttgaagaattacaaaaatctttacaggatcaaggctnaaaagcagaaat

SEQ ID NO: 55922 - DNA, 428 bp, Homo sapiens; identical to SEQ ID NO: 28500
  misc_feature (1)...(428): n = a,t,c or g

SEQ ID NO: 55923 - DNA, 390 bp, Homo sapiens; identical to SEQ ID NO: 44380

SEQ ID NO: 55924 - DNA, 304 bp, Homo sapiens; identical to SEQ ID NO: 40615

SEQ ID NO: 55925 - DNA, 1028 bp, Homo sapiens
tttttttttttcatttttcttacttttaatatctaagataaaaaaaaaaacccaaccaccaaaacaacccatttgcatgctcggcgacacgcctggtctcgggctccctttctggggctgtcctcccaggcggctcccaggtcctcatccagggaagagcccagcctcggccagaagccaccgcggcctccagttccgcaccgtgacaacctgggacccagcctttcagaaaggccaccaggaactgtttttaaagcatagggctgcactaggaggaagttttcccttgaggctgagagttatttcttgtggagaaatttcattttattgcctagtcccttcaggaacttattgacaccgctgtgctctccactggggagtgtttccagatactcttgggctcggacctcaaacagacctttggcatcctgccggcgcagtccccgctcctggatgaagccccgaaacatctgagtctccatgaagacctccaggaagtggcggaggctcttggaggagacagctttgcggaaggcctcccgctgcagggttctctcctcacgctcgcccgacgtcaggaacaaagagtagtgtcccacaatctccacgaagaagcggacaaaggcttcagacaccacctcgttcaaggggctggactctggaccgtgcctgccgtctaggggcccttcgtcctgctcacaagccagctcgttcctctgttccagaatgtgttccagggccacctgaagcttccggggcaggatggagtcctcatcgtccatctgtctgaggaaccggctgttgacgaggtcaaccacaaggacctcttccagcggcagctccctgagcagtggcagcgagctggagagcagcccgatgaggaagggcgtcggcgagcacacgatgtcgaccatggcgggtggcagcaccgggatgtaggtgtgctgccaggcgaaggggtagatcagcgccaccatcgcgtggcagcacttggacaggatgctgagcttgtctgcaatgaagatgac

SEQ ID NO: 55926 - DNA, 1697 bp, Homo sapiens
atttattactttcctagttgtttcattgcactgagccctgagattcccaaggagtaaccataaaagatttcttttattttgtccatgacctacgagacaggatcattctaagaagagcaggcatgagtttgagtgcaagaagagtcactctgcctgcaataacgccaataatcctacagaaaagggtgattaaagtatacagtgaagatgaaaccagcagggctttagatgtacccagtgacataacggctcgagatgtttgtcagctgttgatcctgaagaatcattacattgatgaccacagctggaccctttttgagcacctgcctcacataggtgtagaaagaacaatagaagaccacgaactggtgattgaagtgctatccaactgggggatagaagaagaaaacaaactatactttagaaaaaattatgccaaatatgagttctttaaaaacccaatgtatttttttccagagcatatggtatcttttgcaactgaaaccaatggtgaaatatcccccacacagattttgcagatgtttctgagttcaagcacatatcctgaaattcatggtttcttacatgcgaaagaacagggaaagaagtcttggaaaaaaatttacttttttctaagaagatctggtttatatttttctactaaaggaacatcaaaggaaccgcggcatttgcagtttttcagcgaatttggcaatagtgatatttatgtgtcactggcaggcaaaaaaaaacatggagcaccgactaactatggattctgctttaagcctaacaaagcgggagggccccgagacctgaaaatgctctgtgcagaagaagagcagagtaggacgtgctgggtgaccgcgattagattgcttaagtatggcatgcagctgtaccagaattatatgcatccatatcaaggtagaagtggctgcagttcacagagcatatcacctatgagaagtatatcagagaattccctggtagcaatggacttctcaggccagaaaagcagagttatagaaaatcccactgaagccctttcagttgcggttgaagaaggactcgcttggaggaaaaaaggatgtttacgcctgggcactcacggtagccccactgcctcttcacagagctctgccacaaacatggctatccaccggtcccagccatggtttcaccacaaaatttctagagatgaggctcagcgattgattattcagcaaggacttgtggatggagttttcttggtacgggatagtcagagtaaccccaaaactttcgtactgtcaatgagtcatggacaaaaaataaagcactttcaaattataccagtagaagatgacggtgaaatgttccacacactggatgatggccacacaagatttacagatctaatacagctggtggagttctatcaactcaataagggcgttcttccttgcaagttgaaacattattgtgctaggattgctctctagacaagccagaagtgacttattaaactattgaaggaaaaggactcaagaaaaataataaaagaccataaataagggcgaaaacattatcatgtgaaaagaatgtatttcacctgcaagttacaaaaaaatagtttgtgcattgcaaataagcaaagacttggattgactttacattcatcatttaaaattcattagttaaaattaaaccttagg

SEQ ID NO: 55927 - DNA, 353 bp, Homo sapiens
ctgagtctgtgatcaaaccatttgaagaaaaagctgccaagagaatcatgatcatctgtaaagccctcaactcaaatcttcagggatgtgttacggagaatgaaaatgatccgataacgaatattgagcctttttttgtgagtgtggcactttatgacctcagagacagcaggaagatttctgctgattttcatgtggatctaaaccatgctgctgtcagacagatgctcttgggggcttctgtggctttggaaaatggcaacatcgacaccatcactccaagacaatcagaagaacctcacatcaagggacttccagaggaatggctaaaatttccaaagcaggctgtattt

SEQ ID NO: 55928 - DNA, 359 bp, Homo sapiens
gttaatagaataaaaaaaagtacaatggtgaaatgactgaaggaaaatcttaattggaatgtaagctccctgagggcagggaactgttggtggctgctgtttggtaactaaatgaacgaactgagtccagcctgcttttttcaccgtggaggtagctgctacccagtaaagttacgttggttgcttcagatccacacttaggttgtagcagggctgagctagcagtcaggttttcctgttcctgtcttgtcctctgacgtggcttcagggccctggaaggttctctgctaagcacgcatccagatgggtgcaatggcagcccgagcgtgtacaccgcacacctcctgttctgggggagt

SEQ ID NO: 55929 - DNA, 6873 bp, Homo sapiens
  misc_feature (1)...(6873): n = a,t,c or g
ctcactccccctccaccttgctgaccaccctcatgttctttaataccaagtacttcctattgaagacagtggaccagcacatgaagctggccttctccaaggtcttgcgacagacaaagaagaacccctctaatcccaaggataaaagcacgagtatccggtacttgaaggcccttggaatacaccagactggccagaaagttacagatgacatgtatgcagaacagacggaaaatccagagaatccattgagatgtcccatcaagctctatgatttctacctcttcaaatgcccccagagtgtgaaaggccggaatgacaccttttacctgacacctgagccagtggtggcccccaacagcccaatctggtactcagtccagcctatcagcagagagcagatgggacaaatgctgacgcggatcctggtgataagagaaattcagggaggccatcgcagtggccaattgcaaagcactatgcactgagatgccttgggccatggcacaagagaaaccagccaggaaaaaccagacagactttcacacttaaagaagaggcctccattttttttttttcttttttttattgggtgtagttacgaagcctttcaggctgcttctgtttaaaatataaaagaaaactttgccccctttgcatcttcataaacctggctgcggcagactcctcagccgatggtggctctgggtttccttgagtgtcatatgtcctagaaagttgctggctgactcttttttgtctggggcctggggaaagggcttggactgtgaaaaagaaatgtggcccctttccatcttcaagagagatggaattaatgatggatggaccctggagggaatctccccagccgacttccactgggctgacagactttgctgaccacaggggaacgatgttcttttctttcttcatgatcagacataaacttagcatcttaatggaagaaaaatgaggggaacttcaattatgatttattaaagacaatttctattacaccctcctttatgacaagtgacattttagatgtaaaagtaaaaactttaccatgccttttttttttttgttggcctaacattgaggccttaaaacctgaggctcctgtgcctgatggaattcttgtaacatacacttgtgtatcatataaagataccactctgtttctcttatgtattcttactctagttgtttattaagaatgacaagcacgtcttttcaacatgttagtgaacaacgtctctttattttggggaggagcccggtgggacagtagaagtaaacccttgcctgttaattgaactggccgaggtcctgcggggagtgtggggtgggacgtgaagtggcagctcctcagtgacaaggccactatgtgctatacgcatgcgctgtttcttcagcgccagctccgcccccgccgcagcgaggcgggtaggttccgcccgcgcgcactacgccctgacgtcagcgtcgcgcgcagcagtgacgaaatcggctggtttatattggcgcggcccagacggcagaggtctctgcggcgcggtcctcggagacacgcggcggtgtcctgtgttggccatggccgactacctgattagtgggggcacgtcctacgtgccagacgacggactcacagcacagcagctcttcaactgcggagacggcctcacctacaagtgcgggcctatggggctcacctgggcgaagagaggggcggcacctggggaaaaggccagatgggggcttccgagagccgccttgggcgtgggcgtgggggacaggtttcgggaattggccacccacctccggggctcactttgagacatctggagcggtgcttggggtacggagaagcatctcagtagtgcttggaatctcaggccggagattccatgctccagacacatggaattgtcagggtgccaggagcactgatgacagctcggtggcagaaaaggtcccctgtacccatttccaccttgtgctgtgcctgtgacacacagactctgtcagtgccactctctgctgacatgcgttacgggttgattggtacatggggatggagtctcatgctgccctaagctgagagctttactcccaattcactcccttccctcgcagtgactttctcattctccctgggtacatcgacttcactgcagaccaggtggtgagtatgatcaggaattgggtcctgaacataaggtgagctaaggtgctactatcacctggtctctgggctaactcaccagattgggcttgggggtggattttataggatcatgttgcttgttagcatgcaggtcatacaaaagtgccttttgtgggggactcagtaacaccttgaggtgtaagggatgctttcccacactggttgacgtttgtctcctcaggacctgacttctgctctgaccaagaaaatcactcttaagaccccactggtttcctctcccatggacacagtcacagaggctgggatggccatagcaatggcggtgagccccatggggtgtgggggaaggagcaaggactccatcgcctttccccaaaggcattcagtcctgcttcttgtcacttagtagtagtctctttttatcctgtagcttacaggcggtattggcttcatccaccacaactgtacacctgaattccaggccaatgaagttcggaaagtgaaggtcagaagggcaacgatcattagcaagcgctcctgggaattgcactgaggtggggtggggtgggagtaggggtttattctaatttagtattctttcttcccaccatggggttcagttactgagaagaccctgagattctgtttcttaaagcagcagcaatagaccaggtgtacagtgcctccagcctacccatgtctctaagatgtgttggtgtgatttggtcttgtggcactgccaaagggatcgataagcagagaccccatgcttcagatcaagagcctgatgaaagtagttcaaagatgcgatgccctttctcaccatccctttccagaaatatgaacagggattcatcacagaccctgtggtcctcagccccaaggatcgcgtgcgggatgtttttgaggccaaggcccggcatggtttctgcggtatcccaatcacagacacaggccggatggggagccgcttggtgggcatcatctcctccagggacattgattttctcaaagaggaggaacatgactgtttcttggaagaggtgggtgccactggcagagtagatccaagctctagcagcccaggttgaagacaaggggcttctgttgtctaagacatctctgatagcctcttctctctgggaaaggagtgtcaaaccaagtttctgactcctttattgggttcctgcatccttcccctccagaggctttcaaactgcccaaatgcttgctagtattcatgctttgttcttttaaacccctaaggtaggggcagtgcttgaggtctgccctgattttcttgccattgttcctgtgttgtcctccttattccatagtgtaagagggtgctccctgtgccatgttgtcctttctactcatccctcactcaataccatactgctaagaattattgggatcccttgaggaagggtgttttgggtgtgaatgtatgaacgtggtggtccatagaacttcacccctgtaatctcagtactttgggagacttnnnnnnnnnnnnnnnnnnnnnnnnnnnnnnnnnnnnnnnnnnnnnnnnnnnnnnnnnnnnnnnnnnnnnnnnnnnnnnnnnnnnnnnnnnnnnnnnnnnnnnnnnnnnnnnnnnnnnnnnnnnnnnnnnnaggaaagaaaagagttaactggtcatagtcgatgactggcccttcttcacatctcacctcccacgtagataatgacaaagagggaagacttggtggtagcccctgcaggcatcacactgaaggaggcaaatgaaattctgcagcgcagcaagaagggtaagtcctagagctgggaaagggcctggaactaatgcctagggtcctgattcatgtcctgccctgaccacaggaaagttgcccattgtaaatgaagatgatgagcttgtggccatcattgcccggacagacctgaagaagaatcgggactacccactagcctccaaagatgccaagaaacagctgctgtgtggggcagccattggcactcatgaggatgacaagtataggctggacttgctcgcccaggctggtgtggatgtagtggttttgggtgagcctgctacacaggtgggttggggcaataggggcagctgccacatgacagtctgagacttacttcttgtcctagactcttcccagggaaattccatcttccagatcaatatgatcaagtacatcaaagacaaataccctaatctccaagtcattggaggcaatggtaaggcaagattgtgccctgaaggatgtgtggtgggagtgggtaagctgggctcccaccttaaccttcacatgagcattttcctttccttcaccatagtggtcactgctgcccaggccaagaacctcattgatgcaggtgtggatgccctgcgggtgggcatgggaagtggctccatctgcattacgcaggaaggtaagaatatactttgatagggcccacagagaccccagtttcaggccccacataccttggaaccaagcactcttatggggacaatagagccctccaataggggcaaccctggggccaaattggcctcttggatgggtgacatggctggaagcaagacaaggtcttgtcatccatcacctgccactcccttgcctagcctggccttcttgctcctgctctgcaccttctctaaactctggtctgtttgttttatttagtggctcccaagatccctccagacataaagtcccacagccccaaatgcccttctactgtcacgggttgctatagtaagtccagcccggcccactggcccggcccagctgcccactgcccggctgcttggttgacgtagctgtagctcccggggtttgtggtgctgatgggtgggcaaggccaactgatacacagaccatggtttgggggtggtgctcaagaacatagctccctcttccttctggggtgctgatagggcaggaccttcttccctaggcaggaccttttctgcccacatcttctgcagcaggcatagttcagggaccaactcctttgtgtggtccttgctctcccacacaaccactgcctgctccacacaaccacagcctgctctcctacacaaccactgcccttatcttgcctgagctgcccaccattcagggaggaagggctgggcctgacctcagtgcctctggggactaactgcacggtgactcctgccccatctgataccagctggacggggctttcccggctgctaagactgcatgtgcctgaggctgccctgggcactgcacacatgcacgtgcacatgtgggggtgagtagaggtcagcacagctgtttgtactatttaaggcagatgtggcagcagccatcccagacacgtctgttcctcagccaagctgcagtcctgatgcagatgtagccaaaagctcctgggtcctaaatatggccacagggtccactgcccgtccccattaaccctatccacccatgtgttcctccatctcaacagtgctggcctgtgggcggccccaagcaacagcagtgtacaaggtgtcagagtatgcacggcgctttggtgttccggtcattgctgatggaggaatccaaaatgtgggtcatattgcgaaagccttggcccttggggcctccacagtcatgatgggctctctcctggctgccaccactgaggcccctggtgaatacttcttttccgatgggatccggctaaagaaatatcgcggtatgggttctctcgatgccatggacaagcacctcagcagccagaacagatatttcaggtgggacaggcaagccagttaccccaccctaatcctgcactgacagtctcatctctgctgtgaccttgcccgtgctctctgcctctccctgcagtgaagctgacaaaatcaaagtggcccagggagtgtctggtgctgtgcaggacaaagggtcaatccacaaatttgtcccttacctgattgctggcatccaacactcatgccaggacattggtgccaagagcttgacccaagtccggtgagcttggggagctgggacatgggtagaggggctggtccagggccagctacccacatttgacctctgcccttcttcagagccatgatgtactctggggagcttaagtttgagaagagaacgtcctcagcccaggtggaaggtggcgtccatagcctccattcgtaagtcaccctgtccttggtggggcctctgccatacctcatgcctcctttctcctgccctcacctcacaggtggtccttctgcctgcaggtatgagaagcggcttttctgaaaagggatccagcacacctcctcggtttttttttcaataaaagtttagaaagaaaaaagtgatgcctgatctttcaacagacaggtggggctctgtagctgccactaccacagatgcacacaaaaacagcaccctcatttccagggggagcctcaggccccgagataaatgtgctccatggacctggaagcgggtagttccaggtccaaaaagttcctcctgaggctgctcacaaaacagctgactatagctatagctatggctcttggggtttcagtctcacactgagcatctgactctggctcccaagggtcaaagaacaagccctgggactggcatacacagggcatctgctagccatagcttggccatataggaccaggtcaacacacatatatt

SEQ ID NO: 55930 - DNA, 1348 bp, Homo sapiens
cagcgagtctggcgcagagtggagcggccgccggagatgcctgacgcatctttctgaggagcggtcagtgacgcgatggagcgggcaagggatcgcttacacctgagacgaactacagaacagcacgtaccagaggtggaagtccaagtcaaacgcagaaggactgcctcactgagcaaccaagagtgtcagttgtacccgaggcgttctcagcagcagcaagtacctgtggtggatttccaggctgaactgaggcaggcattcttagctgagacaccaagaggtggttaaagccatattggagtagcgaggaatctgattccaagcaaaaaccaggctccatctactcttttgaagcttctgccccagcttgcattgtttcttaggagaacccgcgtcatacctttatctatagccttcccctaggtcttcagaagcatcaagttttaactgtggacattgggatttggtggaacagcaatcatgactgttggcaagagtagcaagatgctgcagcacattgactatagaatgagatgtatcctgcaagatggccgaatcttcattggcacctttaaggcttttgacaagcatatgaatttgatcctctgtgattgtgatgagttcagaaagatcaagccaaagaatgcgaagcaaccagagcgtgaagaaaagcgggttttgggtctggtgttgctgcgtggggagaacttggtatccatgactgtggaggggccaccccccaaagatactggcattgctcgggtaccacttgctggagctgctggaggccctggggttggtagggcagctggtagaggagtaccagctggtgtgccaattccccaggcccctgctggattggcaggccctgtccgaggagttgggggaccatcccagcaggtaatgactccacagggaagaggcactgtagcagctgctgctgttgctgcgactgccagtattgctggagccccaacacagtacccaccaggacggggcactccgcccccacccgtcggcagagcaaccccacctccaggcattatggctcctccaccctggtatgagaccacccatgggcccaccaattgggcttccccctgctcgagggacgccaataggcatgccgcctccgggaatgagaccccctccaccaggcattagaggtccacctcccccaggaatgcgtccaccaagaccttagcatactgttgatccatctcagtcactttttcccctgcaatgcgtcttgtgaaattgtgtagagtgtttgtgagctttttgttccctcattctgcattaataatagctaataataaatgcatagagcaattaaactgtgaaa

SEQ ID NO: 55931 - DNA, 4025 bp, Homo sapiens
agatcccagttcccgcgtgcgcaaaccacgcccctgtagattctcgctgctgcgtgttcgcgcgcgtcccggagtgcgcatgcgcagcggcgggggttgttccggctgcctttcactgaggggacccgccagtttctaactcagtggcgtttgccctgattcccggggcctggctttcagcgtagcaattctgccggcgaagaaggtgagcgcagtgctgtgtggcagcagagctccttaggacgaggagcagcgggacgaggaagggcagactggtgaaatcgcaaactgggcgtctgttccggcgccggacccctatttgcaaaggtccatggctaatgaaacacagaaggttggtgccatccattttccttttcccttcacaccctattccatccaggaagacttcatggcagagctgtaccgggttttggaggctggcaagattgggatatttgagagtccaactggcactgggaagtccttaagtcttatttgtggggccctctcttggctccgtgactttgaacagaagaagcgtgaagaagaggcacgactccttgaaactggaactggccccttacatgatgagaaagatgaatccctgtgtctgtcttcttcctgcgaaggggctgcaggcaccccgaggcctgctggagaaccggcctgggttactcagtttgtgcagaagaaagaagagagggacctggtggaccgactaaaggcggagcaggccaggaggaagcagcgagaagaacgcctgcagcagctgcagcacagggtgcagctcaagtatgcagccaagcgcctgaggcaggaagaagaagaaagagagaatctcctccgcctcagcagggagatgctagagacaggcccggaggctgagcggctggagcagctggagtctggggaggaggagctggtcctcgccgaatacgagagtgatgaggagaaaaaggtggcgagcagagtggatgaggatgaggatgacctggaggaagaacacataactaagatttattactgtagtcggacacactcccagctggcccagtttgtgcatgaggtgaagaagagcccctttggcaaggatgttcggctggtctcccttggctcccggcagaacctttgtgtaaatgaagacgtgaaaagcctaggttctgtgcagcttatcaacgaccgctgcgtggacatgcagagaagcaggcacgagaagaagaaaggagctgaggaggagaagccaaagaggaggaggcaggagaagcaggcagcctgccccttctacaaccacgagcagatgggccttctccgggatgaggccctggcagaggtgaaggacatggagcagctgctggcccttgggaaggaggcccgggcctgtccctattacgggagccgccttgccatccctgcagcccagctggtggtgctgccctatcagatgctgctgcatgcggccactcggcaggccgcgggcatccggctgcaggaccaggtggtgatcatcgacgaggcgcacaacctgatcgacaccatcacgggcatgcacagcgtggaggtcagcggctcccagctctgccaggcccattcccagctgctgcagtacgtggagcgatacgggaagcgtttgaaggccaagaacctgatgtacctgaagcagatcctgtatttgctggagaaattcgtggctgtgctaggggggaacattaagcaaaatcccaatacacagagtctgtcacagacagggacggagctgaagaccatcaacgactttctcttccagagccagatcgacaacatcaacctgttcaaggtgcagcgatactgtgagaagagcatgatcagcagaaagctctttggattcactgaacggtacggagcagtgttctcatcccgggagcagcccaaactggctgggtttcagcaattcctgcagagcctgcagcccaggacgactgaagctcttgcagcccctgcagacgagagtcaggccagcaccctgcgaccagcttctccactgatgcacattgaaggcttcctggcagctctcactacggccaaccaggacggcagggtcatcctgagccgccaaggcagcctcagtcagagcaccctgaagtttttgctcctgaatccagctgtgcactttgcccaagtggtgaaggaatgccgggcagtggtcattgcggggggtaccatgcagccggtgtctgacttccggcagcagctgctggcctgtgccggggtggaagctgagcgcgtggtggagttttcctgtggtcacgtgatccctccagacaacatcctgccccttgtcatctgcagcgggatctccaaccagccgctggaattcacgttccagaaaagagagctgcctcagatgatggacgaggtgggtcgcattctctgtaacctgtgcggtgtggttcctggaggggtggtctgtttcttcccctcctacgagtacctgcgccaggtccatgcccactgggagaagggtggcctgctgggcccgtctggctgccaggaagaagatattccaggaacctaagagcgcacaccaggtggagcaggtgctgctggcatattccaggtgcatccaggcctgtggccaggagagaggccaggtgacaggggccctgctcctctctgtggttggaggaaagatgagtgaagggatcaacttctctgacaacctaggccggtgtgtggtgatggtgggcatgcccttccccaacatcaggtctgcagagctgcaggagaagatggcctacttggatcaaaccctccccagagcccccggccaggcacccccagggaaggctctggtggagaacctgtgcatgaaggccgtcaaccagtccataggcagggccatcaggcaccagaaggattttgccagcatagtgctcctggaccagcgatatgcccggccccctgtcctggccaagctgccggcctggatccgagcccgtgtggaggtcaaagctacctttggccccgccattgctgctgtgcagaagtttcaccgggagaagtcggcctcttcctgatgggcaaccacaccactgcctggcgccgtgcccttcctttgtcctgcccgctggagacagtgtttgtcgtgggcgtggtctgcggggatcctgttacaaaggtgaaacccaggaggagagtgtggagtccagagcgctgccaggacccaggcacaggcgttagctcccgtaggagaaaatgggggaatcctgaatgaacagtgggtcctggctgtccttggggcgttccagggcagctcccctcctggaatagaatctttctttccatcctgcatggctgagagccaggcttccttcctggtctccgcaggaggctgtggcagctgtggcatccactgtggcatctccgtcctgcccaccttcttaagaggcgagatggagcaggcccatctgcctctgccctttctagccaaggttatagctgccctggactgctcactctctggtctcaatttaaaatgatccatggccacagggctcctgcccaggggcttgtcaccttcccctcctccttcctgagtcactccttcagtagaagggccctgctccctatcctgtcccacagccctgcctggatttgtatccttggcttcgtgccagttcctccaagtctatggcacctccctccctctcaaccacttgagcaaactccaagacaccttctaccccaacaccagcaattatgccaagggccattaggctctcaacatgactatagagaccccgtgtcatcacggagacctttgttcctgtgggaaaatatccctcccacctgcaacagctgcccctgctgactgcgcctgtcttctccctctgaccccagagaaaggggctgtggtcagctgggatcttctgccaccatcagggacaaacgggggcaggaggaaagtcactgatgcccagatgtttgcatcctgcacagctataggtccttaaataaaagtgtgctgttggtttctgctgaaaaaaaaa

SEQ ID NO: 55932 - DNA, 466 bp, Homo sapiens
gttcctctccccttcattactgttgcctgacgacggtccttgctgatgctgtgaactaacaaagttgtctttttgttttaagggaacccaccctggcgtctggacagcaggttaggtttgggtggttttgagctagcactgctgtggggcaggggtggccgctccctggtgaagctaatgctgtggaagctggaatgttccttcctaaggagtgggatcatgcccctaccccagcagaggtatctcatcactcgctcatgtgcgagattctaaataaattttgttcttgggcatcttctactaggcctcctataaaatagatcttgctgtttttggtttgtgttaatggaacctcacttttctaggagataatttgttttagtttttttatttagggaagtttttcaaaatatacaaagcagggattgttaagggaacccgcatcacctcaaattcagttgtttag

SEQ ID NO: 55933 - DNA, 1286 bp, Homo sapiens
atcaaatatcagggtttggagtggaagtcgagcgcttcactggttttactaaatcagacccagaacctggtgattgggctcgggctcctcgccggctccctgctttgcgcatactttgtcactgagcagaagctacaggttggggactatgtgctctttggcacctacattatccagctgtacatgcccctcaattggtttggcacctactacaggatgatccagaccaacttcattgacatggagaacatgtttgacttgctgaaaaagggagacagaagtgaaggaccttcctggagcagggccccttcgctttcagaagggccgtattgagtttgagaacgtgcacttcagctatgccgatgggcgggagactctgcaggacgtgtctttcactgtgatgcctggacagacacttgccctggtgggcccatctggggcagggaagagcacaattttgcgcctgctgtttcgcttctacgacatcagctctggctgcatccgaatagatgggcaggacatttcacaggtgacccagggcctctctccggtctcacattggagttgtgccccaagacactgtcctcttttaatgacaccatcgccgacaatattccctttacgggccgtgttcacagctgggaatgatgaggtggaggctgctgctcaggctgcaggcatccatgatgccattatggctttccctgaagggtacaggacacaggtgggcgagcggggactgaagctgagcggcggggagaagcagcgcgtcgccattgcccgcaccatcctcaaggctccgggcatcattctgctggatgaggcaacgtcagcgctggatacatctaatgagagggccatccaggcttctctggccaaagtctgtgccaaccgcaccaccatcgtagtggcacacaggctctcaactgtggtcaatgctgaccagatcctcgtcatcaaggatggctgcatcgtggagaggggacgacacgaggctctgttgtcccgaggtggggtgtatgctgacatgtggcagctgcagcagggacaggaagaaacctctgaagacactaagcctcagaccatggaacggtgacaaaagtttggccacttccctctcaaagactaacccagaagggaataagatgtgtctcctttccctggcttatttcatcctggtcttggggtatggtgctagctatggtaagggaaagggacctttccgaaaaacatcttttggggaaataaaaatgtggactgtgaaaaaaaaaaaaaaaaaaaaaatt

SEQ ID NO: 55934 - DNA, 3465 bp, Homo sapiens
gtcaggagggaaggagatgcctctgggcctcgtaccacagcctcagctctctctctgcccctccatctgagtccctcctggctcccagctccctcagggtgcaaggccaagcctccaaggaatccctccccttacctgcatggctggagccaagaagagccactccatctgagggtggctgcgtgtccacatacgaggggacagggctgaggatgaggagaaccctggggacccagaagaccgtgccttgcctggaagtcctgcctgtaggcctgaaggacttgccctaacagagcctcaacaactacctggtgattcctacttcagccccttggtgtgagcagcttctcaacatgaactacagcctccacttggccttcgtgtgtctgagtctcttcactgagaggatgtgcatccaggggagtcagttcaacgtcgaggtcggcagaagtgacaagctttccctgcctggctttgagaacctcacagcaggatataacaaatttctcaggcccaattttggtggagaacccgtacagatagcgctgactctggacattgcaagtatctctagcatttcagagagtaacatggactacacagccaccatatacctccgacagcgctggatggaccagcggctggtgtttgaaggcaacaagagcttcactctggatgcccgcctcgtggagttcctctgggtgccagatacttacattgtggagtccaagaagtccttcctccatgaagtcactgtgggaaacaggctcatccgcctcttctccaatggcacggtcctgtatgccctcagaatcacgacaactgttgcatgtaacatggatctgtctaaataccccatggacacacagacatgcaagttgcagctggaaagctggggctatgatggaaatgatgtggagttcacctggctgagagggaacgactctgtgcgtggactggaacacctgcggcttgctcagtacaccatagagcggtatttcaccttagtcaccagatcgcagcaggagacaggaaattacactagattggtcttacagtttgagcttcggaggaatgttctgtatttcattttggaaacctacgttccttccactttcctggtggtgttgtcctgggtttcattttggatctctctcgattcagtccctgcaagaacctgcattggagtgacgaccgtgttatcaatgaccacactgatgatcgggtcccgcacttctcttcccaacaccaactgcttcatcaaggccatcgatgtgtacctggggatctgctttagctttgtgtttggggccttgctagaatatgcagttgctcactacagttccttacagcagatggcagccaaagatagggggacaacaaaggaagtagaagaagtcagtattactaatatcatcaacagctccatctccagctttaaacggaagatcagctttgccagcattgaaatttccagcgacaacgttgactacagtgacttgacaatgaaaaccagcgacaagttcaagtttgtcttccgagaaaagatgggcaggattgttgattatttcacaattcaaaaccccagtaatgttgatcactattccaaactactgtttcctttgatttttatgctagccaatgtattttactgggcatactacatgtatttttgagtcaatgttaaatttcttgcatgccataggtcttcaacaggaccaagataatgatgtaaatggtattttaggccaagtgtgcacccacatccaatggtgctacaagtgactgaaataatatttgagtctttctgctcaaagaatgaagctccaaccattgttctaagctgtgtagaagtcctagcattataggatcttgtaatagaaacatcagtccattcctctttcatcttaatcaaggacattcccatggagcccaagattacaaatgtactcagggctgtttattcggtggctccctggtttgcatttacctcatataaagaatgggaaggagaccattgggtaaccctcaagtgtcagaagttgtttctaaagtaactatacatgttttttactaaatctctgcagtgcttataaaatacattgttgcctatttagggagtaacattttctagtttttgtttctggttaaaatgaaatatgggcttatgtcaattcattggaagtcaatgcactaactcaataccaagatgagtttttaaataatgaatattatttaataccacaacagaattatccccaatttccaataagtcctatcattgaaaattcaaatataagtgaagaaaaaattagtagatcaacaatctaaacaaatccctcggttctaagatacaatggattccccatactggaaggactctgaggctttattcccccactatgcatatcttatcattttattattatacacacatccatcctaaactatactaaagcccttttcccatgcatggatggaaatggaagatttttttgtaacttgttctagaagtcttaatatgggctgttgccatgaaggcttgcagaattgagtccattttctagctgcctttattcacatagtgatggggtactaaaagtactgggttgactcagagagtcgctgtcattctgtcattgctgctactctaacactgagcaacactctcccagtggcagatcccctgtatcattccaagaggagcattcatccctttgctctaatgatcaggaatgatgcttattagaaaacaaactgcttgacccaggaacaagtggcttagcttaagtaaacttggctttgctcagatccctgatccttccagctggtctgctctgagtggcttatcccgcatgagcaggagcgtgctggccctgagtactgaactttctgagtaacaatgagacacgttacagaacctatgttcaggttgcgggtgagctgccctctccaaatccagccagagatgcacattcctcggccagtctcagccaacagtaccaaaagtgatttttgagtgtgccagggtaaaggcttccagttcagcctcagttattttagacaatctcgccatctttaatttcttagcttcctgttctaataaatgcacggctttacctttcctgtcagaaataaaccaaggctctaaaagatgatttcccttctgtaactccctagagccacaggttctcattccttttcccattatacttctcacaattcagtttctatgagtttgatcacctgatttttttaacaaaatatttctaacgggaatgggtgggagtgctggtgaaaagaggtgaaatgtggttgtatgagccaatcatatttgtgattttttaaaaaaagtttaaaaggaaatatctgttctgaaaccccacttaagcattgtttttatataaaaacaatgataaagatgtgaaactgtgaaataaatataccatattagctacccaccaa

SEQ ID NO: 55935 - DNA, 1404 bp, Homo sapiens
ttttttttttttttataaaacacatcacaattttattgcttgaagaatacagcatatgaaatcacaagaatgtcaaaatgaaaagtcactaggcttcaaacgtataatacattatcagatgcagtaaaatattaacctgaactctgcatcagaaaaaaaaaaaaaaggtgtggaaaatatctaagttgtttacttaagaaacagatatacttaaaatagaaagtataaggatgttacagtacaaattagaaaagccaacacgtattaacttatcgttctagactagactacctttggtacttaaactttttaaaaaacaatttcttctatctcatccaaatgcacttcatgggtatgacatccatgaagtaacttcaacttaaaacattcagcaaaattaaccttttcacttcatgggggaagtatatttaataaatgtataacaatatttcccttttactaaaactgcaaaatatgatcattaagaaacctaacagttataaaactttacttacttagctctccaattaaaattggaatcctgggagccacaatctatttttgggcttggtgaatacataagtttaaaagatttggcaactgacataggaatttaattacttaatactatcttaagtgacttttcctttctgtttccaaaatatagacattatgccatttcttcaacatcctggattcctataatcactaccatactgtatttattagaaccaaattaaagcttctctaacaagcaggtagaaactatttatgttccatatacggctgataagttataacacaacttatgtttcatatagggctgatcagttaattcatatagggctgatcagttgtaacataacttcttaagcaaaactaatcttttttttaaagctatcactcaattatggagacaataatgtcatctcaaaaggtaatgttggactctaggccatctagttgggaaaatgtaaaagtaattctaaaaacaataagtaaactataactacaagttaaattaaaaatccctctctcatagcaagcatgctcattaactttcatttctttcccccagcaaaggtttgaatattcataaacctcagttaaaccaagagaaccaatgtaattgtttcaaaagtaccacctatatatttgaataatatgagtatggatggactaggtaagtaatactatcaacaattactgaattggagtgaaagagtaaaaatcatgacagacttccaaactgggcagtctttgaaatgtcatagtggagctcaaaatgaattatgctgtaataaaactatagtttttacctctacacaaaacagaaacaaaataaaaaaacataaccaccaaatttatacaaatactattaaacatactccttcctagtttttg

SEQ ID NO: 55936 - DNA, 420 bp, Homo sapiens
  misc_feature (1)...(420): n = a,t,c or g
gcaggcgtccccagcctggctgcccatgagaatgccctgggcagctttaaaaatcctgatgcccaggctgcacccagaccaattaaactaggatcgctggggtggcgcccaggcatgggaatgttttgaacttcctgggggtttctgaagtgcacgtagcgttgagaacccctgctgtgaaggggctnnnnnnnnnnnnnnnnnnnnnnnnnnnnnnnnnnnnnnnnnnnnnnnnnnnnnnnnnnnnnnnnncgctcctggtgctctggggtggggaggggtgtcagggccgaggaccccagatgactggccatcccgccaggcatgggtgttggtgaggactcgggtgcacccatcgccactctgagcggtggggcgtctattaataattaacccggagttgagtccccccggagggca

SEQ ID NO: 55937 - DNA, 382 bp, Homo sapiens
gcttcattttcttctctttttttttaacctgcaaacatgctgataaaatttctccacatctcagcttacatttggattcagagttgttgtctacggagggtgagagcagaaactcttaagaaatcctttcttctccctaaggggatgaggggatgatcttttgtggtgtcttgatcaaactttattttcctagagttgtggaatgacaacagcccatgccattgatgctgatcagagaaaaactattcaattctgccattagagacacatccaatgctcccatcccaaaggttcaaaagttttcaaataactgtggcagctcaccaaaggtgggggaaagcatgattagtttgcaggttatggtaggagagggtgagatata

SEQ ID NO: 55938 - DNA, 391 bp, Homo sapiens
agaattcggcacgagagtgtcatgattgtaagggcatttgtcaaagggtttggtctaggtctaggtcccattgagggaagctgcaagtccggaagctgacaggaccctcaggaggtcattgctttgtgagtgagatgtgatgtggacagtggaaatggcagatgcagattctcttttggaggattaaatggactggacttgctcatgagggggatgtataggagaggaagagctataaatgtctccctggtttctgagaagataaaggtggagttatttgctaaaatggagctagttgggcaggatagaatgaggggtaagtttgagatgtctgcagggtgggcatgattacagaagttaaacacttgggagccatcagcatatggaaggt

SEQ ID NO: 55939 - DNA, 381 bp, Homo sapiens
gaaggttttagagtaacgcccacccaccatggtgacccacagctctttggagaagtatcactgggtctgtatctgggtcagaaatagtccatttaccgacattcttgccttccccagcatgtcctggaattggaagccaaaatggaccagctgcgaacaatggtggaagctgctgacagggagaaggtggagcttctcaaccagcttgaagaggagaaaaggaaggttgaggaccttcagttccgggttgaagaagaatcaattaccaaaggtgatcttgaggtaaaacccctccagctctcttacagcttttatgggtatcagtattcagaacacgggcgaaataatgcaccaattgaaatgagcggccagaacagccag

SEQ ID NO: 55940 - DNA, 338 bp, Homo sapiens
ctgaaacagacccaggagacctatcaactgagtctatcaattcaggaaaagtccttttgaattccaaagagtcatgaaaacacttgtgggcaacaccctcaaatccccacactcctgacagtgtcacagatgcatgactctagcacgagagggggaactgaaactgacttttacacttggcccccaccctgcccagtgtgtccgattctgtgggctggcaggtttctgcctgcaattattttctttgattttttaaattttgtgtatagaaagggtcttgctatgtttttcaggctggacttaaactcctgggctcaaccaatcctctcaccttggcc

SEQ ID NO: 55941 - DNA, 434 bp, Homo sapiens
  misc_feature (1)...(434): n = a,t,c or g
ggccggagtactccacacgggacagttttaggaaagtgctggaatccaaagtttctccggaggggctatgcaaggcgctttggaaaggcgaagcctgggcgcagggatgcccagccatgtaggtagaagcagcagacggtgagggaggccatccccacctggccctgccagggccctgactcagtgaaggaagctgttgggatacaggtcattcagccgggcaggaaagatgggatgaagcccagcaagtttcacagggatccgggaagttgtgtggctggaaacccaggcagggctgcaccacagggaccatttgctggagatgcagcacttgccacagccaccaccactgacagcatgacacccacaaaaagggagcctccagctgcacccctgctgntgcgagtacttcctcactgcttccatgagcttaa

SEQ ID NO: 55942 - DNA, 171 bp, Homo sapiens
  misc_feature (1)...(171): n = a,t,c or g
ctggtgcctctttgaaggtgaagaatgggaggagggagaggagtagaaaaaaactggttatctggtttagtaccttggtgacaaaataatctgtacaacaaacctctgtgatatgagtttacctgtgtaacaaaccctcactgtcaacccaacacanaaaaaaaaaaaaaa

SEQ ID NO: 55943 - DNA, 432 bp, Homo sapiens
agagcatgttgtctgtggcagcacaccgtaataatgagtcagagagcactttggatttagaaggcttccaaaatcccacagctaaagagtgtgagggacttgccactttagataacaaggctgatcttgatggagaaagtacagaaggtactgaggaactagaagactctctaaaccactttacccactcagtacagggccagacatcagaaatgattccctctgatgaagaggaggaggacgacgaagaagaggaggaggaagaagaacctaggctcaccattaaccaaagggaagatgaagatggcatggctaatgaagatgagttagacaacacctacactgggtcaggggatgaggacgccctatctgaagaggatgatgagttaggcgaagctgctaagtatgaagacgtgaaagaatgtggaaaac

SEQ ID NO: 55944 - DNA, 354 bp, Homo sapiens
gggagggaagcaaaaagatcactgggaaataagaacaaaggagacggagaatcaagggtaaagaaggaacccaccaaaagacctaggctgaagccctctttctttcacttattcatgtacacaatcactcaatattattgagcatgaactctgagccaggtactgttctaaatcctcgagagatggcagggaccaaaacacagtcctgctttcatgaagcttagattctagtaggaagaaacaaactataaatagacaaatcacacagctagtgaatgtaagtaaataggtgactggctgtgttgccatatacttctcatttaatccgcttgcattttggtttacaaagaaaca

SEQ ID NO: 55945 - DNA, 485 bp, Homo sapiens
  misc_feature (1)...(485): n = a,t,c or g
tttttaaaagtcattgctcatttaatcttggaggccacttggaggagcatggcgtctttgtctcgccctgggtgagcacaccgaggcccagagtttgatgattccttcaaggtctcaaagcttgccttcttcacagcgcttggtgatgcacgtggttgtttctcagtatggtttgccaaagggatgctctgattcaggaggctgaggtggggcctgggaatnttcatttctaaccttttcccaggngatgctgaggccactggnccaggggcacctttggccctaagccgctaattaacaacatgagtcactttcatctggtccaggcttgtcgccccctcgatggaacacagagctccctctttccctcttggcctcatcaccagcccccagaacaggacccagcactagcagcactgaatcgtgtttgttggtgaactgatgcgtcgtgatgctggggttagacaaggacggccccgggatac

SEQ ID NO: 55946 - DNA, 312 bp, Homo sapiens; identical to SEQ ID NO: 39953

SEQ ID NO: 55947 - DNA, 525 bp, Homo sapiens
caggcatgagccactgcacccggccaggttttgtttctttaaggattagcacaaatggcaccgttgggtttttcttcatacaatttccaaaataaattctgtactcaggttgttatatgattttctgagctgaataagttcaggagcagattattaagatctgccattctgaaacgctggtctttttctccttcctatagagcaccataaaattctgcttgatcatattatattacatacattttgggggagtggagggacatgagttaagtagcccttcatgtatttataatctcttttctactgaatcaaatgacttagccatgaccctgaatggaccttgttttacttcaagttgagatgtctgccttttatgaatttgtatatgtgaatagagtttgggggttgccaaaaattgcatacattgtatgtaagtaaaattttttatgaagtagtctgtcaaattgtatcataaagtttatttttcttttatacgtaaatcattaaaaataatcacgataaaaa

SEQ ID NO: 55948 - DNA, 1450 bp, Homo sapiens
  misc_feature (1)...(1450): n = a,t,c or g
cggcggcccctccgcgggacttcctttccgaggtactggtgccggcccaagacccgggcagcgctttgtcgtgtccgcccctcagtgatcagctccgggtccccctgctcgnccccgcgcgccccaagcnagttccccggaagtgcgcgccggggccccagcaaagaagagaagaaggagagtggccacgttgattcagccaagcacctccaggaggtcccctctggatgtcccatgaggctgcccctcagccacagcccagagcacgtggagatggctttnctcagcaacatcctagcggcctattcctttgtctcagaaaatcctgagcgagcagctctgtactttgtttctggcgtgtgcatcgggctggtgctgaccctggctgctttggtgataaggatctcttgccacacagactgcaggcggcgtcccgggaagaagttcctgcaggacagagagagcagcagcgacacagcgacacatgtgatggcagtgaggacaccgtgtccgatctctccgtgcggagacaccgccgcttcgagaggactttgaacaagaatgtgttcacctctgcggaggagctggagcgcgcccagcggctggaggagcgcgagcanntcatcagggagatctggatgaatggccagcctgaggtgcccgggaccaggagcctgaatcgctactattagggagcagcaggaccccggaaaccactggaggccgcctggaaaggagagcgtctgcagggacagtgggcacaaggaactgaacccagctctgctaatattgtgatttcagagaaaaagcaggacatgccccttttctagccaggaggattgctcctttttggccaaatgtatggagaagtagaaaaatcaaagcagttcatcaccctttccaggtctcggaatggtgctgaaaaatcctctccaacactgtggatggagatcggagaaacgcgactgtggtttctcttgatttctgaggatctcagaagtttcagcagacttccttgctctgtgttattcctttgcaaaaggaaagatcattatagcatgagggctgggaatagcagggtgaacttaacccaataaatgcaatttcctaaatgacttcatgctatggaggtgattctgattcaaatagcatgatccatgcttattatttaaggctgatttttaaaatcttgtgttgcaagggcaacctcgtccattttaactggcacctcagggattaaaatcctactttttagtgtagttcccacctcattcatgaaaatgaatagaactattgtattatgggagatgtgtcagtgaactagaaaatgtcaataacctcaaaggatgaagggtttttattttaaatagtttataaaatatatattgacatgcatatttgaaaatgctgcataaaaataaaagtggtgtgttttcccccaaaaaaaaaa

SEQ ID NO: 55949 - DNA, 1157 bp, Homo sapiens
  misc_feature (1)...(1157): n = a,t,c or g
aaccgctacgccacagtccccgggagaattcagatcccaaccggggcttccggattctgtagtggctttggcctgtgtctggtctgaggaccgcccggaaggcattgcactgaggctaagggaaaggtctctggagggagcctcaggaagagcaaatggaggccagagactggcaggagcgcgccagacggatttaatcccgacgagcggattcagagccgtgcttatataaagcttcaggaagcgccgttccgacgatgaggtcgacacgcgagaggcgacctcaagagcggcggcgccagggatctgtgcgccaagggaggacgggagggagcaggttcgccataattcctggctccaggctctgttttgttggaccgagccactgtattttagctcacacaggagaattctggccctgggaaaattggtctcagcatgctgccaagctttctcatggacgtcagcgaatcccaacacactgtcggtcaaagccgtgctggaagaaacaaaacagttctccctcggtagaactgagaggggattggtccagggcccccgccgataccaaaatccaggtnnnnnnnnnnnnnnnnnnnnnnnnnnnnnnnnnnnnnnnnnnnnnnnnnnnnnnnnnnnnnnnnnnnnnnnnnnnnnnnnnnnnnnnncgtaacacctaatccagtgtaatnctatgttagtaatggtaatccggttttaattttccnacctttggtggnctttttttaaaaagaatcatttgtttatatttcggtcttgggaacccgcgtatatggagggcctgctacatagagaagactgagggatattctgtgcatcccgtttcctacggatcctctaaatcggcctttgttttcagccaggatttagtgccccagctgtgtcctttggaggccccacatggagcctagcaaagtttgctaaatcgggttttgcaagaggactgtctgctcccatactgggagtagttaccgcaaactgccctatgaaattggttggggttcttactgttagcatgtttattactttatcagggctctctgtaggagagtctatgagaaaatcttctggtttctgctgaaagaatcgtgttttgttggggtttttttcccgaaaaatattatttttaaaaaaaa

SEQ ID NO: 55950 - DNA, 772 bp, Homo sapiens
tttgttttttttccttaaagaaagcactttattttccatttaaacaacttggtcacaggacgttattttacataaatggaagtaatttgtaaaatttccatgtaaaaggccttgtgtctgagtctgaggtgataagaggatatgaatacaagtatataaaaacagtgcaaaatgtgcagcccacagcctccggagttggcttcagaaatcccccttaatgttgctagaccagttacattaaatattaaatgtaacaccaggtaaatattcctggggtttcctttagtctaacatccaacccagatatgcaataaaatgaaaaactcaaaatccctaacaactcaaaccatccaatcacccagaccattaggatcacaatgagttgagactgcaggctctatactgtgacatctcgtcagtggctccatcttaagaaatacagaattttagttgcatcagtaactagaatagactagctctgcttttaaagctttgccttttaaatgtagatttctagaagttcactttcaaggtgccatcaagaaggctaggccactaagaagtcacaagcccaacctagacatcgcagcctcttaagacatttgtcttcactaaccgttcagtctttaacctgctgctgatcctacaatgaaaacacttagtgccagctgaagcgtggatgcttgtctatcagcaacataattaagtgtagctgattctgcaagaaatttatattagtcacagcagacatccacaggaacatactgaatcg

SEQ ID NO: 55951 - DNA, 342 bp, Homo sapiens; identical to SEQ ID NO: 44060

SEQ ID NO: 55952 - DNA, 1252 bp, Homo sapiens
tttttagcatttataaaaactggcagatttattctgcaggggcccattttcaagaagctaaaggtgaaggtgggaggggagaagtttcctccccttttcctttctccctcatcttatttcctccaaggggtaaaaaaaatggcctggaccccaaaacctacccaaataaaaaatcaaaaaactgaggttccaaaaagttacagcatcttatttcctcatagaaaaggggaaggagccagagggaaggggagtccctggggtggggggatgtctcacccccagcccggtgagacatcccctccccttaaatagctgccccaaatggggcaagcccagggctatagcatttaaaaactcccacatcccattttatcaaaaccaaagagaaaaaaaaatttcccttttcccccaaaacccaaatatatatatatttttttttcttaaaaaaaccaaaactttgaaggcattaagcgttaaagtgaatctagaacaagggaatgtgaaattccctccttccttcccccttcctgtggggttcattggtgcatccccagcagagggaccggccccaaggggatggcagaggggaaggaccaaagggagaaaagggcgggggcctccccagccaatcagcagccagtgtgggtgtgagcagggaagccacacccccttggagttttccaagtgggatggggagtgggaacgatgcattcctgtgtagtcttcagccaattccaagtcaagtagaggcagggaaagcagggtgacaggccgggtgtgcggaaaggagaagcgggtcttctgggtccctgtggtcagggagaaccccgcttcctcagctcctggacgaaggcttcaatgatttcctctttcactttctgcaattccttcttcacctcttccagaagctcctgtttcaccctctgtaggtccgagtaatcactggagctgggcgtgcagggttgggtctcggaagtggtcaccgaagaagacgacttcatccttggcaaggttgtgctgttcttctcccagggtctccgcacagattcactctgggccgggactctggcctctggctcctcctgattggcagattcatccttgggggttttctccccaacttgcgtggctttccttctccgggccagcatggcgttcatctcttccatgagtcccccacctccgcttcgaccactctcagctttgggggctgtgggcccccctgaggcctcctcctgcttgctgactttcc

SEQ ID NO: 55953 - DNA, 330 bp, Homo sapiens; identical to SEQ ID NO: 40657

SEQ ID NO: 55954 - DNA, 394 bp, Homo sapiens
  misc_feature (1)...(394): n = a,t,c or g
ctcggggtcagtctggagccagggcgacttcatctaaatcctgcctaaggatctggcacacctctggcttctctgcacctcagttccctctttcacaaacagggatctcaattcctagctcaccaagggctgctgggaggaaggagggccccgtgcagggctggggtgtgcaggtgaggctggagtcacccagctcacggagccaccgcatgggtccaggaattctgtgaggatggtgggagtgtggctgctgctgctcccctcatccctgaacatggaggggagcgcatttccttttccataaaggcttgtctttggttgtcaggaaaccttgaggatgttgctggatgagctgtaactacattctgctctgaactgantaantgtaaaacat

SEQ ID NO: 55955 - DNA, 184 bp, Homo sapiens
  misc_feature (1)...(184): n = a,t,c or g
caaggcatgagccactgtgcctgcccgagaaatgaccctttaaaaaaaatttttttttggtcttttttttttgaattttggtttttttgggacaaagtcttactctgttgcctaatctggagtacaggggngcaagtcncgggttaatttancttccccttttnggaannaagggaccctcccc

SEQ ID NO: 55956 - DNA, 271 bp, Homo sapiens
cactcccctcccaccagctggatgcccatttctgagctcagtcactgaagtgagagtgtgctcccccaagggaggcttctctccatcaggatggtactttgggggaacaaaatagtcagggatattggttcccctttgaggaggtgctgctgtttgcttttaggtatgagtgctcaggggccctcactgaaagagcccatgcctgccttcctcctttcatcgcctctctagagcccccaaagtcaggcagcagctggagtagttacattgt

SEQ ID NO: 55957 - DNA, 297 bp, Homo sapiens
  misc_feature (1)...(297): n = a,t,c or g
ggcatggatcccgcttacagccctgtccatgatctggactctgtgcaaagagggcaccccagtttcccagggtgattttgtgagtttctgagaactgtggatcaggcagcacgaacgtcactgtgaccgattttgctgcacatctggaaacttaggctcatgctgccaacctggccgtttcttcacatttctcttccttacatctcccctgagacgtgcggttcanaatgggttcatggcttggtgcttctttantnnaagaanatngnngcanggaangctttgnnaggacntatg

SEQ ID NO: 55958 - DNA, 873 bp, Homo sapiens
  misc_feature (1)...(873): n = a,t,c or g
tcaatttcagcaacatacttctcaatttcttcaggatttaaaatcttgagggattgatctcgcctcatgacagcaagttcaatgtttttgccacctgactgaaccacttccaggagtgccttgatcacnnnnnnnnnnnnnnnnnnnnnnnnnnnnnnnnnnnnnnnnctaaaaaagaactttatttattgagggcaaggggatgcaaacaatacaaaaatcaaaagcttatctggtatttaacttttctttctctgcttgtcaaatgagagttagattttatttttacatttgctaagtgtcctgatctgctcatgaaatccttctatgggggaagctgtggggcagattccttaagcgaccctttgggacaactcttatcagggaggagcgaactgctcatttctgcctacttctttcccttctgcttcatgtgtactacaaaatagtcattgcatgcaatggtgaggcccgcaattagggaaaagaagctctggaaagcccactttgccatctctacactggtccaggtccttcattattttgtcccacagccagagggtctttttgattttccaaaaatccagggaactccttttccatgagtactctcaggtcctcctttgttaagtagcctttatccccagcgaatttgtgaaatgtaaacatcatggtttccatggcgtgttccatttgagatggcattttggtgtggtccgttgaagccttggccgaggcgcggcggacgctgggcgagctgggcgagctgggcgagctggacgcggggcggagaggcgagcgcggcgggctgtgcgccttccttagtacgtgcggcgggtgggtagagggaggcggtgcgggagcgggaggagc

SEQ ID NO: 55959 - DNA, 330 bp, Homo sapiens; identical to SEQ ID NO: 42266

SEQ ID NO: 55960 - DNA, 319 bp, Homo sapiens
ctccctgttacaactaccttcaacccaactcagtgattacaacaccatggaaatgtaccaggaaacttagagaaataaactttctgctaggaaaagaaatctcttgctcaaagccctacatgtcctcagatgggaacgtctgagattccagtctagataatgtgttcagcagtaatcagaaaagggcaactgtcctccctcttgcaacatacattatttaggcttctttcttgaggcctaacactagtctcctttttggtcctctgtttagtgatgttcagaatgtggtccctaaaccagtagcaccactatcaattgg

SEQ ID NO: 55961 - DNA, 1124 bp, Homo sapiens
gcgtcgactttttttttttcctcttttttagtgtcaaatctcttttattacagaggggttgtggtaaaagatcctgggcatccactggttatctcggagtggcaggggcactcagtccctccgcaggttcttaagccgttcctccaggtctgcatcagcatcagctagggctgaggctgcggcctctgcttttttcccaccagcagccacactaagcgagcccccagttgaggggaggttcgacagctcatctgttaggctaagtcccagctcatccagaacctgggacaccacagcatcactctcctcttcatcttcctcatcacccatggcatcatcaatggcatcattcatcatctcctccttcatatccatgatctctgcctgccgctcaaactccatcatgatcttctggatctggggcaacttcagctgtctgttcatggtgcccatggccttggtgacacccttcatggcttgtgccatcgagttgttggacttgagtgtctggatcttgagggacacagcctggatgttggcccgcatcaatacaaacttgcgcacatagcgccgggtgcgcaccaagtcttttgccatgatgcgaacagcatccatctggccttgcttggccatcttcttaatgtctgcaatgattttcttctcctgggtctctagtttctgtcgctcgcggtccagctcccgcatggcacggttcagggccctctggttctgccgcagtagctcctctggcgtcttccggcgcccgaacaataggtccatgatggtagaagctcactggcaggccaagaacaggtgaatgtggggctgtgaagctcaggacaaggcattaggatttggggaccctgaatgctgagggagacggttgggggcgctggggcatcctgtacactgaggacgggatgatggagattcggtcgcactatacaccgaggacagtcagtgggcccggcaccaaagcaaggtggtgttggagacctcgatgttgacgacagggtcccagggagaagcgaggcaccggacacccgggcgagtagaaggcctcggtacctgccgcccgcacgcccgcccggatccacggtccagcaggggccactcaccgggcc

SEQ ID NO: 55962 - DNA, 410 bp, Homo sapiens
aaagtacaggtgaacaggtaaccagattggtatctctgcaggtgccctgaggctgggaaacagcactggtggggtggagaggcagcctgcaactcggtgtccctcttgcctgaagcagccaacaggttaacccaggtctgttcctgcaggactgacatgcgctggttccagccgatgaaagcagatgcaaatcagtgcaatttcctctgcagcaataattaacccacgggaaccttgctggagcaggtagtttcaggagaatggcgctgaagatgttggagagagattagcatttttcagctctcatcgcagtgatttgcgctgcattttagtgtgtattcagttccaactcattaccataaaaaaaaaccctcatacattaaattgctaggcagggggaatcgactttt

SEQ ID NO: 55963 - DNA, 462 bp, Homo sapiens; identical to SEQ ID NO: 25963

SEQ ID NO: 55964 - DNA, 299 bp, Homo sapiens
catggcccaccagaggccagtcaagatctggcagagtgctgtcgcgccatttggtgggaaagatattaaagtgtacatgccaaagctacatgaaacagttgatgccactagtgaaactcacatctaccaggtgaggttaaaagactcacttgtcagctctcttcagttttgtaaggcaaaagatgctgaattagcttggatagatggtgtcttagatatgagagtttccaaagtggacacaggggttattttagaagaaggagaactaaaggatgatggagaagactcagagatgcaag

SEQ ID NO: 55965 - DNA, 393 bp, Homo sapiens
ctctttcttgacctttgtaaaaggatgatagaaacagcacaagtggatgagagagcaaaaggcaatggctctagtcagccgggaactgcaaggcgaggtgtacagattattgatgatgaacctcaagcccagaccagtggtggagggtgctgttcttctggataactgttcacgcctaagaaattaaaagacagaacaaaactgtggatcattgccctcaacatgaagactgccatattccaagtcacattattttaccaatggaattatagaattaacagtattttcaattacggtttataacactgcaggagaccttaagtgctaaacttagtggagtttgtgaccagagaattggcattttctacaaatggttttttttgtttttttttt

SEQ ID NO: 55966 - DNA, 394 bp, Homo sapiens
gccttccttccctcgggccaggctgctgccctgccactcccttctaggtattccactcctcactactgacatcgccagaaaacagacaagaagaaaggtgagttactccatttaagtgattttgataatcacctccaattaaatgtttacaaaaagaaagacagaggtaatggcacagatgaaacacagaaaccctttctatgtacggggcctgcagggtccaactgcaatccccagggattaccagtgcgccagtgcgccactcaaaaggtcaggtttaaatataaccatttcaaattcttggacttcctgcccacactaagaaaaccactgtctagtagtactaaatgtgacttgagtcgacagcttcccactccaaaagaccccaaatcat

SEQ ID NO: 55967 - DNA, 867 bp, Homo sapiens
tttttttttttagcatgctctactggatatttaatatacatttttgtattcattataaagtactcttacttcaatagtaaaacagacgttactttgtttttaatcaggaaatacaagtaccagtctctaatttatattatatttagatggtctgattcacacaaatcctgaagtgacaggtcaccagatgcctggcacctcttaacagtaaaagtgacatcagaaacgtatagtaatgttcttaccaaaattaataaatgcttagatataagaacgactacttaaaacttctaagtcacaaaacaccatgctaaaggtttttatcaacctcttctttacagaacataactacttctcttatgtgggggtagacttgtgaataggccaaaatttcataggaaggtgggacatggaccttccccctccttattaaaagtcattttgtcaggacttatggtggctatatggtgtttcaaatgctaacaggaaacaaatgagtcaacttatgcacatgaaaagcaaactgtgaataaagaataaggaaggggaggaaacagttcaataagttcagatacgacttgatgatactgtcacaggctgtcacaggcctcagtatcttctttatgtcctaaagaaattgagccaccaacaggaaaaaaggtcacctcacagagaatgctgtgagatttttaagttgctagactcctttccatcttctccttctcctcagctcttgatactgctgtcaaattctacacaattcaacatccatcttcacataacaattagtgtgacccaaattcatccaagatgttaaaagggaagacaatctactaggattagccataactgtccatagttgcaatc

SEQ ID NO: 55968 - DNA, 191 bp, Homo sapiens
gaagtggcattttctgcattgtattcttagaaacttagactgttagagttggaagtgctctgataaaaccgttctttaacatacgagaaaacagaggcccaaataccttaagtcccttgtccaagagtatgctgagtgcagaaagccacactgtggctcaggtcctgggccctggccctcagcgtttctca

SEQ ID NO: 55969 - DNA, 365 bp, Homo sapiens
  misc_feature (1)...(365): n = a,t,c or g
ggatattgcttggtaatagtgcaatttctatccttttccctcccccctcaacttttaagttcttttctttataattttgctgccccctccctgatggtttgggtttttgtttttgtttttgtttttttttttnatgganctactatgccatcctccntntgngaggcaaagngactgncagngttttgtnatgccatgccttganctgngggtgtttggcaacaataagggggttgaataaatnggctgagcacacttccacccacctagngttctnaaaggggttatgngattgtttaaacctggagngggtngnacccttaangctttcctntgcaactaaaccgccacatatatgtncattg

SEQ ID NO: 55970 - DNA, 325 bp, Homo sapiens; identical to SEQ ID NO: 42795

SEQ ID NO: 55971 - DNA, 446 bp, Homo sapiens
tttttagagaaaagagggaaaaaaccaaggaggcttggtaaaaacagggtcagggtcacatccagcccattcgagaaaaacttccaagtccacgtgttttccattttttttggtgtcaagacctatttacattcttagaaagtatggagaaccctaaagagctttgattatgggggttatatccattgatactgaccatacttgaaaattttaaaaatatttacttattcattaaattagcaataggttcacttcatgttaagtaatattttatgaaaataaccttattttcaaaaagaaaccagcgagaaaatggccatgttgtacatttttgcatgtatcttcaatactcaacagaagacaggcggatctgccgacatgcttctgtgttcaacttgctgtgatatgctattctggttcaagtatatgtaaagaaacaccccagg

SEQ ID NO: 55972 - DNA, 391 bp, Homo sapiens
ctggtggagttccactacagcctcttcctacagaccctgctgagcagctcaggggcgccggcatcagggcagttgccatctgcctccatgcgattaaaattcctacggctgcatggcggcatggagcaggaggaaagaacagcagtgtttcaggaattttcacattccagaagaggcgtccttctttgcacggatgttgcagctcggggcttagatctccctcaagtcacgtggattgttcagaatacatccaccggattggaagaaccgcccggattggctgccatgggagcagcctgctcattttggctccttcggaggcagaatatgtcaactcgttggcttctcacaaaatcaacgtttctgagattaagatggaagatattttgtg

SEQ ID NO: 55973 - DNA, 346 bp, Homo sapiens
  misc_feature (1)...(346): n = a,t,c or g
gataattggagcagtgatggaggtggggcaggtaaatgcaagagtggcagaaattaatctgcagtcagaaattaatctgaccccagactaatgctggggcaggagagagagatatatgagagtgccagaatatggtagatatggtagatgccagggcagggtgaaggcatccaggtgggagctgaaatccagccaggatactgctagacaagctgtttttcttattactccagccacagaaagtacctttgacaatccctccatctcttttctagctggatggcccagagtggggaccttttagcaccagcggggacgccttttcctaatttgcncaatantgccc

SEQ ID NO: 55974 - DNA, 554 bp, Homo sapiens
cgcagtgcgggcccggggcctcctggacaggagctttgccaacatggctgaacccttcaaggtgtggacggagaatgcagacgggtcaggcgctgtgaacttcctgacaggcatggggggcttcctgcaggcggtggtcttcgggtgcacggggttcagggtcacccgagcgggtgtgacctttgaccctgtgtgtctgtcggggatctccagagtgagcgtctccggcatcttctaccaggggaacaagctcaacttctctttttccgaggactccgtgaccgtggaggtcacagctcgagcagggccctgggctcctcacctggaggctgagctgtggccatcccagtcccggctctccctgttgccaggacacaaggtctcctttccccgctcggctggccggatacaaatgtcacccccgaagctgcctggaagttccagctccgagttccctgggaggactttttcagatgttagggacccgctccagagccccctctgggtcaccctgggttcctccagccccaccgagtcactcactgtggaccctg

SEQ ID NO: 55975 - DNA, 362 bp, Homo sapiens
aaatgctaattttaattatgaaatgtaaacaatttaaatttaattttcaaaagaattcatatccaattatgtctattatgtttctttcatctatcagtctttattctcaacatgggaattctctaacagctatccaaattaaagaagcactagagacaatgtacagaaaataggcagagcagccaggcctcccctgcctccctcacaaaaaaaaattttgaattatctggttgagccaccataactcatcagcatagatacactattggagaacaatcattcctgttccaaccagtgagcacacaatatctgtgataataattatagacataatgtaatatatcacatcacaaattcctgaa

SEQ ID NO: 55976 - DNA, 362 bp, Homo sapiens
aagtacattaaggaatgtttactttgtatattataaaaagtcaatatgaagttcaaaactttgtaactgaattttgaggttttgccttatacctgtatagagagtgtaaaacttcaactaaccagaatctatctggtctgagtactaatactttgtctttatttctgtgtgcacatttcctctattacgaattcctcctggtattaagctgaaacctgcttctttggcctcctactattggaaggtgtgtcttttctagtctcaacttcccctgctttctcacgttgcatcttcagcagaccccagttgtcctgactggtctctggtttggcttgaccttaaagtcaaaagccaggattgtt

SEQ ID NO: 55977 - DNA, 349 bp, Homo sapiens
gcccgaccccccagagtagcagggagggtcccaggagtaaatctcaggcgtggagcctggcgctttgtaaataatcaattgtgttgttgttttttgttgttttgtttttgaggcagtctcactctgtcgcccaggctggagtgcagtggtgcgatctcggctcgctgcaacctccaccccccgagttcaagagattctcctgcttcagcctcccgagtagctgggattacaggtgcccgcaccacgcccagctaatttttttttttttattttggatttttagtagagacagtgtctcgccatgctggccaggctggctcgaactcctgacctcgtgatctgccacctt

SEQ ID NO: 55978 - DNA, 359 bp, Homo sapiens
aaccataatgcccaccaacaagatgaataaattatgatatatttacataatgaaatattcagcagtcaaaattaatgaactacatcaatatacagtactatgggtgactcccattaataaaagtgaaaaaagttacatcctaaaaggttacaaatagcataccatttttgtaatttgttttaaacataaaatttttcaggactataagtacaaaaagaggatgaacatgggatttcaaatgatggttatttggggtggatgaaaatgcataaatttcattgcagaaatattaatttatttgattactaatatatgtattatgtattaatggatttttattagacacccactgagcatgt

SEQ ID NO: 55979 - DNA, 389 bp, Homo sapiens
ttttattggtattttagaaactcaggtgcttaaaaaatatgtcaacacaaaccagatcctcaaatagcaagtttcaaattttacttgagctgttaaagactggatactttaagtactgcttttatggcagtttataatataggaacaaatttgtacttggggattggtaaagattgtgagtaaatgacattttttggtttgtgaacatggcgttttatagaataatatgaattttattaagctattctttagaaattcagttctaaggaaagagttgatccttatgagggagattctgatcatattaaaaatctgggtaaactaaaacctgctcataacctcatagtatgcaaccaaagaatactaattcattttatcactttcattgg

SEQ ID NO: 55980 - DNA, 321 bp, Homo sapiens
  misc_feature (1)...(321): n = a,t,c or g
aaaaaaaattgttctgtacttgtattactattcaaaaaatataattgtttgagaaaagacctaaagaaggcagaatgaaaacagagtagagttgggggtatttctttggttttatttatgtatacctccttcccagtcttgtttcagttaggaaataaatggtgaatacaatgtagggtaaggcctgcattacataagtctcaaatatgtttagactacattttatgactaaaggaaaattagactttttttttttccattgganatnaggtctttntatgttgtncaggctggtctnaaactccnggcctnatgcagtct

SEQ ID NO: 55981 - DNA, 3756 bp, Homo sapiens
ggcggctgcggcacgggaaaggctcagtgactgaagctccaaaggccagcaggctggtggggacgtgaccgaagcgaggctctggttccctttcggtgggcgccatttgagcctcatctctggcttccccaggatgcgccggcagccggggagcggctccgggcgcgaggtctgaggatgatctttcctgtcgcccgctacgcgctccggtggctgcgacggcccgaagaccgtgccttttcccgcgccgccatggagatggccctccgaggcgtgcggaaagtcctctgtgtggccgaaaaaaacgacgcggccaaggggatcgccgacctgctgtcaaacggtcgcatgaggcggagagaaggactttcaaaattcaacaagatctatgaatttgattatcatctgtatggccagaatgttaccatggtaatgacttcagtttctggacatttactggctcatgatttccagatgcagtttcgaaaatggcagagctgcaaccctcttgtcctctttgaagcagaaattgaaaagtactgcccagagaattttgtagacatcaagaaaactttggaacgagagactcgccagtgccaggctctggtgatctggactgactgtgatagagaaggcgaaaacatcgggtttgagattatccacgtgtgtaaggctgtaaagcccaatctgcaggtgttgcgagcccgattctctgagatcacaccccatgccgtcaggacagcttgtgaaaacctgaccgagcctgatcagagggtgagcgatgctgtggatgtgaggcaggagctggacctgaggattggagctgcctttactaggttccagaccctgcggcttcagaggatttttcctgaggtgctggcagagcagctcatcagttacggcagctgccagttccccacactgggctttgtggtggagcggttcaaagccattcaggcttttgtaccagaaatcttccacagaattaaagtaactcatgaccacaaagatggtatcgtagaattcaactggaaaaggcatcgactctttaaccacacggcttgcctagttctctatcagttgtgtgtggaggatcccatggcaactgtggtagaggtcagatctaagcccaagagcaagtggcggcctcaagccttggacactgtggagcttgagaagctggcttctcgaaagttgagaataaatgctaaagaaaccatgaggattgctgagaagctctacactcaagggtacatcagctatccccgaacagaaacaaacatttttcccagagacttaaacctgacggtgttggtggaacagcagacccccgatccacgctggggggcctttgcccagagcattctagagcggggtggtcccaccccacgcaatgggaacaagtctgaccaagctcaccctcccattcaccccaccaaatacaccaacaacttacagggagatgaacagcgactgtacgagtttattgttcgccatttcctggcttgctgctcccaggatgctcaggggcaggagaccacagtggagatcgacatcgctcaggaacgctttgtggcccatggcctcatgattctggcccgaaactatctggatgtgtatccatatgatcactggagtgacaagatcctccctgtctatgagcaaggatcccactttcagcccagcaccgtggagatggtggacggggagaccagcccacccaagctgctcaccgaggccgacctcattgccctcatggagaagcatggcattggtacggatgccactcatgcggagcacatcgagaccatcaaagcccggatgtacgtgggcctcaccccagacaagcggttcctccctgggcacctgggcatgggacttgtggaaggttatgattccatgggctatgaaatgtctaagcctgacctccgggctgaactggaagctgatctgaagctgatctgtgatggcaaaaaggacaaatttgtggttctaaggcagcaagtgcagaaatacaagcaggttttcattgaagcggtggctaaagcaaagaaattggacgaggccttggcccagtactttgggaatgggacagagttggcccagcaagaagatatctacccagccatgccagagcccatcaggaagtgcccacagtgcaacaaggacatggtccttaagaccaagaagaatggcgggttctacctcagctgcatgggtttcccagagtgtcgctcagctgtgtggcttcctgactcggtgctggaggccagcagggacagcagtgtgtgtccagtttgtcagccacaccctgtgtacaggttaaagttaaagtttaagcgcggtagccttcccccgaccatgcctctggagtttgtttgctgcatcggcggatgcgacgacaccctgagggagatcctggacctgagattttcagggggcccccccagggctagccagccctctggccgcctgcaggctaaccagtccctgaacaggatggacaacagccagcacccccagcctgctgacagcagacagactgggtcctcaaaggctctggcccagaccctcccaccacccacggctgctggtgaaagcaattctgtgacctgcaactgtggccaggaggctgtgctgctcactgtccgtaaggagggccccaaccggggccggcagttctttaagtgcaacggaggtagctgcaacttcttcctgtgggcagacagccccaatccgggagcaggagggcctcctgccttggcatatagacccctgggcgcctccctgggatgcccaccaggcccagggatccacctaggtgggtttggcaaccctggtgatggcagtggtagtggcacatcctgcctttgcagccagccctccgtcacacggactgtgcagaaggatggacccaacaaggggcgccagttccacacatgtgccaagccgagagagcagcagtgtggctttttccagtgggtcgatgagaacaccgctccagggacttctggagccccgtcctggacaggagacagaggaagaaccctggagtcggaagccagaagcaaaaggccccgggccagttcctcagacatggggtccacagcaaagaaaccccggaaatgcagcctttgccaccagcctggacacacccgtcccttttgtcctcagaacagatgagctcagggtagggtagagaacgccactttctcagacctgtcccctttgtgtttagaaatgagttaaccaggaccaagtggccatttagtgtcctggaaacttagaggacagtgttggcctttggagtcgggccttcttgtgttaaggggcacaaggtccagatcactctggagcaggccagctctgctggacagtgaccctcttcccaggcctcaggagtgaccatagccactgctgaaaagtcacgcagctgctccctcggaccccccaaggatggttgctgttagcagaggattggtgcagtcccagctgaagcccactgtgtgccaaaggaagaagctcccagggctgcttccttcacctgcagaaagccccaagtgagccaccagcactcatggggtagtccctgtccaggctgcccagggcttctcatagacgtcctgagaaggacggtggtaatgcaaggaaatggctgtggtaacactgatccttcagaagaagcttcattccctcttaatctagttaagccaggacatccagaattcattgctttaataaagaacccaggccggg

SEQ ID NO: 55982 - DNA, 78 bp, Homo sapiens
gttaatctcatttttaaaacagaaaacctcaggctcagaggctttgattgggcaatagtgtctggccagatttaatac

SEQ ID NO: 55983 - DNA, 438 bp, Homo sapiens
  misc_feature (1)...(438): n = a,t,c or g
aagcgatcgtactgcctcggcgtcccgagaagctgggggcacaggtggacacaccttagttttaaaaaagcatacaatgcgtttgtgcaaagtacaaatttattttcagaataggttgtattttatgaataaactagtatgtacaccttaaaataatcagctttcatcagttaaggcacttttctataaaaaaaattgtcagtaaggctgctttattcacnnnnnnnnnnnnnnnnnnnnnnnnnnnnnnnnnnnnnnnnnnnnnnnnnnnnnnnnnnnnnnnnnnnnnnnnnnnnnnnnnnnnnnnnnnnnnnnnnnnnnnnnnnnnnnnnnnnnnnnnnnnnnnnnnnnnnnnnnnnnnnnnnnnnnncccccatgcccggctanttttgtacttttagaaanacggggttctccnngttgggcangttggctcaa

SEQ ID NO: 55984 - DNA, 355 bp, Homo sapiens
gaaagtcaagaaagaataatgaattaagtaatctttccccctccaggaagctctttatttaatttcgctcccatgaaacacaatttgaagagtctctcaaataaacaaattccattttctgataattatttaattgccccacttttgaaatttttgtcaaagacgactgtcactccctgtcagaacttctattcagcacagtataccaagcgtttctccatcgagttgttataatatgatcaaaaagcagggagagatgctgcttggttaccctgtggggccttatcggggctcagtgcagtctttccatgtaggcattctcaaatactcaattgaaacctgattgaggatcatt

SEQ ID NO: 55985 - DNA, 1669 bp, Homo sapiens
  misc_feature (1)...(1669): n = a,t,c or g
tggcacgaggaatacatacatatattctgtaaaaacaaaaaaaaactttttaagatccttgggtatgtgtttgctttactccatttcagaagaaaattacttttcttctaacaaaattattttatagcttctccatttttaaaacttgtgagagcattgagaagagaactctgactgtgttaacagaagagagttgaattggagtctctgttgtgttaaaatgacctctcgttactccacagtagttatttgagccagtgactgagtcgcgttgaggaattctgaacccggacctctgacgttgttgggaggtggctgttacccacacccagacctcttgagtaaggacagaaacgttatcattggggatataatgagatttctttcttaacaattgaaagtaataaagagttaattttctcagtagtcctgtctttccaaaatgcgccacaggggctcaagatctacagaagaatcttgttatgacagtttgttattacccatattcagatatccttgagataatggaagagccctgctacataactccctacagagaaagactgatagacttgagtagtccttaaaacaagtgttattcctgttcaccaaccccgggactgtggagggggtttcactgtctataccatgcgacatccatttcccctgaatctcaaacgaactagaaagtatgtcatgataatatttccattagatttggaagctacctgtacatctgcaatattgtgtttttaacgccagcacccagaactttgacatgttcagtcactccctgaaagggcacttctctcttgtccaaacacagcgttgacatttttactgaggagatcatctcaaaggtgatgccaaacgagtctggggctggttttaaggggacaggcacattgcagttgtaggtgttcattttcagcatctagtagataatccattggtgtttgtcccaccattggtgtattctaacaagaatgngnccaactttgaatctcctggcttgaaagtntannccatcacttaattcttattttaactctccacctgaaaaccagntcatatttctggccattttatgtaagcaaaactgaacaattggtgaaacattttgttactcttggaattgactctggctgtcagtgtgagccattagagtaacatcgaatcttggggcaaagagctgcccaggtgaattaaatttttccaggacactagctagtgtgccttggattgattacctcttctactgcattgaaaggcgccatgttttcctgaaatactaaattcccaacacctgggtaaacaatgaccttccaaaagagtggctcccgtatgcctctccctaggaccaaccccatgaacatgttttgtcacgtttgtctcatgtttctacttcacaagtcagtgagtgtgtttaaggtaagtacaggattaatcctagtaggaataggcgattgctgtcataatcaattctcatgttgatttcattttattgtaaagataaatttaaacccagttttgcttaagcacattgatgtaattttttggtattatttgacatgaaaaaacagcaaaattgagtgatagatacaatatgaaacttgttgatgaatgaattcaaatttattaaaaaaggagtaactgacctaaaaaaaaa

SEQ ID NO: 55986 - DNA, 300 bp, Homo sapiens
cttaactgtattaaccaaaatagttgagaaccctgctaaagttatataaggtttaccattttgaacttgaatgttgacattgatattttgagagtgctcaaactgtgtcccctgtccagtaggggactagacagtggttagtttaccttgtgtttgtgtatgtaggatgggatgtatagtgctctgttgatacaaggaagagcttcaccagtggcttgctgtagagttttcaaattaactgaacccgtcgacgcggccgcgaattccagatctatgaatcgtagatactgaaaaaccccg

SEQ ID NO: 55987 - DNA, 424 bp, Homo sapiens
agatgtatgactgggaactgcatttacttgtggtatactgtgttgtgcactcatgcactgaccttacactttgtacttacactgtgggcatgtggtcaagatgcatacctcatgaattcaactattttttcataaaatgaaattttattatgatgtgtaaaaatgctttatcataaactgaagtgtgttctcatggcacacttcatggcagcacagatatacctcattttaaccaatagatattctctctaaaattatgtgcaaatcaatttttaaaaaatcaaaatctatgttaaacacattttggcagtgtgctataataaaaaaaagtgttgtgtcaaagctttctagtgacggcagtcctactgctgtatgtcaggtttgctcacaatgaggtattccccatagaaataacaatgcatgg

SEQ ID NO: 55988 - DNA, 419 bp, Homo sapiens
ggcaaacaagcgcattcccaaaggggaaccagcttgcggacacacaggctccccgacactacgcagacagagccagcagaagtttaaaggaaacagagaccgggcctcaaagcattcccagcagaagctgcccgagagcccgggtggcgcacgttacccagtcctccgaggccggctggtccgatgagctgcatgagctggctgtggctcatgtttcccagcaggctctgcaggccaccctcacctggaaaacactgcagctcaggcgggcctgccccagccagatccacgcgggccccaccgcgctgcctgcgcctctgctgagcaccgcactcggctgcccctgaaccctacagggggcaccacttgaagtgaggcgacggtgggatgcagacccgtcctaccccgtgaaggtgggg

SEQ ID NO: 55989 - DNA, 141 bp, Homo sapiens
tgagatcctggactgtttcctgataaccataagaagaccctatttccctagattctattttctgaacttgggaacacaatgcctacttcaagggtatggcttctgcctaataaagaatgttcagctcaaaaaaaaaaaaaa

SEQ ID NO: 55990 - DNA, 237 bp, Homo sapiens
tttttgtcttcagtgacacttttcgtctcttgattgttgaagtactcaagtacttttccactttggcctttctttgaaacaaactcatcagatattcctagtgcttttagggtattagaataatgcttttctgctgccattcttgcatttttctgagcaactctttcaaatagcagtggcctcttttttaatttttcttctctttcttctagttctcgttggtattctctcatcctt

SEQ ID NO: 55991 - DNA, 382 bp, Homo sapiens
gcgtcgacaccaaatgacaactcagatacaagaagaaactaaaagcaacagaaatggcaaatatgaaataacatgtgtacatacttttctcttaatatctttaaaagatggctgcttatagcagaactaataacaccgtatttgatgggtttgtaaagtgtgcagatgtaatatatgacaacaatggcactcaggactgggatcgtacatggatatacgctgttgcaaggtttcagtgttttctctgaactattatctaaatattaactctgaataaattgggtaagttcaagatgcatattgtaatctctacagcaaccactaaaaaatagttcaaacagatatagctaaaagcaatagaggaattaaaatgacattctta

SEQ ID NO: 55992 - DNA, 1038 bp, Homo sapiens
tttttttttttctgaagtacaaacatttaatattgcttaaagaagagcaggcatgtttgggtggcagggagatgagatggtggaatcccacactgttacctcccagacccaaggcttacatgcaataggatagaatggtataaaagcccttttatactgtgggttatacaaggaattgaagttgattgcttagaagaagagaaggatttgactaagggcagggtttaggtgaaagtagtaactgtaggcacatttctggagctggctttcatcagaagtcaatttggcaggtgagcatccaagatgaagtgtccttattctccacactccatccccctaattcggctcttacaatctcacgcgccttcctcttccaagatggtccctgagcctttaggcagggaggttggggtgaacatgctgcatcaatgtgttttctacttttttaagcagaggccacagcaacactacagcaggctttgtagaaatcatcagcagcctttgtagaaacagcaggctttgtagaatcatcttcagaatactgtgattttggttaattcagaagtaccagtctttttttctccaagaagattcttatcagctccataaagtcaacttcaattcctcaaataagtcgtatttgaattcattccactgtaagccttcaaagagtaatgagtatctccaatggttccctgttctgagcagcgagccaccgcataagcagacatgagacctcactccagccaaataacactttatttttgtagtttcaatgcttttcttccccgaggaaagggaggagctcaggagaacagtgtcatcaaaatttcctggtggttgtttaatcacagcagcagagtaggtcaggaaactcttccagattaccctcttcctccttcctgccatctgccatcatccttctggattttgaagataccagactggtgaattccatgaaacagatgactggacccacagcactggtccttgagtttttgatggtggtgctcatctctgccatcctgttctgagcag

SEQ ID NO: 55993 - DNA, 849 bp, Homo sapiens
attcgggacgaggggagctaagccagacccgggtggcggtggcagctgcgaaacccagggagccgatgccacgtgacccaatgtggacttcttttaaacctttctaatgcccataacccagcctcagacccatggagcccacgagagactgcccgctgttcgggggcgccttttccgccatcctccccatgggggccattgacgtaagcgacctccgaccggtcccggacaatcaagaagttttctgccatcccgtgacgggaccagagcctgatagtggaacttctcgagctgcaggcccacgtacggggcgaacgggcgtgcgcggtaccactttgaggatgttggtggcgtgcagggggctagggctgtccatgtggagtctgttcagcctctcagtttggagaacctgggccctgaggggccgctgtcaagaagcctgggtcctctctggcaagcagcagatagctaaggaaaaccagcaggtagcaaaggacgtgacacttcatcaggccttgctgaggctgccccagtaccagactgatctcttgcttaccttcaatcagcccccccctgacaacaggtcatctcttggccccgaaaatctgtcacctgcaccctggagcctgggtgactttgaacagctggtgaccagtctgacccttcacgatcctaacatctttggtccccagtaaaggcgctgaagcactgcatgatgttgctgagaacttggggactcggttctgtgagggggaaaagaggttgaaaagagggtttcctcttatttcttccctgtgcgtaaacataagacaatccctcttcagaataaacttgctttataatcaatat

SEQ ID NO: 55994 - DNA, 510 bp, Homo sapiens
ttttttttttttcattcaccagccagttttatttactcacaagaacaaatccaaagcccagtgcagcagctctgagctcaggcctgccgtgccccgttttgtgggcctgtacttgaaacactgaacgtgatgtgtccttcactcacccgcagcactttaatccccacaacagccctgtgaggtaggaatcaccaccattccccccgactcatattacagatggggaaaccgagacacacattcaacaaagcgcgcatcacatggggagttcagggttagcctggagtacgaacacacgttctccccatggcccagtcagcggcccacctggcctcttcccctccctttagtaaccccatcagcagcagcataaaaatctaacccttcattttgctgaaagcccctgcagatgacagtttccttcctatcatgtctgcagagctccaaggctgggggcgatgttgaggccgaagccagccacagtggcctcagctgtgcctttcctggaga

SEQ ID NO: 55995 - DNA, 345 bp, Homo sapiens
accaagtacagtcaagagtgaacaacatcaacaacacccacacacccacacatccctaacaataccaaaatgctgtcaagaattaaaaataattggaatcctcacccattgctggtagaaataatcactttggaaaatcatcagtatccactaaagttaagcatatacccctatgaatcaagaagtctactccaaggtatgagaaatatacctaaagatatgccccaagaactctcatagcagtttcattcatgatagccaaaaaatgaaaaaaatctaaatgtccaccaacaggaaaatagataagcaaattgaagtcatacaataaaaaggtataccataaaa

SEQ ID NO: 55996 - DNA, 332 bp, Homo sapiens; identical to SEQ ID NO: 40658
  misc_feature (1)...(332): n = a,t,c or g

SEQ ID NO: 55997 - DNA, 329 bp, Homo sapiens; identical to SEQ ID NO: 43478

SEQ ID NO: 55998 - DNA, 405 bp, Homo sapiens
gggcgatgccagccccacagacgctcagcaaacattagtgcacattctcctagtcctcacccaatggcctcctctacccccatgcatggagctgccacatcagaagccccaagagaagctccctgcaggagaggccagctccctggatgcccaattgcatacctggccgaatctgccattgagtcaccttagcaaataggctgctgtcactaggaccaagctctcaagcagagggatgccaacctagtccttacttagcccacgaatcatctagagcatcctctagtcttttgtgggctccctccttcccatttgaagagacattgttcagaggaagaggggaagatttgaaatgtcaggtcacggaggagtgtttaactggagcctggtgaaccgcagggcaat

SEQ ID NO: 55999 - DNA, 526 bp, Homo sapiens
  misc_feature (1)...(526): n = a,t,c or g
agagcatctttctgttatgctgttgccccactcctattgcaatactccccttcttaagaaagtttttctagactaatgtctatattaaacttcttttctttgacaataatgatgccatgacttgggcaaaatgcccattgcctctgggtcctgctttcttcacccagtgctgccttattggactccttgtgcctctccttggctggggaaatcagaatacacagtgatggagtctcactctgttgcccaggctggagtgcagtggcacgatctcggctcactacaacctccgcctcccaggttcaagagattctcctgcctcagcctcccgagtagctgggactacaggtatcccacttctaagatgcctgatctgaagggcagtaaaacaactgacctttgccaacatgttaaacacatggttaactagtcccccangganaaactngngaaanccggacttgggaaaattaaccgggcaatcccnacttganangcccttgtcccctgttaaggaacttttctg

SEQ ID NO: 56000 - DNA, 344 bp, Homo sapiens
ggggcaaaccaagaataggaagacacggattcatagcccaaggggtctgccagggaaaggaacaaagataattcccaggatgacaggaaagtgaagtcccaggaaattaatctaagaaacaggccacagaagctctgggataagtaagtatagactatatgtttgggtagaataatgtattgagaagttgctgaagaaatagaatagtacatagaaacaaagcaaatagaggtgtggaggaattgataataaatcattaaaaatgaaaacttaaatgttggaaactcctgtttctgggaagatgaagtagacattcttttccctattcttctagttaagtgcat

SEQ ID NO: 56001 - DNA, 338 bp, Homo sapiens; identical to SEQ ID NO: 40926

SEQ ID NO: 56002 - DNA, 426 bp, Homo sapiens
cagtgctttccaaaaaaaaaaaaaaaaaaaaatgtgttctgtggccataagttttcattgatagagaagcataaatttggtgaatttagaattaggtcttttatcatatcctataaaaagttgagttaacaggctgggcacgggggctcatgcctgtaatcccagcactttgggaggccaaggcagctggatgccccaaggtcaggcatttgagaccagcctggccaacatggcgaaaccccatctctactaaaaatacaaaaattagccaggcatggtggcaggcgcctgtaatcccagctactcgagagactgaggcaggagaatcacttgaaaccaggaggcgggggctgcagtgagccaagatcacgccactgcattccagcctgggtgacagagcgagactccgtctaaaaaaaaaaaaaa

SEQ ID NO: 56003 - DNA, 430 bp, Homo sapiens; identical to SEQ ID NO: 41315

SEQ ID NO: 56004 - DNA, 430 bp, Homo sapiens
cttgcctcactggggagagagaagtggtggttctgcaaggcgcaaggagttcagagcctagagttggcaccgtcttgagttggagacccagaaggagccctgtatccctgcttggcctccaggccccgggccaagatcaggagttggaggcagtatctgtggcctgacaggctggctggggaaggggtgtcctccgggaggtggcagccctggtgttcccgaggagttgggactgcgttctccccgggacggagtggtgtcctggccccaagaacggggtcagtgtttctgtggctgctgctatggctttccacagcctcacgctggaaacagtacatctgtatcatgccgggtttccaggccagaaatctgaaatgtgtctcacgaggctgtccccagtgtcagcaaggtcgccatccttccaaaggct

SEQ ID NO: 56005 - DNA, 371 bp, Homo sapiens; identical to SEQ ID NO: 41600

SEQ ID NO: 56006 - DNA, 1842 bp, Homo sapiens
cctccacaacccacactgcccccacatccccgccgtgcctcctcgctggccgcgctccctcccggtgccggcttctctgagtcaccaacctgaggctgccccggccgcctgcgcacccggcagcaccatgacagatcaggcctttgtgacactaaccacaaacgatgcctacgccaaaggtgccctggtcctgggatcatctctgaaacagcacaggaccaccaggaggctggtcgtgctcgccacccctcaggtctcagactccatgagaaaagttttagagacagtctttgatgaagtcatcatggtagatgtcttggacagtggcgattctgctcatctaaccttaatgaagaggccagagttgggtgtcacgctgacaaagctccactgctggtcgcttacacagtattcaaaatgtgtattcatggatgcagatactctggtgcctagcaaatattgatgatctttttgacagagaagaattgtcagcagcaccagacccaggggtggcctgactgcttcaattccggagtcttcgtttatcagccttcagttgaaacatacaatcagctgttgcatcttgcttctgagcaaggtagttttgatggtggggaccaaggcatactgaacacattttttagcagctgggcaacaacagatatcagaaaacacctgccatttatttataacctaagcagcatctctatatactcctacctcccggcatttaaagtgtttggtgcaagtgccaaagttgtgcatttcctgggacgagtcaaaccatggaattatacttatgatcccaaaacaaaaagtgtcaaaagtgaggcccatgatcccaacatgactcatccagagtttctcatcctgtggtggaacatctttaccaccaacgttttacctctgcttcaacaatttggccttgtcaaagacacctgctcatatgtaaatgtggaagatgtctcaggagccatatcacatctgtcccttggggagatcccagctatggcacagccgtttgtatcctcggaagaacggaaggaacgatgggaacagggccaggctgattatatgggagcagattcctttgacaacatcaagaggaaacttgacacttacctccagtagaaacactgcatttttctgtgaacacatccacttcacaagccttgtttctgatacttagtatctagagctgggttgagaaaagtctgttacagttgctagaggttttcattaaaacttatcagatgagaggcttttttaggataagaggtgagaactgggcaaaagttgtgaagcagcaattctgttatatggacagtgttctgctttttaatcctatttagcttgtttcagaaattctcacttttgttgactgccaacatacaaagtaagggaaactcaagatattaagatggctgtatcagttcttaaaatctgcagagcctggttcaaaatcagtcactcccttcagaagcagacatggcatctgttccttgcttgcttgttggttgtgtacctttcacggagacctgaattttagaattgcccagtgctgccagagtgagtgagtgtaattctcctttcaggtaaagataggctatctcaacactgctgagtgattcataaacatatcaaccagtagcattaacccattttatttcctgtccttagtgtctgaagatgctcaccagttttctgtgtacagtaaggcagcatgctaaaatgcttttgttcagttctgtatatttgaaaatagcagtgtgttctctgatggttacctgcagtggcaccctgtacaaaaaataaaagacttattgctgtaaaaaaaaaaaa

SEQ ID NO: 56007 - DNA, 5578 bp, Homo sapiens
tttttttttttttttttttcatcttttaactgtttattgtataatataaaactacaaaagtaagactgctcatttccatgtacatttaatctgtccaattgtttagattacagcccaaacctacatgtgaatacagccatctgggttccgatgtaacgtctgtaatattgcatagaaaaggcacagctctcaggtctgtgggggaaaggttatacctcctttttgacaaaagccctcctcaaaaaccatgcaccaaacatgtcactatgtacatcttttttcaaaatctcggtcatgcgcacatatggcctgcatttctcttccaaaacttgttatccccaaaagaagtccaactttttattggctttgtctgcaatagcatttgatcctggctaattttcaagaaccattcagactcattcttagaaacactgaaaacaattgtacataagcaggatgcacacaactccatgcctccaggtgcgggggcagttacaggaaggtaaccatttacagccagaaaaggttaaatatactcttttcattgttttcagaaaatgtataaaggtccaatttgtaacagcaaggttttcaaattaagacaattctgtatagagtagcaattgctgcacgaagtagagtcttttttttttttttttttacatttgtcatttaagaaggctgccctgcggtattcataattcattgtttaccacaaaggtggttcataaatttaagctttaaaaacgatctgtaagttgatactttggctctttggagcttatttcattaagaaattttccttgattgacctcagggcagctggggcactccaaggggctatggcgataaaaagctcaattggtaaagacactcgagaggtgcagaggaggctctggccactgctcaccctttggtatgaacaagggtgcccatgtggttgctccttctgtcatccagagaaagtgctactaaaaaaactttaaaaaatatcaaccctttgatgcttttcttaaaaatttggaggtattaaaacattcctcataccttttgcatatttcaaatagacccatattagagaagagtaaaaatgaatgcggactgtgcatacaatgagaagacctgggggcctggcttggacccccttttaatacagatttacattcctacaagagaatacattcctaccatacattctgcacatgttacgatccagatgttagcgctccacagtaaaataaatatatttacacagaaaaaaggaataaataacttatggggggaaaaaaactcacttccaaattcaaagctcttacgattctgctctcatcttgtcacttcattgcacatcagtgtcaataactgtcctctcccagccccagctcggttttctcgtaaaggcacctcaagctgcctgccctggcccctggatgccatgtgatgtctttcataaagggaaggcactgctggaagcacatcccacactcaaactgggacttggagatcccactccagctcctactgttccctgttgggaacatcactttgtaagaataggatgcaaaagccaattagaaccctagatcattttgatctttctgaaaatgggctgctaattttccatgtctttcttgttagactttgagtatcagggatttatggcaacggtgtcagagttaaaaagcatttgccctgctgtttttggggtttttgttttgattttgaagccccagcccttacaaatacataagagtcagagaacccaagtttgggcaacacttctccgtgcttatttgaactgttgcccaacatatgggatttgtttaaacacatgatttgctaatccaacaaaagtacagttgttgtaagttactgtaaatcagtttttaacaatggcaaaccaactgttttaccctgttattgttcagaatcatcaatactattgtatatgtgtacgtaggtagatgtgtgcagcatgcggcaggtttgccaggtcctccagttatagaaagcatggaatctgggcagacttgttctctgcaagaaagggaagctcttaaaattaacaggcatactgacactggaagcatctactacaaccctcaccgtcagttacatggtcccgtggtccgtattaaaggaaatgacacacctgtagcagtacgaggtgtctgcgtggaggttgcttgtaggagaacaagtgcaatttgatcagtttctcactgctctactgagctgataattagcctttaaaacacattcaagtggggggaaaaagtaaattagaatgtagaaagcctttatcatatcatactcaaatcttttgcttagatgagcagttccttcatcacaaacgtctttgctttgccatgtgcattacaaaaataaaactaactatggcttgcttaaagtgccattttataaagttgtcttttttaattagccagaaagacccaattttatccatggcaagaagtgagcagaattggtgactgaatattgacaaatgaccaacaacaaagacaacaacaacaacaaaacatcccataatttaaaaatttttaaataaatataaaagttattcctaaagaagccatctgcataacaatataggttgtaacctgcactcaacagctaaagtaccattggaagaaaagaaaaaactgaaacaagaaggccataaacagtttcggcaacaagcatgatacattgcaacctttttaaaattaaatgtacaccactaggaataaaaagctacttctcaagtgtgtcctgggagataaggtgatggggggggaattggggggaggagggaaaacatgcatagaaagtcctgtctgagttttggggtaaaacagccttgacaagtgtgaagtagctgactcaggaaagcaaccagatgggaagctgtgacgtaatgtgatgaactccaggttcaagagtcacacatgttgtaagagtgcatcccgggccggccgaggcgagccaagctcactgtggtgatcacgaagatgccattttcagctcttagcaacacagggaaagctctagggaaaggaagctgcagaagacaattaagcaacatgatggatgccttctggggagattttcttctttaagggccctaagcattgcaacagggctgagttccatgaagaagttggttgcttttcggatgtaaaattttgttcggatgtaaaatttcaggtcatcataaaaattatgccaaaaaggaaagatctgggttttcattaaaaaacaaaataaaaacaattaaaagcgcaaacttggcataaatacactcttaagaaagacagtagctttaccctcaaaagagggagcaaaagagaaccatcacttaaacccccagctccacagccatctcccgccaactgcttaatgcaagtttgatgagcacatgtggctctggctttggaagtcacagtactggcgggtgttggtgccagggggtcagtgcttgtgaaatttgggtgtgatatcacctggccctttcttaaagcactgtgtgtgtgtttatgggtgtgtgcatgtgtgtgcctgtgtttgcatttggggacatcaactgcagattgatttgatccaattttctcttgcaccatacacatataaaacattacaactctataaaagtacaagtgcaacttgtacatctgaagtttgcaggaactatgtgagcaaatcctatcaaaatagctatctcatatgtataaacagcatttgtttttagaaaacaatatcataaactgcagaatctgtacaaaaatataaaataaatttgggcagcagttttctaaacagccatgtaaatgcaacacttacgaggagtagttaatgcctctaaaaaggccgaattgccaagtcaacctatacagggcaaaaatgccagaaaaggtactgagattatctaaataagatatatatatatagttttcttctttacctcttgcaataaaacttatagaaaaaatagacaaatatgcacatgcaatttacagcttttccaacttaatccttgtgcttcacttgaactgtttatttttgtcattcaacattgcaacattgtcttcaaatggattctttcctataccagggtagtaggtctctgaggaaccactcaaaaaagtgtattaaaagtggtcatacttggatgaaggcactccaactctgctcaaagcaaaaactagtgtgatcctgttgtaaaattttctttttctctgaaaaaggcaagcaagggtgcatgcacagtgtggagaactgtcagggttatgggaacgctctggggtctgggtgggcatagtcgctgggtccctgggtcttaggacctaacaagcacctccatgatgtggtccagctctgtgaggtccattttgaaaggctgacttggggtgacaggctgactgctgtaaggagccagagttttgaggaggtcgtcggcagacacaggggccatttttgaggctgtccctgatgaggaagtgcaggggtcaaaatcatacatggacgtatcaatgtcagcaaacaggatgtcatccagggtcaagtctgtcaggaaacccgtggacgtcgttatttcaaaattcccaggcagagagtccatcagttttgagtcatctgcgcggctctcttgaggaccgtcgagtttctgggtgccagcctcgctggaggtccctttcacactgtcagtcgcagccgtggccgcctctgtggaggtagatgtgggacagagctcctcgatctcgtccaaggcagaggagaaactgtccttttctggcaagagggctggaggtgacagtttggtgggagccgtgggctgcatggcctgggaggtgcaaaacgtgtcatcgtcgtcctcgagcagtgaggccggggtgaggcaggcctccaggggcgtagtgcttccgaggtcgcaggggtgggaggacggggacgccaggtggctgaaggccggcggggcctctcggtagctgtcgctgggctcggtggtgggctgggaggagggggtgaacatgggcctcaggctgccttcctgtttgagttcctcctggatccgcctcaacatgttgttaattaaaacggtcttttgcaagctgggctctgtcaggggcctgtggttatagagtttcataagggaaatgttgaagatagtctggcgctgtaaggtgtaagacaccttggatggaccgtcacagggagacacgattttgccttccagcccatcttcatgctcatcaaacttccgttttcctcctttacccaacatatatcacatgcagctccacctgggaactaacgcatcaggaggggtttccgcccactcctcagctactcccgctccatgcggagtgccccgctccaggggcccgagggtggcgccggggagcgggcagcaggcgaggctgaagctaagactccgccgttctctgcctgcgcgccccgagcattatacaatggtggaggcggcggcggcaggcagcggaggaggaagcaggaggcgggcggagggggcgccctgaccgagcgagcggtagctcgtgctccagcactcgccgtgcaggag

SEQ ID NO: 56008 - DNA, 312 bp, Homo sapiens; identical to SEQ ID NO: 42406

SEQ ID NO: 56009 - DNA, 366 bp, Homo sapiens
ggcaagcgtgcgtatccaggaatctgcatgagtcgcagtgtttcagggttcaggagggttctcctagtgctgaaatggctgcaggaaccacaggcgtaggttatcaatactcattgtcctttgaatttttggaaagccctctcaagaagtacggctacaaagaagcccaaactgtgaagactggaataaatgcccaactcttcattgcccagacatctatgtacatccacaagaaccaagaatatacaggaaaaagacctcaacaaacagactaattaaggcactagtgaccaatcctgtagttatggagatatgtgacttctcggacatggaatctgaaatagttttcttcaggaagcttgacaa

SEQ ID NO: 56010 - DNA, 243 bp, Homo sapiens
atgacagtgtcttttaaagagcagaagacattaatatgcatgaaatccaatttatcagttttttatttttaaatagagatgaggtctcactatgttgcacaggctggtcttgaactcctgggctcaagcgagcctcttgccttgacctcccaaagtgctggaattataggcatgagccactgtgtctagcctttttttttaatggatcatggtttcagtgtcaaatctaagacatctttgctg

SEQ ID NO: 56011 - DNA, 621 bp, Homo sapiens
gcgaccgcccgccttggcccgtctctggagtgctgggcagccgggtctgcgggcccctttacagcacatcgccggccggcccaggtagggcggcctctctccctcgcaagggggcccagctggagctggaggagatgctggtccccaggaagatgtccgtcagccccctggagagctggctcacggcccgctgcttcctgcccagactggataccgggaccgcagggactgtggctccaccgcaatcctaccagtgtccgcccagccagataggggaaggggccgagcagggggattgaaggcgtcgcggatgcgcctcaaattcagtgcaaaaacgtgcttgaagatccgccggcggaagatgaaccaccacaagtaccggaagctggtgaagaagacgcggttcctgcggaggaaggtccaggagggacgcctgagacgcaagcagatcaagttcgagaaagacctgaggcgcatctggctgaaggcggggctaaaggaagcccccgaaggctggcagacccccaagatctacctgcggggcaaatgagtctggcgccgcccttcccgcccgttgctgctgtgatccgtagtaataaattctcagaggactcagcctta

SEQ ID NO: 56012 - DNA, 415 bp, Homo sapiens
tgaacattgaacttgcagccaacagcactataactcatgcctgaacaaagctcactggtatttgctttgtaaagcacatcatagcattcctgcacttaggaacactaggcaacagtacttcagcactatgcataggggctatttttaacagctaaatcaccaacaaaaagcacaaaaatgtgaaaaatgtggcactatgtgtaccacaaaaaggacacttgcttttagtatgaacattgaaaccaggcacaatattaccttgtttgaccttagctagaaaagtgcacattaggcaactcaaaatttttgctgttctgcacatgtttgcaaatggccacaaaatgccatttgtattgattttgggattacaataaattttagtaagcagatgaatttgcaaatacagaatctgaga

SEQ ID NO: 56013 - DNA, 116 bp, Homo sapiens
gagaaaatgtctactaagacctccactccctataatggcacattaagtatctccaaccaacccactcagtgagtaagataggaaagctggtcaaatgtatttttttaaatcttaag

SEQ ID NO: 56014 - DNA, 471 bp, Homo sapiens
gaggaggcatcttttaaaagccttaggatattctatatgatgacctcaatattgactttcagccatactgggaaaacttacttttcatggagtgccacctaacagtgaatgtattagaggataaaatgtttgccatgtatacacctgtatgtgcacatacacacattacacacacacacagaatgcacatttcacacacatatacttattattcaagatgaaactgcactctaatcaatctgagtctattgctgtttcaactcttaacatcaatatctcctacattagtagatataaacataattcaaatatttaaatatttaagaggagaaaagtaactagaaaaccaatgacaagtgaggccatcagaaatagaaaatgcctggcacgaacagtctatctaaattctcaatttcacttcaaattagagaatccataatggactagaatataaattactaacacatacag

SEQ ID NO: 56015 - DNA, 533 bp, Homo sapiens
ggattttaattcagaattgtgaagaccctcttccatagacttggagattccaacttgctacggaacagtctcttatcatttggataccttttcctttacatgggattgtgtttagtattggaaagcttttaggattttaagaaaatgtgattcctaattgatgttttctttaaaaagttatctctcttaattcattttctaatgcttatatggctacccagttatcctagcactttttatagaaaaatttgtatttttcagactcagtgcaaggtaatttctaagttgttttcttccccattgtttgtctgtctttgcatcagtggcattcttcttattgctttgctaaaagtcttgatatccagtagagtgagtccttccaccttggacattcttagccctttccatttgtttccatttgttacaaattttaggaatcagcttttctaagaatcagcaattttccagagaaaaatctgtttggattttgattgggattgcaatgaacttatgatctgtttggaggaatttgc

SEQ ID NO: 56016 - DNA, 875 bp, Homo sapiens
cgttaaggttctttttcttcaggatcaggcacagagactgactgaatggctccaattatcaggatttgaaaacccagtatcagaatctaccactttgtaacaggcctgagggagagggaaaagcggatacccacctgtgtcgctgtttgcgtgccaagtccaggaacagtccatacagccctgctgcatcccacgacgctgtcacaaagcaggagttcatccgaggccaagatggagaaactgaggcccagaaattgatgtccagaatgctttgctcttagccactgtactattatggcatattttatctttatgtattgcatcatttcatggattcaagtttatcaatgtcctttgacaagtttaaaaatctgtctgctaaaatctatcaaatacattaaggaaaagtcccacttggcacatctcccacaccagatgttaattattcatactgcatgactgaggattttggaggcagagagagattcatctgcaatatttggaacaccaatggaggtctacgtcaacacagaatttatacagcagctggtgctagtcagagctaatgacagaatttcagtttaataaaaagacccccaactgagcacaccatcttgaaaaaagtatacttatcaaacagctttcaatcagttcaagagagacaccttaattggggagaggaagaattgcagagtagtttgtaatcatgccaattccagatcaataactgcatgtctgttctttggtagaaatagcttttgctttatattaagtaatcacatatatattctctctatttggataagggaaccttcgctttatttgacaatgtataatgatatactcttctaattcacctctgtgtcttcacaata

SEQ ID NO: 56017 - DNA, 347 bp, Homo sapiens
tgccatctgaagaagagccattttgtgatctcttctgaaacaaaattataaaattagatacttcatacaaattagaaagggcttattaaatacttgaattttggccattccggaatcaaaaatttctataaacgaaaagaacaaaaactacttaaaaattttatcaggtcactaatttaaagataaggaagcttgcttactgaaaaaacttaaatgctttcacagtgcccccagtgttagccgaacagtgttcggtcgacgcggccgcgaattccagaactatgaatcgtagatactgaaaaaccccgcaagttcacttcaactgtgcatcgtgcaccatctcaatt

SEQ ID NO: 56018 - DNA, 243 bp, Homo sapiens
gaaatgaaaatcagtgaaaagcactcagttttttaaaagcaagaatgattttattggtttcaaagttaaacttactatttgaatcaaatttttataaaatccatttattttttaaatacttgaaattttgagtaagaaatataaggacatggaacaaaataaggcacaaaagcgtatacagtgaaaagtaagttgtcacccccaaaccactcaagtttcctcctcttttcttttttttttttt

SEQ ID NO: 56019 - DNA, 334 bp, Homo sapiens
  misc_feature (1)...(334): n = a,t,c or g
caacatatttttttggggcgatacaattcagcccatgtaggtagaaacagaaaactaaagctacgtaaaattgaattgtttttcaaaatggatgctgaatataaattgatacatttatatttttgctatcagtgagtaagaatgcccctggatccacattcttatcaaccagtgcttcctatttactgacttttaagtttggctagtctagtgggtatgaaatggcatttctttgtgattgtaatctgcatttttctaatttctagatttatatgtatgttgngatgtagagattcaatctcattttttatccaaatggatatccagtcatgcc

SEQ ID NO: 56020 - DNA, 396 bp, Homo sapiens
gaacacacatgctgctgagtccgcagggggggcagagcagaggacagcgtgcttttgtgtactgttggaagactggctcctcctgtacagcacctctgagcccttgtgcaccgccctgccacgggcaccatccagtcctggccgtgtgaccacccacagctgactgggcagcaggcacaggccctacccgagcaggccggagttggctcgcatgactccagctgaggctgcctgtgtacatttctccagataccctatggctaattttgttataactgcacagtgggctgctgccattttgtattaaatatattgtgaaacaaacctatctggggagaagcaatctacttgccgctgcttcctgtctggatccagcttgtgtccttggagagtggc

SEQ ID NO: 56021 - DNA, 478 bp, Homo sapiens
tggtgacctaagctatcaagaaagtcttcactgtgtccagactgcttttcatattctttctggacaaggtgatgttctgaatattgatccattgaaattctacacacatctctacaaaacactgttcaaattacatgcaggtgctaccaatgaaggtgttgagattgtactccagtgccttgatgtcatgctaactaagcgcagaaagcaagtttctcagcagcgagctcttgccttcatcaaacgcctttgtacccttgctcttcatgttcttccaaattcaagtattggcattttagcaactaccagaatattaatgcatactttccccaaaacagatctactgcttgacagtgaatctcagggaagtggagttttccttcctgaactggatgagcctgagtactggcaatgctcagaacactgctctgtgggaactgcatgctctgcggaggcattatcatcccatagtgcagag

SEQ ID NO: 56022 - DNA, 387 bp, Homo sapiens
  misc_feature (1)...(387): n = a,t,c or g
tttggtttgctaacgtgccccaaatttttattccaaacggtataagataattatgtgtaaatgaataccagctctacttagttttatttcatatttgtgtatctgaatatattaaaatatctttttttttttttngaggggnagcnttgnttngtngcccacccggnngggnagggnnannanttgggntnatngnnacctnngcnncccnggtnaagncaatnctccngccnnagcccccnaagnagcnggcatnacaggngggggcctttacccgggcnaatnttggnnttttnagaaannanggnttttcntngngtngcnatgtngnctttaaccncccccctnaagngacccncncgcntngccctcccannngcnggngat

SEQ ID NO: 56023 - DNA, 449 bp, Homo sapiens
agcgaattgagttttgtaacttttacttgctcatttctagattaaattaaaatgtcagtctaaatgattttgcctcaattggagagccaatcaagacttccaattcaactttcaaaagctatttgacctgttttaaaaaacaaaatgaatatgttgagtcagttttttaaaataggagaaacttctatttctatctacagttgaaattattcttaaggtaactgtatggaagattaagtgaaatgattgatgaatgtggcttttatgtttttgtgggttctttagatgatttcagaaacttgtagctctttgctggaagataatggaagaaaaagaaaaatcaagttatatcctgtgactaagaacagagttgtatgcctcactctgaaatatttttaattaactatattttggggcggcgggagatgagtaaattcattcactcttaa

SEQ ID NO: 56024 - DNA, 438 bp, Homo sapiens
ttttttttttttgtttctctcactaattttaatgtctgtatacaaggtttagatatttagttttaatttgtttaagctggaaggaaaaaaacacacacaaagaaatataggacaagttctcctggagaactatacccaaaagaggaacattagcactgatggtaactcaggataaaaagggagaatgagatccaagagtaaattagctgtgttgttacataaatagaatttagttagaaatagagctactactctatttcaaagatatgaaatagcaaatatcctgacaaaaaggttaacatactcttgttcttactgtgtaggacatgaaacaacaaccaattacatatcttttaaaactacttgaataagcaatacttacataaaacatagctcaatatatcagatgagaaaatggcttaatactggtaatcattc

SEQ ID NO: 56025 - DNA, 1313 bp, Homo sapiens
ttttttttttttttgcaggtaggaaatgtctttattattggccttgagtcatcatgtagtgtctgacataggttacgtgtccagaggatctgcctggcacacgctagctacccctgcccactggagcagcccctctggccgacgccaggcctttgtccatcatgccagggaagccaaccccaccatcccacaagttcatgctaggggtgctgaggaacaaggctgtcctaggattggaccctccatcctggacaggggtcctggggaggatgaggctgaggcctggatgatcagtctctttttggtttcatgatcatttaaaaaacagaaaagacaaacatttcacagtctttaaaaaatagaagtctgaggagagaagccagagtcctgggccccgggaggcccctcgaggcctcagcattccctgtcccttgaggtctgtctgcaggcctggccacagcacacgtggccccgtcatggtcactggcccgagccgtagggccagttgaaggtactccccgacagcagcatgtctctgatcagtgtctcaatgggcgtcttccccaccaggcgcatgaagaacagctgggagatgagggaggcagggaccgcgcgcagggcggggagccgcagcagcaggcgcccgaagcgctggggcctgggacgggtactgcgcccgcacatactcggtgagggccacctgcgccttctcctgcaggctctcaacgtgggccgggtctgagaggccacaggcgtcgggcgtgaagagcgcgatggccttgaggcagccatactcggccgagtcgacctgcaggcggcccagcttgtccacctgctcctggaaggcgcgcacctggtccatgaaagccacggcgcgctcggcggccataggcgcggcgtggaggccggcggcggccagtagcggcgccgtgtgcaggggcagcgccgcctgcgccgcgttcagcacgaagagctcgctccagctcatgcgcagcagcgccacctggtcggccaccggcagctcggggaagaagccgtggcgcgcccactccacggtgctgaagagcagccgcgccgccagctcgcacacgttgtcgatgcccagcaccgcgcgcgccgcgccgccccctgcgccgaagcgtccggccgccgcagggtagggctcagcgcgcagcagctgcgcgatcagttcggacaccggctgccccgggaagaggtctccgccgctcgccactgccgccaggcgccgacgccggggggctgcccgagggaggcggccacggcaccaggcagcgagtgcgggatgcgggcgc

SEQ ID NO: 56026 - DNA, 408 bp, Homo sapiens
  misc_feature (1)...(408): n = a,t,c or g
aaagaccagagaagaaatgtgggcaatatgcaaccaactgctcagtattctggtggctcatccacaataagcttaaactctaaccaggctttggcaaacccagtttcaacacacaccattttaactcccaattccagcctcctgtctacttctcacgggacaagaatgccatcattatctacagcagttcagaatatggggatgtatggaaatctgccttgtaatcaacctaacacatacagtgtcacttcaggaatgaatcaattgacccaacagagaaacccaaagcaattgttagcaaatcaaaacaaccctatgatgccacggccacctaccttagggccaagtaataataacaatggagccacttttgggagctggatctggtgggnaattcacaacaattga

SEQ ID NO: 56027 - DNA, 377 bp, Homo sapiens
ggctgattctccatctgagcacccattctcctgcaacatcaggggagaggatttcacctaagggtcagaccagcgtctccaaacccagctccccacctttgcctgttggtggcacttgtgggagaaggggagatggtatgaaaagagccacaacaggagtcacctggacagggtggagcttgatggaaactgacatttgtgcccattggaggcaaatgtagaatttggtatcttccgtagcgtcaggcacatgaaactctccagtgcccatgacttttgacagtgacttcagagcacatctgggagacccatgtggcccaggctccacacaggcaggagctcagcttcactcacagcaggattcctagtgccaagaa

SEQ ID NO: 56028 - DNA, 383 bp, Homo sapiens
cttggaaagccctgccttaccaggggtcttgtgcagaggtgttattgagatcagacaccaggttgcagtgatatgtatcatttgtgctcttgccatctaccgccccctgcctgccaccaagccaacctcaggaggtctttgcccagaggcttggcaagatgactttccacaactcagggaggttttaaggagagggattagcattgactctgataccttgttggtttgtgtgtcataacttaaaggtccatgcttctcaactggccagtggtcacacctgattggaaggtgaaaagactttgcgttctacttccaaaagttttcacatttgtcacactgtcctaaccctatcagctttgttgctatcattgtagtgaggcctg

SEQ ID NO: 56029 - DNA, 1003 bp, Homo sapiens
tttccacaacatcccctttttattgatattaatcacagttatgaggtcttgtccatcagaaagcacaatttgcattatgtagaactacatacaaagacataaaaataaaacatacatacaccaaccaccacaccagttaatctcaaccaatcaaacctctgaatgtgtcttcaattttgatcatcagtgcttcggaagaacgtacatagacccagcccaaggttggcctttggggtctgatagcattcacagagcaggagattcacccttggaagcaattgaatgtgtaaactctgagagcagacactgacaatgcaatgcctgcatacctgactcctgggctgccttccttctcagcagagcccactgaaagtctcacgtgtgcctttaaccaatgaggatggcaggccttatctgtgtttgaagtggacaggtcattgctacccctgttggagaagctatgtaagaaggagtaggctggcttctggtctagttcgactcattctttatagggacatttcagaatgatgagttggctaaaatttactttaaaggggaaatgtaaaattacctcttcttttcctatccccttcttcctttcccatcctgagccctctggcaaggcctgttgcagctcaagagtttttggtcagattacaagttaccaaatggtcaacagggaaggacccactgcagattccaaaagtctttcattcacttgagttaactgaaatggctccttctttgagtaattgaagagtttgagttctagcagtttgctggtgtctccaagtctcttagaaacatgatggctataaacttatcaaaataaatgcctaagaaatttggaaagcgcgacaaatggccttgctcctggaatccattgacagcagaggcctccgaacaaacccacactctgtctgtctcttctttccacagggctcactgtgagttcacagttgtcctcatcccctttccttcaataatgtcaatctttgccttt

SEQ ID NO: 56030 - DNA, 406 bp, Homo sapiens
gcaggcgtggaccaccgcacctggccctggtagtgatatttaatccaatccaacaactataggctgggttaaataaaaggtcattattgtctatattccaagtggaattaaatgtagtcacagagattcctaacattttccttatatttaagggaaatcacttctaaaaaaacacactaatcagaactgtgatgctctaattagaaacaactcatctggccaactatttgctgctcagagtttcttatttcttagatgaaaaaaactcatcagttatattcatgtgatcgcggctaaaaagtcagtattttctttttgttctaatgtggcttcatttgaaatttctcagattctacattgtactaattatgaataacaaattataaattaaaaactcttaaagaga

SEQ ID NO: 56031 - DNA, 387 bp, Homo sapiens
  misc_feature (1)...(387): n = a,t,c or g
cttgtgatttttgaaaccaaagcccagaaagatgatgtttacttctctctccctggctctgcccttcttactgcaaaccatgctgtgccttagggcccttctcatagctgttcctcatggccatgactggaacagggatgcaacctctttctacacaagcacagttagttgggtgaagtctttttttttngtanggtctaaacnganaananctttngnnccccntncnnnantananccactntnncangantntnataatgntccatcacnanantcnntctncntccnncctnntaccacngnttngcnanaactcgnncnaatactnatcncnnnnctcnnnncntacttntaantaatcncnacatctnnacnntanttttt

SEQ ID NO: 56032 - DNA, 377 bp, Homo sapiens
  misc_feature (1)...(377): n = a,t,c or g
gcgtgtgtgtgtgaattgcattcatcacaaagatattgaagacaataaataatctttataacaaactccttgggttggactattaaacaatagcagagccaagaaataggacttttaaaagtcctattattcggccgggcgtggtggctcaggtctgtaatcccagcactttacgaggctgaggaggggagatcacctgaggccaggagttctagaccagcccanccaacatggtgaanncctgtctctaccataaattanaaattanccgggcttggtggtgngcacccgtantcccacctatttgacgaagctgangcagaacgaatancttgaacctgnnagatgnangctacagtnagcctccattgccccac

SEQ ID NO: 56033 - DNA, 192 bp, Homo sapiens
gacgtgttcccttgttcttctatggggacatggggaactcctgtactgttttattttcctgaaatatttttattgaaatataattcacataccataatacctaatccttttgaaatatactattcagtggattttagtatattcacagttgtgtaaccagcaccactatctgattttgtagcactttcattt

SEQ ID NO: 56034 - DNA, 695 bp, Homo sapiens
atttcggcatgaggtttgaaaacggtaacatcgcagtgctgctcgcgggtctggctagtcaggcgaagtttgcagaatggaatctaattttaatcaagagggagtacctcgaccatcttatgtttttagtgctgacccaattgcaaggccttcagaaataaatttcgatggcattaagcttgatctgtctcatgaattttccttagttgctccaaatactgaggcaaacagtttcgaatctaaagattatctccaggtttgtcttcgaataagaccatttacacagtcagaaaaagaacttgagtctgagggctgtgtgcatattctggattcacagactgttgtgctgaaagagcctcaatgcatccttggtcggttaagtgaaaaaagctcagggcagatggcacagaaattcagtttttccaaggtttttggcccagcaactacacagaaggaattctttcagggttgcattatgcaaccagtaaaagacctcttgaaaggacagagtcgtctgatttttacttacgggctaaccaattcaggaaaaacatatacatttcaagggacagaagaaaatattcgcattctgcctcgaactttgaatgtattatttgatagtcttcaagaaagactgtatacaaagatgaaccttaaaccacatagatccagagaatacttaaggttatcatcag

SEQ ID NO: 56035 - DNA, 408 bp, Homo sapiens
gatggagcaaaaagggctgaaggcagagaaaaggcaggcacggattactgggacagcagagaaggttagagacttgagttctggttgtcagcttggtgtccagaaaaaccagacataccagccatgcagacaccaccagtgccaggtcccaaggacaagctcagatcaacttcaccacactggagacagcataaggatctactatttccgtgaggatcctgggaggaaaaaattagctctgaaggagttttgcgttttaaatgaatgaaatatttgcccccaacactgtttttactttgaaagacacttaattgcttttaattggcaaatttaagggtttttcttccgccgtcagtgaggatgggaacatcagagtaagatgaaggcaattgcagggggaaaaaagtt

SEQ ID NO: 56036 - DNA, 304 bp, Homo sapiens
taagatgccacgtctaatcagactgtggggcattgctaataaagtgtgtccctaagaagaactttgaactgatttgatattgaaacaaaccaaaaacttccagtccaaaccatatttactcctgaagtcctattatgcctaactggcacatctctgctggatgctaggtagcaacttggaagactgtctatatataattcataatagtaattggtttcccccaatgaaaagtaagctcctaatgtttttaagtgcaatgaacataaaaaaatttcagaatttaattaaagacagccagtagagc

SEQ ID NO: 56037 - DNA, 1319 bp, Homo sapiens
  misc_feature (1)...(1319): n = a,t,c or g
ccaacatggagcctcttgcagcttacccgctaaaatgttccgggcccagagcaaaggtatttgcagttttgctgtctatagttctatgcacagtaacgctatttcttctacaactaaaattcctcaaacctaaaatcaacagcttttatgcctttgaagtgaaggatgcaaaaggaagaactgtttctctggaaaagtataaaggcaaagtttcactagttgtaaacgtggccagtgactgccaactcacagacagaaattacttagggctgaaggaactgcacaaagagtttggaccatcccacttcagcgtgttggcttttccctgcaatcagtttggagaatcggagccccgcccaagcaaggaagtagaatcttttgcaagaaaaaactacggagtaactttccccatcttccacaagattaagattctaggatctgaaggagaacctgcatttagatttcttgttgattcttcaaagaaggaaccaaggtggaatttttggaagtatcttgtcaaccctgagggtcaagttgtgaagttctggaggccagaggagcccattgaagtcatcaggcctgacatagcagctctggttagacaagtgatcataaaaaagaaagaggatctatgagaatgccattgcgtttctaatagaacagagaaatgtctccatgagggtttggtctcnnnnnnnnnnnnnnnnnnnnnnnnnnnnnnnnnnnnnnnnnnnnnnnnnnnnnnnnnnnnnnnnnnnnnnnnnnnnnnnnnnnnnnnnnnnnnttttaaacatgctattaaatgtggcaatgaaggatttttttttaatgttatcttgctattaagtggtaatgaatgttcccaggatgaggatgttacccaaagcaaaaatcaagagtagccaaagaatcaacatgaaatatattaactacttcctctgaccatactaaagaattcagaatacacagtgaccaatgtgcctcaatatcttattgttcaacttgacattttctaggactgtacttgatgaaaatgccaacacactagaccactctttggattcaagagcactgtgtatgactgaaatttctggaataactgtaaatggttatgttaatggaataaaacacaaatgttgaaaaatgtaaaatatatatacatagattcaaatccttatatatgtatgcttgttttgtgtacaggattttgttttttctttttaagtacaggttcctagtgttttactataactgcactatgtatgtaactgacatatataaatagtcatttataaatgaccgtattataacatttgaaa

SEQ ID NO: 56038 - DNA, 400 bp, Homo sapiens
cggacgcgtgggaaacccttatcatgagataaactattttcatcactccagaaagttccctcatactcatgtccagtgctatttatgccactctagaaacaactactgaacattatgcttttgaccatttctccattgtatgcgatgacaatgtttttgtgcaatctttcacttcactttttgtttacagtgaattctaaaatactgaaggttagtttttgcacagctaaactcaagtttttcaaatcttggtttctaactttcctatatttctgtcatcttctatcagaccatgttgccatgttataaaatattcttatattttcttataatgcctccatagttttattatatattcactcaatacatcatttttctatgtggtatgaggtaagaatct

SEQ ID NO: 56039 - DNA, 749 bp, Homo sapiens
  misc_feature (1)...(749): n = a,t,c or g
gcagctcataatctcggaggcccaggatggggagatcccgccgccaccctcagatcctttgattcttccccttctacatagccatagtgcggggacccccctaatatccccagggtacccaagcctggcgccgatcccactcagggaacttgattctgagtcctagactcgtgtttttcacctccccggctcaagtttccatcttcctagcccctggctccccctagtcctctcaagaaagtggagccctcttttcctgctccccaagaggaacgtatgtctccccagcccctaatttttccttcagtgacccagactttgcaacttccttagggatctgagtgcggaccccaagtttctgtctctcaggcacttaagtttgagactacttattctcccccagggaccctcattttggattcccaactttagccttgagacccaatggacccaagaatttgccccttccccaactcctagagatcctgaatcagggtcccccagtactgactccactcanagccccaatgccctgatatgactaagcactaccctaagaactgncctntaatggatttactantatntntatttttcaanangaananacngaggcntnnnaaannnnttannnanntggcnaaaattnccnngncnttgagnnanaacannnntggantttgnnnnccnnccnnngnggnnntnnaannngngnnntnnnggnnntnnnnnnntncangnnnntgggg

SEQ ID NO: 56040 - DNA, 396 bp, Homo sapiens
ccattaaaagaaaaaaaaatagtatcaataagttagaccatatttaatcagctagaactttgtccaccaacccccaaaacacaaaacttttcttagcttcataattccttaaaaggagaacaaataaacaacaaaaacaacaacaacaacaaaaaggcaaattcaactgacagccccttgggactggttcccaggggcagaggggcgggcagtcccgggctgggacctcctgaaatcatcccacctcaccggtgtctgcagggctgcctgcgggcgacacagcaaggtccagctgactctggaggcctcctggagcctgctcggcccttccccggcccgggcccggcccaaagagaaaaacaacaacagctattgaaacatgaaggatcagtttcc

SEQ ID NO: 56041 - DNA, 1976 bp, Homo sapiens
tttttttttttctggctttaacatttattacaaagataagagcagaggctggtgagttacacttcttcctccccaccaggtgctctctgcagctctggaaaaatggtgtcctctttgttgtcccaccagggggcgccacctccagccccgccccagcctcatacccagttcttcagctcggccagcggtaactgaagcctcccagaatcctggatccgggcccctagtaccctctttcccagggacccaggagtcctgcctccagtcgcctgcacttgtaactgagagctggaggtcgtccatagcagcatagtgagagtgtttttgatgagggtatgcagagtgggggtgaccatgttcccacctggggcctcaggtgggccaaggcctacccactttagccagcgtcccctccagcagccatcagcaagccaacccactccaagccagggccccctttggtccttgcacttgaggtgctttgttcagggctgggtcaggagtggcagagacgatgtccaccacctcagtactggggaaagtagcctggttcctcctcgtgggtccagctacttggactgctggctgggttctggaagctgcctcggccccagggcagtgctaagcagctcagtcagggcatccagcttccccgccagcgtgtcaatctgtttctccagggcccggtgtgagctgctcagattctgctgcaggtcatacaggatcatgtgcatcttggagatgtccaccatggagttcacttgttcccggagcttccggtgtttcagccgcacctggcggaacgcgttgatggcggccagcagcttgcgctgatgcctgcgggcagcatgagactccttcctgcgagtatgtttgtagaacatccaggcttcttgtagcactcgggcagcggactccttcatctctttggtatactggatatccatcatgaagttgtgcacgtgcttctctgccttgttaaactccagcttccgggccaccacggccaccagcagggctgtgcagcagacacccatgactccagtgcacaggcagacgatcttgccccacatggtgcccggcaccacgtcaccatagccgatggtcaggaatgtgatggggatcagccaaagtgtgtctgaaaggtgcccagtggcattaacagcctgcctctcggccacggacagcacccaggcggtggtcagccagaggccaagcgtgaggccgagcagcaggcggccagggtgcgtgttcatgtaaagcttggccacgaaccagtggcggaagcggacttgattgagagcgccgatgctgcggtaggaagcgttgagcaggacgccgctgcgcaggagcacggcgcggggcaccaggtagagacgcagcagcatggccagggacagcagcgcttccccttggcccaggaatcccggccagggctgcggggaggtcagcggcgcccctaaatcctgcacgcacggcgggccccgcacgggcgccgggtgcagcccacacaccaccagctccagcacgatctgcgccgcctgccgcccggtcagcgccacgcgccagtcccgcagcccgttgtcggtcatgaacagctggacctctttggcatgaaaggccacgatgaggcagaggagtaagaaggtggaaatgctgatcgtgcatttaaccaggaacaggtagagcgcccacgagcaccccccgaaccacagcatctctgcatgcagcaccatgagtccaatgccagttcctgccagcaccagtgcccagccggccagagacttctcctgctccagcaagcgctttcggcgtctcaaggcccccaggccaagcaccagatccccccccatggcccccggggtcttgggctcagctagcttcctgcccaggtcccccacctcgcagcacgcacagggcagccactgtggcttgcaggtcgtcagcctgctctgctcctcgtgccgcctcgtgcc

SEQ ID NO: 56042 - DNA, 370 bp, Homo sapiens
tctcgaggatccgaattcgcggccgcgtcgacgccatcacgcttggctaattctaaaatttacttatttattcagagtgtgtgtgtgtgtgtgtgtgtaaaaatatgtacgcatgatagaatgtggtgaacgttgaaaatatagagaagatttttcctctaattcagaggatcagaaaatgtttcatagaagaagtaataattgatttgaattgtaaagaatgggtagaatttacattagaggtaagggatgtatacaaaataatgaatacatgtacagaataatgagtttacatttgagctataaagggtgcaataaaaggaaatagtgaggtaagttgatagcacaccatggaaagctaggtttaaaa

SEQ ID NO: 56043 - DNA, 441 bp, Homo sapiens
cgcagcgcggcctgggctcccgcgtgtttaaaagtgcgcttgtggctgctgctgtcttaactcctgtgcttggcggacagacaggcgagatggcggcggaggtgttgccgagtgcgaggtggcagtattgtggggcgcccgacgggagccagagagctgtactggtccagttctccaacgggaagctacagagtccaggcaacatgcgctttaccttgtatgagaacaaagattccaccaaccccaggaagaggaatcaacggatcctggcagctgaaacagataggctctcctatgtgggaaacaattttgggactgggagccctcaaatgcaacactttgtgcaggcactttgtgggaattttgaacaagacctctggccaaatggaagtatatgatgctgaattgttcaacatgcagccattttttcagatgtatcag

SEQ ID NO: 56044 - DNA, 343 bp, Homo sapiens
cttcgttctgctttgttctagtttttactcgatactccataaacagtgagtgcaaataaaatttatccctcatgaaaagacatatatcacaagacaaaaaccaatggaaatgaaaaattcctaaaagagctgttttcagtacacactagaaaaaaggatcctcacttctttgtggtattaaattatttgtcttcatataagttttcaactcaaaactagtagtccaaagaccctttggaaaaatgaaactataaaaggcaatggattactcgaccacaagtaaatccctacaattttaaaatgacagtctacttcagtgcaatcgtttagacaataaagattt

SEQ ID NO: 56045 - DNA, 1344 bp, Homo sapiens
  misc_feature (1)...(1344): n = a,t,c or g
tttttttttccttttgggagtttctctttaaagtcttcagaatgcctcatactgtccatctctatgctgttaataccattcatttcctctttcggatgaggtatttcttctaccttagtaggtaattctgccacattttttacttcttctttttttaggagttggcatgtttcttgaatgtttcccaaaatacattgtaatacttcctgtgcatcatgctgtagatatccttcatacatagggttgagttccctcagtgtgttaagcagtcgccttggctgagtggcaagttcatcagtatatttctctggatttaagagaaaactagcctggagctgttcaaccgaaatgattaaggactgtaaactgcatatcaattcataacttgccaaagaatcttctttgcaatttcccttgtctttttgattggcttcatcctttagagcttctttcttccttgaaataatattaaataagtgctttactccagatttaaaaccgggacaaaaatataatacctgaagtatactattaagatagcaagtattgccgagattattcagtcccacaaatggtaacaagttttctctcttctcacagtttataggtgaagactgtgctgcaggaacaacttgatcaatttcagatgctctatattcagaagctttttcttcattttcttgagaatctgtgaaatccaaagctctcttagtttcctttttctgaaaaaactttaaggaaagtctgtttttctttgaagggctacctcttgaaagtccattactttcactaggtatgacaccaggcatttttttcttcaaatcccaaggagtgtcaagagttaatttatagaggaaagttgtaatcaccaattatatctggtcatggcccaaagcgaagtccgcggcggtgacgccggcaagtccaacccgaatgagtgtgggtgcgacaggtgagtccctgccccgagcccgccgggtccccggcccccaggaaaatctggtcggctcggccctccccgcgggggagtgaccatccgctcccaagagcgggaaccccgaccgccgctcgctcccgtcttgcaccaacaccaactacatcccgggagcggcgcccatctgcgcccgccccgggagagccaggagcgcaacaagcagcggccccgctcgccgaacgcctgaaccgctagggtctttagcactccgccaccgaggggaacttggcgcgttttcctcagtctcaggacccccgtgttttagcctcgtgccgaattcttggcctcgagggccaaattccctatagtgagtcgtattaaatncgtaanaatgtcaaacggtnttcaaa

SEQ ID NO: 56046 - DNA, 375 bp, Homo sapiens
gtcggagaaccaagaacaggaggaggtgattacagtgcgtgttcaggacccccgagtgcagaatgagggctcctggaactcttatgtggattataagatattcctccataccaacagcaaagcctttactgccaagacttcctgtgtgcggcgccgctaccgtgagttcgtgtggctgagaaagcagctacagagaaatgctggtttggtgtgagtttgctcttgcttccttcttgggtctgtgactggctttttgggtgcttatataggaactggagttgacaatgaagagaacttgcaacataccaggcactaaggaaattgggaaatatgttgtttctttttttgttttttgggttttttttttttttttga

SEQ ID NO: 56047 - DNA, 405 bp, Homo sapiens
ggaagttctgaatttcaaggcaaataaggcatgaagggtggaacattgcatctagggaaaataagagaaataagtgaaagtctgaccctacattgccaattctcagaccaagtacaaagtattaggaattttttatatcagctgacatcttgtgcttacagtaaagccatatagatgcacacatagtgactttattaaatcaaatgagttgtgcagagcagagcaaatctattaggctttctcttttagagttttctaattttactcttattagctccctcagttgtcatcaattacatattcctacatcagatattttacactatcagattctttgattaaaaaatcatcttcagctttacattattaatctctgaggacataaaatcaaataactttctaggg

SEQ ID NO: 56048 - DNA, 321 bp, Homo sapiens
ggtaaatttttcaaaactcaaaaatgtatatataaaaaacatgcattgaattttatgtggtactttaccacagtgaagttaattttgaaaataagttacatctaaaatatagtgtgcagcatcatgtcctagactaccaagaaacataaattggcaggccagaatttgtgaagataggaacaattcaaaaatgaagtgtgaggtattaatagctctaggtgaatggcccaggaaggaggcttcaaaagtgtgtacccattttaggattctcttttaaactgatattcatggattaaatgcattggtagctctgagtagttg

SEQ ID NO: 56049 - DNA, 400 bp, Homo sapiens
  misc_feature (1)...(400): n = a,t,c or g
gccccgtctgtacaaaaagtaaaaaaattaaccaagcatggtagctggcacctgtcccaactacccagaaggtggaggttgcagtcagtgagctgagatcgcacaactgcaacagagctgagaccctatctcagaaaaacatttcttaggttacaagttactgtaattaaacttaccttgttttaaaaataatttttctaggccaggcgtggtggctcacgcctgtaatcccagcactttgggaggccaaggctggtggatcacgaggtcaagagattgagaccatcctggccaacatggtgaaacaccatctctactaaaaatacnaaattatctggcgtggtggcacatgcctgnacttccaacttctcangangctgaggcagganaatcgcttgaa

SEQ ID NO: 56050 - DNA, 384 bp, Homo sapiens
agaaaatacatcatacagggaagagagaagggaggaggttccaagtagtaactggcagatcctcctgtctggaggtaccaccttctattctggtttctgacttttccttcttgatgaccatagatgtgttccagaggcaaaagagacacattatcccagatggcagaacatgctttcaaaacatataaaatgtcaaagttccagatccttctacatctttagtcctgtctgaggatggtagctggctctctgtagctgatagatggctagagttccatccaaatccttgaccacgacttcatggagatttgaataatctatttgatgagatttctatttcaataacccacctctctcaccccacattcatatccctaaatttga

SEQ ID NO: 56051 - DNA, 368 bp, Homo sapiens
ggccgagcagctttagtcttagggggtccaaagtttgcctcaaagacccctcggccggtgactgaaccattgcttctgctttcggggatgcagctggccaagctgatccgacagagaaaggtgaaatgtatagatgttgttcaggcttatatcaacagaatcaaggacgtgaacccaatgatcaatggaattgtcaagtacaggtttgaggaagcgatgaaggaggctcatgctgtagatcaaaagcttgcagagaagcaggaagatgaagccaccctggaaaataaatggcccttccttggggttcctttgacagtcaaggaagctttccagctacaaggaatgcccaattcttctggactcatgaa

SEQ ID NO: 56052 - DNA, 434 bp, Homo sapiens
gtctagtgggttgcccgggaggggtggcgggagcggtcctggaaataatctgtcctctgtcgccgggaactggcgaggtagttccttcgcggtggagagacctggaatggccaaatatcaaggtgaagttcaaagtttgaaactggatgatgattcagttatagaaggagtaagcgaccaagtacttgtggcagttgtgaaatgtacatcaaaacattcacccagaaaaccaggagctagtaagggtacttcgagaacagcttcaaacagaacaggatgcacctgctgccactcgacagcagttctacactgacatgtactgtcccatctgcctgcaccaagcctccttccggtggagaccaactgtggacatcttttttgtggtgcctgcattattgcttactggcgatatggttcatggcttggggcaatca

SEQ ID NO: 56053 - DNA, 346 bp, Homo sapiens
gttgagacggagtcttgctctgtcacccaagctggagtgcaatggcgcagtctcggctcactgcaacttccgcctcccgggttcaagcaatcctcctgcctcagcctcctgagtagctgggattacaggcgcctgccaccatgcccagctaatttttgtatttagtagagatggggtttcaccatgttggtcaggctggtctctaagtcctgacctcaggtgattcacctgccttggcctcctaaagtgctggggttacaggcatgagccaccacacccagccagaagttttaataagagaatgctacagttattagacggcaatcatgtcaaagtctggatggaa

SEQ ID NO: 56054 - DNA, 1261 bp, Homo sapiens
gcaggttagaggaaagaaaaaaattgatgctgaatgtggtgatgaaagcatgtttctaaaatgggaagcagatgcttaaagaggaaagactaatctgggattttgccccatttctctggtttttcactcctatatttaattctcacaatcgtgtcgtcacatagtgcaaaaaacaaaattcttgtaaagtccccagggagtttatgcttgggtgaaagttttagcctgagtattttcttcctctaaaaaaggtgggaaatgagacattgaggaattaacatataaatgtctgctatgggtttaagagaactggcgtatttggaatgcttcttacactaacactgtctcattgtaaaatataaaaccccttactctaactacatttttattcctctggtagtgtggtatccaggcaacatatcacttctgctatgtaattctaagaattctcatttctagagtacctgagccaaacaaatacacaacggaaggctgcagctgtatcatcactagcaatttgctcatcattatttactacctttgaacctaagggtttcctgcctatgcttttgaaagcaaaaatcagtctcctttgcatgaaaaagagccttagatttttaaacatgttagttaccagaatgctaaaataccagttgattacccaaattattttggaaatctatccataatggaagtctacaacaaacacataaaacagattacactaagagctgagaaattcaaaggaactgaagattctgagagataaactgttcaagtcttagcaatgatactgcacttctctttgacaggttctgggcttaagttagaggccctactggttccaaaccatattccactgactttgcaagtaaaataaatttgattctgaaataggaaacaaaaaaaggagaaataaccgaatagtagaagaaaaactgtttgtaggaagacgatgcagatggaatgatgtggacattgagtaaccatgtcaataaaatatataaaccaaacttaaatttgtgaaataaggaagttggtacctttgttgttacagtgtataaaaacaatttcggaactgctgttgcaaaaagacatatatagttttgcttccttctggtgttaagctgtttatatttcagtttcagttttaacttctaagttgccttgtaattgggactgtgtttcagcatcacaaaaaccaaatatttattatggatgcatctgtatcagcaattaaaaaataaacaagtaaaagtga

SEQ ID NO: 56055 - DNA, 695 bp, Homo sapiens
  misc_feature (1)...(695): n = a,t,c or g
gggtcttccaccgagatgggcactatggcttctcagagccactcaccttctgctccgttgtggacctcatcaatcactaccgccacgagtctctggcccagtacaatgccaagctggacacacggctcctctaccctgtgtccaaataccagcaggtccgtgctggcctgggagccagggagggtagcacctggctggccccaggcctcagtttcctaggtagacccgaccaggctatgcatctcccctcattccgccacgtatctccaggaccagattgtcaaggaggacagcgtggaggcagtgggcgcccagcttaaggtctatcaccagcagtaccaggacaagagccgcgagtatgaccagctttatgaagagtacacacggacctcccaggagctgcagatgaagcgtactgcaattgaggccttcaatgagactatcaagatctttgaagagcagggccagactcaagagaaatgcagcaaggaatacctggagcgcttccggcgtgagggcaaccgacgaaagagatgcaaaggatcctgctgaactccgagcggctcaagtcccgcattgcccgagatccatgagagccngcaccgaagctgggagcagcagctgctggtgcccagggcttcggacaacaagagagattcgacaagccgcattgaacaagcctcaagccggacctc

SEQ ID NO: 56056 - DNA, 780 bp, Homo sapiens
tttttttttaactgatgaaacatacatttattttttccaatcaagtcttaaaagtttgatgaaagcgcattattgttaccaaaagtcttcaggcaataacagagataaaacttaacacagacaaacaatgattttattccatagtctcttggacttgagaatccatttgagtttcagaaagaatactaaattaatgggggttatgtcaggatgccaatgtccatgctgaggcttctcctgatacaatcttttgcaacataaccaacaaagatcaggagcttaaaacaaaacaaaacaaaaacaaacaaaaaacaagttcatgttatttctacaatgtccaaaaagaaagaccaagatctttgcttaaaaatagaaatgcatactgcagtggctcaaaaacttaggcctgcatcaaaattacatgaagcgcttgttaaaacagattgagccccatctgcaaagtttgtgactcaagtgttgggtggggccaaataatttgtatttctaacaggtttctaagtgaagtcaatgctactggtgtcagaaacacactttaagaaccactggcaaaacatttaataagacaattccatgataaaagtatatcataacataaaaccacaaaactttggactcaaagactagctttgtgatacaatgtcaccttaccaatctgtacactccacaagtttttaaaaattaaacaatatataaagcacctaacacagcctggcacatacggctactgaattactaatgaatgttattatgctatcataa

SEQ ID NO: 56057 - DNA, 411 bp, Homo sapiens
cggacgcgtggggtgcctttattttaaaactttctttgtcatttggttttaggcatgtttcttgaatatagtaataagctggtgtatccattaggataatttgggttgcaaataattgcacaagggtttaaaaaatgaagtgagatatgtttgcttttataaagttctaggacagatctagtccaggcatggtttgtgtgttgtgacttgatttctctctattatttcagctttcatttcctggtgtgttgtgcagcttctctcgtggcagcaaaatggccacagaggtttgattccaggcctttcatgtgtttacaccttacagtccagcagaagaaagagctcctcttctgaaaaccttgaaagctcttgaatcttatgtctaatcccccacaaatcactatgatggca

SEQ ID NO: 56058 - DNA, 344 bp, Homo sapiens
cggaggcagccgcgaccccaggaaaccgaggaaatgaagacgcgaaggactacccgccttcagcagcagcactcagagcagcctccgctacagccgtctcctgttatgaccaggagagggctgcgggactctcattcctctgaagaggatgaagcatcttcccaaactgatttaagccaaacgatctcaaagaaaactgtcaggagcatacaagaggctccagcagtgagtgaagatcttgtaatcaggttacgtcgaccccctctaagatacccaagatatgaagccaccagtgtccaacagaaggtcaatttctctgaagaaggagaaactgtaagaagatt

SEQ ID NO: 56059 - DNA, 144 bp, Homo sapiens
caggttaggatgtcaacacatgactctggggtgatacaaataggccattgcagcatatacaattaaaatgtaaatatgaagaaaaaaggaagtttttgtttttttgtgggggagatgggggttaaggaagaagatagaatttca

SEQ ID NO: 56060 - DNA, 390 bp, Homo sapiens
cctgcagcgggcgaaaggagcccgggcctggaggtttgcgtaccggtcgcctggtcccggcaccagcgccgcccagtgtggtttcccataaggaagctcttcttcctgcttggcttccacctttaacccttccacctgggagcgtcctctaacacattcagactacaagtccagacccaggagagcaaggcccagaaagagctggaaaggcagctcatcatgcagagtgaaatgagggaaagacaaatggccatgcagattgcgtggtctcgggaattcctcaaatattttggaactttttttggccttgcagccatctctttaacagctggagcgattaaaaaaaagaagccagccttcctggtcccgattgttccattaagctttatc

SEQ ID NO: 56061 - DNA, 374 bp, Homo sapiens
aggagctccattgtagagtagctccattcttatatatgcaaaaatataagaatggagctactctacaatagaggaggagctccattcttatatttttgcatatatatatatttttaatccaccacattaaaaagaatacaatattacttttggaataagtttatagataaagtaattcagccttgtctatctgtctcttgacttctggagtaataacaggaatactgtggttaatcagagcagctgattagataaatggctcaatgtcaaggttatagctataattcctatgtgagacagacttgcagtgttatctagccagagattaaacttttaaagtctgtatagccatctttacatatgcatgaatagat

SEQ ID NO: 56062 - DNA, 1610 bp, Homo sapiens
ttttttttttttttttttgaaatttcaagacaactttatccagacaggcgcctctcaaatagaacacagggaagttaggcagcagttactaaaatacagtctcgccaaatgatttacaacagaacacaacaggagcaggggatctgtgggtggggctgggctgggcctcctatctcacagggcctgagtcaagccagcccgccctgcaaggcaggggctgacctgcaagcggagatctcacttcctcttaccccaaattcatacctccattttccccgcccccatctctccccagggtcctcaagtgggaaagggagaggtagcatccctcggatccaggcccactccactccgtctccggcaccagtgggcaggctgagtctgggcctcaaggggccctgggcttagggtatctatggcagtaggaaaatgacatggacaggctcttcaggggtaggctaaagtcctctggccagcagtacccagagaaaatgggcagcagcaggtaaaccagccaggaggtggagtcctctgaacccacagcagaccccaccctcctgcccagcccctgcccacattgggggtcaggaccactgagactctggtcaggaacagtgggtgctctcagccagtgtggcaagctccaaggcagagcttccaaggaccttaccacactggttcaaaacccataggtgacaccatccccagcagaagcttccatgggtgctggatcccagggctgcatcctgagcacaggtgggcagactggaacataacactaggacccaagggatccagaacattttaggcccatctcctgggctgctccagcctgttgccatgacttgggcaagtgagtgggcctcctgccaggtggcaggggcacagcttagacaaaacccttggcctccccccatatgcagcatacctctgaccaagaaggaactagcaagcctatgctggcaagaccataggtggggtgctgggaatcctcggggccggctggcacccactcctggtgctcaagggagagacccacttgttcagatgcataggcctcaggcggttcaaggcagtcttagagccacagagtcaaataaaaatcaattttgagagaccacagcacctgctgctttgatcgtgatgttcaaggcaagttgcaagtcaaggcaagtgtcccagaggccctgggcagctgagtgcaacctgtgtttgatcttcccctgatgatggacactcccagctgaccatccaaacaccaggaaaacatccccctttcctgggctcagttcctagtctacttgctggtacgaacccaacccacacactccccgcccacaatgcagctccttccaaatcctcccacaagccacctttgtgggacttggaagctgcttaggatgggccctgccctctgcgggaagccaatcctagcagaaaggtaagctaaacaacagtctcagaatctgagacccagtgactgttccccccgccccaggccttgggcctgaagtgggggcctgcctgtggcctctgtggtgggctcactcccacccccaacagtggccccagtacaggctttcccaagagtcttcaaactccacccaccc

SEQ ID NO: 56063 - DNA, 330 bp, Homo sapiens
ggtgacctttctccctgggatgtggagtcttcggcaacgtgtcctgaagggactggcccgcactccaggaccccacttggcatttcttgtctgttgccttcagactatctcagataggcctgtgcccctgactagcccagtagcacttgtctctagaaaaaggaagctcctgcccaacctggcttgtggaccagtaatatctgtggcctaccacccattcaagaaaacgttacagccggctcactgcaaaatccgcctcccgggttcacgccattctcctgcctcagcctcccgagtagctgggactacaggtgcccgccacaacgccca

SEQ ID NO: 56064 - DNA, 282 bp, Homo sapiens
acgtagaaatctcatgctccaaaacagacaatctccttggccattaaacaaacgtcaacaaatgtaaagttcccagagttatacagagtgtattctctagccacagtggactcaagctagaaataaataacagaaagatgaaagaaaaatctttaaacacttgaaaaatcaataacatttcttattgggtacaatgttcactctacaacttggaagagtaacagttataccaaaagctcagacaacaccactacacaatatatgtatgtaagaaatctgtac

SEQ ID NO: 56065 - DNA, 352 bp, Homo sapiens
gggaacccctagaagtctagggccattgtggctttggggagcccaggctccttgtttttttctgctgtgttattctgaaggcagctcaggatcccaggatactgtgatagtccttcacctccagcctcagtccaggcagggacaagcaacgcacctgcatcgggaaagcaaaactcagcaattgtggtcgacctccgcttgcagcctattggccagaggcaggtcacgtgaccactaggtggggtggtaatctggaaagcgttgggcgcactgctgtccctggacaaaatccagattcttgttagtgaggcagatgagaagaacggatgctggcaggcaaagagcagtgtct

SEQ ID NO: 56066 - DNA, 154 bp, Homo sapiens
aacaaaaaagaagtaaaggtaaagagtcaaaagtagtttaacatagttaagagctttgactctgaacaacaaaagcacaatggccctggaaaaataaaatgcaatctctcgctataatgaaatattattcaaccataaaaaggaatgacatact

SEQ ID NO: 56067 - DNA, 217 bp, Homo sapiens
cggagagagactgtgagtctagtaagtgcttgggagttagactctcctttcctgatgccagcttagagtcagggcctggggcagttttccttcagtagagttagttgcagcccctcccctccttcatttacaactttttctgaattggggggtacctgatggtgctctaggacctgttcatctgttcatagtaaattggtgggtctgaagatggaca

SEQ ID NO: 56068 - DNA, 336 bp, Homo sapiens
gcggcacgaggaaaattccaggctgtcaaagggaattgttaagtgtgcacgttgctcaacggatccatccctctccactttctccacaaaaccaggtgaccacaccttcccctcctaccctaccgaaccacgggacctaggtccccaggaacagctgtatgtgtaagagaaagccacttggaggggctaccgtgctgggagtgtgggtgcgcgtgggtcccggggagctatctgcaggctcgaagtccactttcacccaagcccctggcaactggctgtccgggctgcttcctcacaccccggtgtcttcctattttgccccgattgtcagactcc

SEQ ID NO: 56069 - DNA, 473 bp, Homo sapiens
cttcggaaccgccccggaattcccgggttggaggaacacagccagctcctggtgaccccacagggagagagcgggagcactaaggattccaaactcagtcctcctgatcttcatcaggattcgtcattggccaaaaaataactgaaattcaaagggcaagagagctcattgttatctaaacaggtcagcatggcaaacagcgaggcgaagagggaaggaaggtggatttggaagaacaaacgggagtgacctagtgcagccctgataaacccgctgggagctaccaaagtatttgaccttgggcacagctggggtggccccgatggcgctgctgtctgctgatggtctccacagcttccccagcgaggccttcctggaaggagtgctgagcaacaaagctctgtggtcacgactcaagacaaaggggaaccagctgaacagagcctttcatgtgacaacaaaaaacgacctgg

SEQ ID NO: 56070 - DNA, 61 bp, Homo sapiens
catcgctgtagccatgggaatccggtttcattattatggtagcaatatggagtgctgtatt

SEQ ID NO: 56071 - DNA, 127 bp, Homo sapiens
tctgcatttgttttctaagaaaaatggtctccagcttcattgatgttattgcaaaggacgtgattttttttttaatggccacagagtattccatgatgtttacgtaccatattttgttttgactaaa

SEQ ID NO: 56072 - DNA, 379 bp, Homo sapiens
tgttaaccaagttttaaaagttcaaattccccaaaaaggcttgtccaaggctggccccagatgtgtgggtctgacccacaccagccctgtgtcctgtcctttcagtcatttgtccctgcgtaattttaatcgtattccaaagcccaattatgtgatggttttcaggtttctgcaaattacagaagagccagccaagatcacccaggagcttgtgcccccagatgggccaaagaaagagcctatgaaggagaagcagaagcagacggctggcctggctcaccttcccacgccagtggggcaggggtctgcttcaggaaatggaagctgtccaggaaatgagcagagattcacaagacagcactttgattctatgttgagt

SEQ ID NO: 56073 - DNA, 335 bp, Homo sapiens; identical to SEQ ID NO: 41835

SEQ ID NO: 56074 - DNA, 339 bp, Homo sapiens
  misc_feature (1)...(339): n = a,t,c or g
gnnnnnnnnnnnnnnnnnnnnnnnnnnnnnnnnnnnnnnnnnnnnnnnnnnnnnnnnnnnnnnnnnccctgcaaacgcgccgtattaagaacccaggggccaaggacaacttggccacactgcaaagaagtgagtgctggatttgtttaaaagccgcggagcaagagatccagggaataaacacatccaacactcttttggtaaacatttgctcatggttcctctctcaccgtacacatgaaagtgtggacttggccaagctggttttctgggctaacgcccagaacattctgccaagcccaccttgtagccctctnatgcctcaaatnctgttnttcc

SEQ ID NO: 56075 - DNA, 377 bp, Homo sapiens
gctgagttagttggaacagaattcaagctccctgcactagtccacccacttgccccagcagcagaacttccagccttctgattacttaaactggctgcaacaaagtgactcttgtactgtgactggaaagctgctttcattgccgttagtcgatctcccatagctcctgtggaaggcttgtaggcctcataattgctcattacattgttatttcctcgatccatgttctcagagcccaggccaggccgctccctgtagcctaggcctcctccaccaatgttcagcttttttcctttccctcctttgaatcgagatttccgaaaccaggcattctgcattgccagatctaggagttccttagaaacgtgttgattggc

SEQ ID NO: 56076 - DNA, 40 bp, Homo sapiens
aaacagtacaaaaacatgtagtgaaaaatatttcttccag

SEQ ID NO: 56077 - DNA, 112 bp, Homo sapiens
gctgtatccctgtcattatttgttgtgtgactgtgtagtctaggttgtgaattttaaaggatagttatgtttactaaaaacaagttgttgaagttctgactttttggttttt

SEQ ID NO: 56078 - DNA, 372 bp, Homo sapiens
  misc_feature (1)...(372): n = a,t,c or g
ctggaagtcacagtgattccttattgttaggaaagtttcaggtcctctaaataacactttcaatgattcagtgtcctagctccagatcatctgtttaacttaatgaaaattcggtatacaagtagcttccacagcaaaaattccaaagcagtgaaggaaaactagagtcagggcaaccaagttaactaaactctgttagctgtttgccttttcctttttgggtcagtattgtccaagttggctctaatgatatgcatacatattggtatatgcaacaaaggtagtgaaggattttcatgaaagtttttttgggggctagaactcggttcttgggctggtattctgtaaatgntatcaaatactaccacatat

SEQ ID NO: 56079 - DNA, 2574 bp, Homo sapiens
attaaacctctcgccgagcccctccgcagactctgcgccggaaagtttcatttgctgtatgccatcctcgagagctgtctaggttaacgttcgcactctgtgtatataacctcgacagtcttggcacctaacgtgctgtgcgtagctgctcctttggttgaatccccaggcccttgttggggcacaaggtggcaggatgtctcagtggtacgaacttcagcagcttgactcaaaattcctggagcaggttcaccagctttatgatgacagttttcccatggaaatcagacagtacctggcacagtggttagaaaagcaagactgggagcacgctgccaatgatgtttcatttgccaccatccgttttcatgacctcctgtcacagctggatgatcaatatagtcgcttttctttggagaataacttcttgctacagcataacataaggaaaagcaagcgtaatcttcaggataattttcaggaagacccaatccagatgtctatgatcatttacagctgtctgaaggaagaaaggaaaattctggaaaacgcccagagatttaatcaggctcagtcggggaatattcagagcacagtgatgttagacaaacagaaagagcttgacagtaaagtcagaaatgtgaaggacaaggttatgtgtatagagcatgaaatcaagagcctggaagatttacaagatgaatatgacttcaaatgcaaaaccttgcagaacagagaacacgagaccaatggtgtggcaaagagtgatcagaaacaagaacagctgttactcaagaagatgtatttaatgcttgacaataagagaaaggaagtagttcacaaaataatagagttgctgaatgtcactgaacttacccagaatgccctgattaatgatgaactagtggagtggaagcggagacagcagagcgcctgtattggggggccgcccaatgcttgcttggatcagctgcagcaagttcggcagcagcttaaaaagttggaggaattggaacagaaatacacctacgaacatgaccctatcacaaaaaacaaacaagtgttatgggaccgcaccttcagtcttttccagcagctcattcagagctcgtttgtggtggaaagacagccctgcatgccaacgcaccctcagaggccgctggtcttgaagacaggggtccagttcactgtgaagttgagactgttggtgaaattgcaagagctgaattataatttgaaagtcaaagtcttatttgataaagatgtgaatgagagaaatacagtaaaaggatttaggaagttcaacattttgggcacgcacacaaaagtgatgaacatggaggagtccaccaatggcagtctggcggctgaatttcggcacctgcaattgaaagaacagaaaaatgctggcaccagaacgaatgagggtcctctcatcgttactgaagagcttcactcccttagttttgaaacccaattgtgccagcctggtttggtaattgacctcgagacgacctctctgcccgttgtggtgatctccaacgtcagccagctccccgagcggttgggcctccatcctttggtacaacatgctggtggcggaacccaggaatctgtccttcttcctgactccaccatgtgcacgatgggctcagctttcagaagtgctgagttggcagttttcttctgtcaccaaaagaggtctcaatgtggaccagctgaacatgttgggagagaagcttcttggtcctaacgccagccccgatggtctcattccgtggacgaggttttgtaaggaaaatataaatgataaaaattttcccttctggctttggattgaaagcatcctagaactcattaaaaaacacctgctccctctctggaatgatgggtgcatcatgggcttcatcagcaaggagcgagagcgtgccctgttgaaggaccagcagccggggaccttcctgctgcggttcagtgagagctcccgggaaggggccatcacattcacatgggtggagcggtcccagaacggaggcgaacctgacttccatgcggttgaaccctacacgaagaaagaactttctgctgttactttccctgacatcattcgcaattacaaagtcatggctgctgagaatattcctgagaatcccctgaagtatctgtatccaaatattgacaaagaccatgcctttggaaagtattactccaggccaaaggaagcaccagagccaatggaacttgatggccctaaaggaactggatatatcaagactgagttgatttctgtgtctgaagtgtaagtgaacacagaagagtgacatgtttacaaacctcaagccagccttgctcctggctggggcctgttgaagatgcttgtattttacttttccattgtaattgctatcgccatcacagctgaacttgttgagatccccgtgttactgcctatcagcattttactactttaaaaaaaaaaaaaaagccaaaaaccaaatttgtatttaaggtatataaattttcccaaaactgataccctttgaaaaagtataaataaaatgagcaaaagttgaa

SEQ ID NO: 56080 - DNA, 3972 bp, Homo sapiens
attaaacctctcgccgagcccctccgcagactctgcgccggaaagtttcatttgctgtatgccatcctcgagagctgtctaggttaacgttcgcactctgtgtatataacctcgacagtcttggcacctaacgtgctgtgcgtagctgctcctttggttgaatccccaggcccttgttggggcacaaggtggcaggatgtctcagtggtacgaacttcagcagcttgactcaaaattcctggagcaggttcaccagctttatgatgacagttttcccatggaaatcagacagtacctggcacagtggttagaaaagcaagactgggagcacgctgccaatgatgtttcatttgccaccatccgttttcatgacctcctgtcacagctggatgatcaatatagtcgcttttctttggagaataacttcttgctacagcataacataaggaaaagcaagcgtaatcttcaggataattttcaggaagacccaatccagatgtctatgatcatttacagctgtctgaaggaagaaaggaaaattctggaaaacgcccagagatttaatcaggctcagtcggggaatattcagagcacagtgatgttagacaaacagaaagagcttgacagtaaagtcagaaatgtgaaggacaaggttatgtgtatagagcatgaaatcaagagcctggaagatttacaagatgaatatgacttcaaatgcaaaaccttgcagaacagagaacacgagaccaatggtgtggcaaagagtgatcagaaacaagaacagctgttactcaagaagatgtatttaatgcttgacaataagagaaaggaagtagttcacaaaataatagagttgctgaatgtcactgaacttacccagaatgccctgattaatgatgaactagtggagtggaagcggagacagcagagcgcctgtattggggggccgcccaatgcttgcttggatcagctgcagcaagttcggcagcagcttaaaaagttggaggaattggaacagaaatacacctacgaacatgaccctatcacaaaaaacaaacaagtgttatgggaccgcaccttcagtcttttccagcagctcattcagagctcgtttgtggtggaaagacagccctgcatgccaacgcaccctcagaggccgctggtcttgaagacaggggtccagttcactgtgaagttgagactgttggtgaaattgcaagagctgaattataatttgaaagtcaaagtcttatttgataaagatgtgaatgagagaaatacagtaaaaggatttaggaagttcaacattttgggcacgcacacaaaagtgatgaacatggaggagtccaccaatggcagtctggcggctgaatttcggcacctgcaattgaaagaacagaaaaatgctggcaccagaacgaatgagggtcctctcatcgttactgaagagcttcactcccttagttttgaaacccaattgtgccagcctggtttggtaattgacctcgagacgacctctctgcccgttgtggtgatctccaacgtcagccagctcccgagcggttgggcctccatcctttggtacaacatgctggtggcggaacccaggaatctgtccttcttcctgactccaccatgtgcacgatgggctcagctttcagaagtgctgagttggcagttttcttctgtcaccaaaagaggtctcaatgtggaccagctgaacatgttgggagagaagcttcttggtcctaacgccagccccgatggtctcattccgtggacgaggttttgtaaggaaaatataaatgataaaaattttcccttctggctttggattgaaagcatcctagaactcattaaaaaacacctgctccctctctggaatgatgggtgcatcatgggcttcatcagcaaggagcgagagcgtgccctgttgaaggaccagcagccggggaccttcctgctgcggttcagtgagagctcccgggaaggggccatcacattcacatgggtggagcggtcccagaacggaggcgaacctgacttccatgcggttgaaccctacacgaagaaagaactttctgctgttactttccctgacatcattcgcaattacaaagtcatggctgctgagaatattcctgagaatcccctgaagtatctgtatccaaatattgacaaagaccatgcctttggaaagtattactccaggccaaaggaagcaccagagccaatggaacttgatggccctaaaggaactggatatatcaagactgagttgatttctgtgtctgaagttcacccttctagacttcagaccacagacaacctgctccccatgtctcctgaggagtttgacgaggtgtctcggatagtgggctctgtagaattcgacagtatgatgaacacagtatagagcatgaatttttttcatcttctctggcgacagttttccttctcatctgtgattccctcctgctactctgttccttcacatcctgtgtttctagggaaatgaaagaaaggccagcaaattcgctgcaacctgttgatagcaagtgaatttttctctaactcagaaacatcagttactctgaagggcatcatgcatcttactgaaggtaaaattgaaaggcattctctgaagagtgggtttcacaagtgaaaaacatccagatacacccaaagtatcaggacgagaatgagggtcctttgggaaaggagaagttaagcaacatctagcaaatgttatgcataaagtcagtgcccaactgttataggttgttggataaatcagtggttatttagggaactgcttgacgtaggaacggtaaatttctgtgggagaattcttacatgttttctttgctttaagtgtaactggcagttttccattggtttacctgtgaaatagttcaaagccaagtttatatacaattatatcagtcctctttcaaaggtagccatcatggatctggtagggggaaaatgtgtattttattacatctttcacattggctatttaaagacaaagacaaattctgtttcttgagaagagaatattagctttactgtttgttatggcttaatgacactagctaatatcaatagaaggatgtacatttccaaattcacaagttgtgtttgatatccaaagctgaatacattctgctttcatcttggtcacatacaattatttttacagttctcccaagggagttaggctattcacaaccactcattcaaaagttgaaattaaccatagatgtagataaactcagaaatttaattcatgtttcttaaatgggctactttgtcctttttgttattagggtggtatttagtctattagccacaaaattgggaaaggagtagaaaaagcagtaactgacaacttgaataatacaccagagataatatgagaatcagatcatttcaaaactcatttcctatgtaactgcattgagaactgcatatgtttcgctgatatatgtgtttttcacatttgcgaatggttccattctctctcctgtactttttccagacacttttttgagtggatgatgtttcgtgaagtatactgtatttttacctttttccttccttatcactgacacaaaaagtagattaagagatgggtttgacaaggttcttcccttttacatactgctgtctatgtggctgtatcttgtttttccactactgctaccacaactatattatcatgcaaatgctgtattcttctttggtggagataaagatttcttgagttttgttttaaaattaaagctaaagtatctgtattgcattaaatataatatcgacacagtgctttccgtggcactgcatacaatctgaggcctcctctctcagtttttatatagatggcgagaacctaagtttcagttgattttacaattgaaatgactaaaaaacaaagaagacaacattaaaacaatattgtttctaaaa

SEQ ID NO: 56081 - DNA, 330 bp, Homo sapiens
gaataaatccatttgtcaggtatttttttaagtgcctcctgagtaggctattcctcaggacaccataagaataataaaggaaagatcaatgtataaaactgagaaaaaggatttttaaacaacaaagtttgctgaggccaactttgtgtatggttctacactgggctggaaagatgacatggaagctgtgcttgtaccgcatcctgggctgtcattctctctgagctggtgcaagttggacatcagagaacataaacagatatcactcatctagcactcaggacaggccttttggctccacctttgtggtggatgctggaaggcagtggg

SEQ ID NO: 56082 - DNA, 633 bp, Homo sapiens
  misc_feature (1)...(633): n = a,t,c or g
ccgcatacgaggtgctcacggccgagcagattctacaacacatggtggaatgtatccgggaggtcaacgaggtcatccagtgcatattgggtacttccagaagtatganttcagtgatgcaaaggacaggcgggctgcagcagcaaagaatccagcaactatcacaagantactccttagccacttcaattgggataaagagaagctaatggaaaggtactttgatggaaacctggagaagctctttgctgagtgtcatgtaattaatccaagtaaaaagtctcgaacacgccagatgaatacaaggtcatcagcacaggatatgccttgtcagatctgctacttgaactaccctaactcgtatttcactggccttgaatgtggacataagttttgtatgcagtgctggagtgaatatttaactaccaaaataatggaagaaggcatgggtcagactatttcgtgtcctgctcatggttgtgatatcttagtggatgacaacacagttatgcgcctgatcacagattcaaaagttaaattaaagtatcagcatttaataacaaatagctttgtagagtgcaatcgactgttaaagtggtgtcctgccccagattgccaccatgttgttaaagt

SEQ ID NO: 56083 - DNA, 353 bp, Homo sapiens
cactcgctggtgatgatgtcctgtcacatggcttattgctgtgataaataccatgcccaattatctcttccatgttgccatggtttccatattgctacactcttctgtatgttcgcttatatgattttccctccgaaagttcccatggtgcacggtgctacgccagccactgtgtccgcagcaacaacatctgccacaagtgttcccttcgctgcaacagccacagccaaccagatacccataatatctgccgaacatctgactagccacaagtatgttacccagatgtagaattttcatcactaaacaatcatgctaaagaggaaaggacagtgtgcttggttagagtaaag

SEQ ID NO: 56084 - DNA, 355 bp, Homo sapiens
  misc_feature (1)...(355): n = a,t,c or g
tctcgaggatccgaattcgcggccgcgtcgactgtcccttaaaatatgccaaaaaaaatagctgactgtcnnnnnnnnnnnnnnnnnnnnnnnnnnnnnnnnnnnnnnnnnnnnnnnnnnnnnnnnnnnnnnnnnnnnnnnnnnnnnnnnnnnnnnnnnnnnnnnnnnnnnnnnnnnnnnnnnnnnnnnnnnnnnnnnntnntcaaangngggggcggcccnttgnanncccaaatantcaggaanntgaggcaggaaaatccnttgaatccnggaggcggantttgcagnaagtaaaaattttgccantgnttnaancntgggntacanagcannatttntnaccaaaaaaaaa

SEQ ID NO: 56085 - DNA, 309 bp, Homo sapiens
gagccaccatgccgggccagaaatttttttttttcttttcatttgagatggtcttgctctctcaggctagagtgcagttccactcactgcaatctgaaactcctgagctcaagggagcagttagtatgattatttagcttctgaaagatactttatatccaaatcatatggaggcttaatttacattgagcaattaaagattgatcttgaataattcataattcttccacagtaaaaataaaatgattcctggctagttattttcttaaaaataaaaaaaatttgaaaacctcccaaaaaaaaaaaaaa

SEQ ID NO: 56086 - DNA, 132 bp, Homo sapiens
cacccaggcacattcctcccttctgcccctctcagggccccttcccaggtccctgatctccaggcttggcctccagagcagcccacaccacccccaaaataaaaaaatgtatatattcaaaaaaaaaaaaaa

SEQ ID NO: 56087 - DNA, 579 bp, Homo sapiens
  misc_feature (1)...(579): n = a,t,c or g
aaaaaattttttttgagttataaggttcttttttaaaaacagtatcttgctgtcacctaccctggagtgcaatagcacaatcctaatgaactgcagccttaaactcctgagttggagatcctcccacctcagcctttcggttgccaagactacaggcacatcaccacgcctggctcatttgagaannnnnnnnnnnnnnnnnnnnnnnnnnnnnnnnnnnnnnnnnnnngtccttggtctcatgtgatccttctgcctggactgggattacaggtgtgatcaccatgcctggcctagaatttaataaaaattctgagatttcctttgtgtagcagatgttgaatgttactgttattggctgtcactgtatttgaaggatttgtatgtgtaccctctgttgagttttggggacatagcagtgatccagatgacttcaggtcttgccttcatggacctgccagcctagttggggagaaggactgggcccaataccagaagctgatccaaagtggtcagaaactgggggaaggagacctggtgagctgaaaccagggtaaaaggaagtatccagaccagagg

SEQ ID NO: 56088 - DNA, 359 bp, Homo sapiens; identical to SEQ ID NO: 44881

SEQ ID NO: 56089 - DNA, 381 bp, Homo sapiens
gactgaaaattggaagggggcactggaagagtatattgttaaaattttatgggaagaaaagatacaattatacctaggcactagatatttctgtaaatccatagctgtacagttgctcccattggagaagcatgaaggcattcttaggcagacattctgtcagtttctatctctctctttccaaaatcaaataggagtgatttttttatcgtgtttaattgagatgcaattaaaatgtacagtagttatgacagttgtatacaccctatggccatcacccaaaacaagaaatagaacacttctgagccaggcgcggtggctcacgcctgtaatcccagcactttgggaggctgaggtgggcggatcacctgaggtcaggag

SEQ ID NO: 56090 - DNA, 60 bp, Homo sapiens
caacccttattttttatagagacagggtcatgctctgtcacccagactggcaatcataac

SEQ ID NO: 56091 - DNA, 408 bp, Homo sapiens
aaaagttacataaagggtactaagtgtccatttaaatacctataataacgcactagagaaaaaaaagcactgaccttgagaggtgttcattgtactcttccaggaggcagttattgcacattctagtgtatagcattttcagttcatttttagcttttgttgactaatgctttgctacccaagtccttcctttttatttgtttgtgttctgtgaatagaagttggaaagcttgttttcagcctgcccgagtgtttacatttttatttggcatttcagcctctctataacaatacatagattgtatgtggaagtgccatttagttacagatgcagaaaagcttgcagatacttgttcaggcaaagtgaaaagtaaagtagcattttaccccgagtccaaaaaattatcc

SEQ ID NO: 56092 - DNA, 137 bp, Homo sapiens
gtttctgtttaactacagtgactcttccaacgcacccctctacaaacatcagcaagaagtccaaagtttctttgtggttatggctttgatttctgtgccgtggatgcttctgattaagccgtttattcttagagcca

SEQ ID NO: 56093 - DNA, 1971 bp, Homo sapiens
ctgacttctgagaaggttgcgcaagctgtgcccggcagtctagaggcgcagaagaggaagccatcgcctggccccggctctctggaccttgtctcgctcgggagcggaaacagcggcagccagagaactgttttaatcatggacaaacaaaactcacagatgaatgcttctcacccggaaacaaacttgccagttgggtatcctcctcagtatccaccgacagcattccaaggacctccaggatatagtggctaccctgggccccaggtcagctacccacccccaccagccggccattccaggtcctggcccagctggctttcctgtcccaaatcagccagtgtataatcagccagtatataatcagccagttggagctgcaggggtaccatggatgccagcgccacagcctccattaaactgtccacctggattagaatatttaagtcagatagatcagatactgattcatcagcaaattgaacttctggaagttttaacaggttttgaaactaataacaaatatgaaattaagaacagctttggacagagggtttactttgcagcggaagatactgattgctgtacccgaaattgctgtgggccatctagaccttttaccttgaggattattgataatatgggtcaagaagtcataactctggagagaccactaagatgtagcagctgttgttgtccctgctgccttcaggagatagaaatccaagctcctcctggtgtaccaataggttatgttattcagacttggcacccatgtctaccaaagtttacaattcaaaatgagaaaagagaggatgtactaaaaataagtggtccatgtgttgtgtgcagctgttgtggagatgttgattttgagattaaatctcttgatgaacagtgtgtggttggcaaaatttccaagcactggactggaattttgagagaggcatttacagacgctgataactttggaatccagttccctttagaccttgatgttaaaatgaaagctgtaatgattggtgcctgtttcctcattgacttcatgttttttgaaagcactggcagccaggaacaaaaatcaggagtgtggtagtggattagtgaaagtctcctcaggaaatctgaagtctgtatattgattgagactatctaaactcatacctgtatgaattaagctgtaaggcctgtagctctggttgtatacttttgcttttcaaattatagtttatcttctgtataactgatttataaaggtttttgtacattttttaatactcattgtcaatttgagaaaaaggacatatgagtttttgcatttattaatgaaacttcctttgaaaaactgctttgaattatgatctctgattcattgtccattttactaccaaatattaactaaggccttattaatttttatataaattatatcttgtcctattaaatctagttacaatttatttcatgcataagagctaatgttattttgcaaatgccatatattcaaaaaagctcaaagataattttctttactattatgttcaaataatattcaatatgcatattatctttaaaaagttaaatgtttttttaatcttcaagaaatcatgctacacttaacttctcctagaagctaatctataccataatattttcatattcacaagatattaaattaccaattttccaaattattgttaggtaaaggaacaaaatgattctctcccaaagaaagacacatttttaaatactccttcactctaaaactctggtattataacttttgaaagttaatatttctacatgaaatgtttagctcttacactctatccttcctagaaaatggtaattgagattactcagatattaattaaatacaatatcatatatatattcacagagtataaacctaaataatgatctattagattcaaatatttgaaataaaaacttgatttttttgtaaaatat

SEQ ID NO: 56094 - DNA, 6351 bp, Homo sapiens
tttttttttttattccagagaagtttgtatttgggccttaagcttttgaaaataaagtttagagacatagcatatgaataccactgtaatacacatgaaatattctatcagaccctaaaaattaacataaacttttaactttctcatagtcaacaaaatagtggctggttgccaattttattagataagttggttacagcattttaattatcattttacgtctatctaggtgtagctgaaattcaaaatgcacatcaaagtaaaactatatcacaactcaatgccatactaaatgtacttgggcctctgcaatagaattctagtcagacttcattttttactcccttcttatgacccaagtggctttaacaggaatgcaggacttagtgctgatcatcacacaacataccactttctttttagaacctctacaaaattttgaggggagatggtggcattagccctgtggaacagatcttgatcacctcaataacactggcccattatctgtccagcagaacccattgtgaaatagtacaaggtgcacagcccttcactgattacaggcaagtgttacagtagcctagccataaggaaggggagttacatcatagtacaaaatacagtataaaagcgttatttaacattccacactgaagattactctgatgccttcaaacagtcgtttggatgttagccacttaaacaaatacatcactaaggtaaacaatataaacataccaaaaccctgtatggttaaatacaatttccatggtacaaaaatcaaagcctggagatgtttttacagattgctttttacacaatgtcttaaattgccaaatatttacaacattaaagaggaaatacattgtgatgcagagtaaaattctgaaatgattattataaaacctcaatctatctacgtgaggcactccctgaagcaagtggcattagcccatgaggtcctttggtacaaggcccattgcttgaagaaccacagtagctgctgtggctttagcatgcttcttattagggctggcaaagctgggctggtaagcgcttccatttatcaatacctattcaagaaaaacatacaattgggctggtaagggcttccatttctcaataccctaaagagaaaatgtttgcgatgatcagggccactatcatggaccaatagaaattcaggtggttgccaccttcttttattacagatctccatcaaagcagacacaggatgtttgcctgacagatctttcattgcagcagagaagttcccagacctcttttgtgctctttctcctactgcaacaagaccttttcggtctgtcttaaaatcaactaggatgggttccttgttgccttctttgttttttcctaatccttctccttctctccagcccatttttctcatcaaaacggctcccattcctccagttaccggggctgctcttaagaactgatcctttttaatccaggcttgggcaccagtattggccaactgttcttgtgtcaaaacctgtactcctgtacttcctgtgaactggcccaggaatagagttcagctgagccccaggcatcaatcctttcctgagctctatttaacatgctcatggcttcaagatcaaatgcattctcactgagtcttttctgagcaagtgcccgttcactcattgctgtagagatgtccacaggctctgagggcaaattgctgctgaaaacattatcatcatctttgttttcttcaccatttttctccacaggaacccattctccataaacactatccgcttcttttttccgatgttgagatccagatgatacagggaattcttttgttaatgttacctggctttttggtggagttggttttgctgcagcaatattcagattgaaaaaaataggtttgggttcactgagtttaaagggatgatgataaaaaggaggttcttcttcctcttcatccgaaacatgaggtttattcactattacatcatcatcttctttactctgtgcgatctgtttacatttctcagttagttcttctatagtagctcctcctgactttttagcaactttctcttctatagtaggtggaggtgcaggctttaggtttggtggtaaagggacaccagccttagcacacatggcagctgcattagctttggctatttcaagtaattgagccttatccaaatctgtcagacgtttgggtgatctgcctcgttcagaagacctggatcttttacgacggatgggagatctgctaaaccttcttcttaagggtgttcttgatcgccttaatctgactggtgagatactgaagcttcgtcttcttaccacagaccttgatcttctccggcggcttggggtgcggctccgacggctaggggtgcggctccggcggctgggggtgcggctgcggcggctgggggtgcggctgcggcggctgggggtgcggctgcggcggctgggggtgcggctgcggcggcttggggaaatgctaaagctccttcttctacccacagatctagaccttcgtcgacgacttggagtatgactccgactccgacgacttggggttcgacttcgagctctaactgtctttcggttatccctggagcttgatctttttctttttctttccctagacttggatctgtgctttggagatcttttgcgcttctcttttgatacagatcttcttcctctagactttgatcttgatctgctgcttctcctcctgcgtcttgaacgtgaccgtgaacgtgtctgagagcgatgagacttggacttagatgatctctttcttgccctagaacgagattcactggtacgcttgcgtgatttgtgttcagaagatttggaacgcttacttcgagatcttaatgaagagtctcttttcttctctttctcccccttatcacggttcttatttttcttgcttttttcgtgagtgtccttaacttttacaaaaatttcataatcatctttttcctctgaagaagactctgaagctctttctggcatactacttacaaccgggctggcagcagatctgtcacgtccaacatcacttgcaagtaaaggtccttcaatgccagctctaaggcttgtaagacgttccatgtccttaggaagtaacggtctcactaaatctgcttcattaatatcctcaatattggcagaaaatcctgaatcaggcagtgtctctttaggagggggaggtacttctttttctcctccactactttctttagggctgagcagagctgctaatgtctggtcactctcttttacaggtaatggttcttctgtatccttactaacaaggttattattagatggtaaatcaagatgaatatctttagcaggcaaaggcccttcaatgtcagcttcactaccaccactaggactggtggaaattattaccatgtcatgttcagtatcttgagtagttaaagataaatcaacatcatatttattaactaaactgagagtagatgctgtggtaaattcaatacccttactagttcctgttgcatcaggttccagagcaaaaggaccagtagaagatagagtttctcctgcatcagcttcactaacaccagggtaggtatccaatactgtgcgctgtttagtctcactggtgggcaaaattttctcttcaccaatttccccaacaggactagtaccagcagcacacactgtattatgttccatctctttagcaattaaatgactatttatattaaggtctatatttataccatgttcactttcgtaaaagtcacctttcaggtgttcctcagcatgtggttcttcacctgaatgcaatgcaatctcctgcatgccaatctctggagcaagaatttgatcaccagaggatagattaattcctttcataacatgtgatgacatgatactagattccagtatcattggtgtggactctatagccacctcagttggtattacttgagtctgctctgagactgtgacagcaggctctgaaactgtcacagtcgattcctggacagaaacagatggttctgaaacaatcatagaaggttgaaggactgacaccgctggttccagaacaggcacagaaggctccagcgcagaaacaactggcacaggaatggtaacagagtctggctcagccacaacaggaggctccgggacagtcacaaccgaaggctccaggacagttacagtcgaagactccaggacagtcacagtcgaagactccaggacggtcacagccgaagactccaggacagccatagctgaagactctggggcagccatggctggcggctccagaatgctctctgccagcactggagtagttactgctggaaccaacaaggatgtagatacttctgaggcaacatgtcctgaggctctcatggaatcaaatgtttctgctgtctctgacataacaggaggctctgatgctaacacagttggttcagctgacatggcgggagtttcagataccatacaagtcactggtctctctggaacaacttcatgttcttctgctactactgcagactctacaggtgttaacgtaattgaagattctggctctggtggtggttctggaacagtcacagcagcctctgatactaaaactgagggatctgatgctgacactgaataatcagtaggcactgctgaaggctccgaaatctcactttgactcacaggaggctcaggctgcgatacagactcttcagatggtaatgatggcacctctgtaggccaagtattttcagctgttaatgctgactgctcagtgggcaatgctggaccctctggtggttcctcaggaggcaatggtggtgtcattggtggctcctcaggtggcaacggtggcattgttgggggctcttcaggaggcaaaggtggcaccatatatgcctctgtatatgtgtcagtgtaagaatcggtgtaagaatcagcagccatagacatcattgaacgatcagcagtataagatgacatcatagatcggtcagctgcagagtacgatgacatcatagaccggtcagcagcagagtatgacgacatcatagaccggtcagcacccatggacatcatagatcgatcagccattggggacatcatggagcgttcataagctgacatcatggagcgttcataagctgacatcatagagcgctcagccataggggacatcatagagcgctcgtaggctgacatcatagagcgctcgtaggctgacatcatagagcgttcagccataggggacatcatagaccgctcataagacatcatagagcgttcgtaagatgacatcatggaacgttctgcagcataggacatcatcatagaacgtctagatgctaacatcaggggtctaggtgctaacctatatggcctgggtgctattctataggacctgggtgctatcctgtagggtctaggtgacatcctatagggatcaggagttagtctgtagggatcatggcctaatctataagggtcttgtcctaacctgtaagcatcatgacctaatctataggggtcatggcccaacctatagggatcctgagctaacctgtaaggatcctgagctaacctatagggatcaggagattttgaacccaacatagcagaatcttgggtactagacgctaacatctgggcatccatggtaccagacgctaacatctgagcatccatggtgccagaagctaacatttgagagtccatagtgccagatgctaacatctgggaatccattgagctagttgctaacatctgggagtccatggtgctggttgctaacatctgagaatccatggtgctggttgctaacatctgggagtccatggagctggttgctaacatctgggagtccatggagctggttgctaacatctgggagtccatggagctggttgctaacatctgggagtccatggaactggttgctaacatctgggagtccatagtgctagttgctaacatctgggagtccatggagctagttgctaacatctgggagtccatggagctagttgctaacatctgggagtccatggtgctagacgctaacatctgggagtccatggtgttggatgctagcatctgggagtccatggtgttggacgctagcatttgggagtccatggagctagttgctaacatctgggagtccatggtgctagacgctaacatctgggagtccatggtgttggatgctagcatctgggagtccatggtgttggacgctagcatttgggagtccatggtgttggatgctaatatatgggtctccatggtgttagaagctaatatatgggattctggggccat

SEQ ID NO: 56095 - DNA, 335 bp, Homo sapiens
gccacccgccctgcctcagcactttgggaggctgaggcaggtggatcacgaggtcaggagttcaagaccagtcagggcattgtagccagacctcgtctctgctaaaaataaaaattaaaaaatttaaaaaaattagccaggtgcatgcttatagtcccagccactcaggagatttagcggggaggatcgcttgagcctgagcctgagcctgagcctggcagttgaggctgcagtgagccatgattgcaccactaaactccagcctaggtgacagagtgagaccctgtctcagaagacaaaaataggaaattgtatttatttcatgttagttgttc

SEQ ID NO: 56096 - DNA, 358 bp, Homo sapiens
  misc_feature (1)...(358): n = a,t,c or g
agccagcacacagtgcccggaacacagtaggtactcggctgtttcttgaatgagctgcaggcctctctgaggagacatggatctgagatctaaagtatgagtaggagccggcagataaggagtgggggaagaacattccaggcagggtctaggtcttaaggcaggaaaaaggccaaggtgacataagctcagtgaaaaaggagagtggcgtgaaacgaaactgcatggaaaagccttagggatgtggatggccccagacatcttgcaaaagtttttagattttatcccaaatatgttgggaagctcttgaagaaattgaagcagaggaccatttgtatgcccttctgngatctgccag

SEQ ID NO: 56097 - DNA, 209 bp, Homo sapiens
gattatgctcattttatatactcaaagaaattaattaggctcagagaagttaaatgacataccccaagtgactcagctgatacatgatggaaatgtattttaagttgggcctttaactcctttgctgcctataaccgaagcacaatcttccatgctaatttttttgtcaagtatttctattttttcaacacttaatttttttttttttt

SEQ ID NO: 56098 - DNA, 358 bp, Homo sapiens
  misc_feature (1)...(358): n = a,t,c or g
ggcacgagaaataattttcagcaccctccagttctcttgagacctgtggcagtcaatagctgcccacaaagataattgtcaattatgacttctatcatcataaattagttttgtttttacttaaattccgtgtagaagaaataagcgannnnnnnnnnnnnnnnnnnnnnnnnnnnnnnnnnnnnnnnnnnnnnnnnnnnnnnnnnnnnnnnnnnnnnnnnnnnnnnnnnnnnnnnnnnnnnnnnnnnnnnnnnnnnnnnnnnnnnnnnnnnntaccnncnanctgggcatggtggcacncncttataattccagcntcttgngaggctgcgcagganaatccttganccngggagga

SEQ ID NO: 56099 - DNA, 490 bp, Homo sapiens
  misc_feature (1)...(490): n = a,t,c or g
tcaaatagtagtcttagcaaaatcacacaactcttaattctctggagaaatagcaaaatcacagctcttgtgactactttttaaagagtagtactttagtacaaattttataagaaaataatcactcttgggtctacagactggtgtctattaatcgttgcaaactggttttcatgatgcttatttagaaaatgggtttttgatgtttaatacatacaagagcctttaaaaaatactatatatagnnnnnnnnnnnnnnnnnnnnnnnnnnnnnnnnnnnnnnnnnnnnnnnnnnnnnnnnnnnnnnnnnnnnnnnnnnnnnnnnnnnnnnnnnnnnnnnnnnntagacctcatttctacaaaaaaatttttaaaatgagctggatgtggtagtgcatgtctatgggcatagctactcgggagtctgaggctggaggatcaatgcttgagcctgcttgagtttgaggctacattgagcaatgatcattcc

SEQ ID NO: 56100 - DNA, 318 bp, Homo sapiens
ttttaagacaagagtcttgctctgtcacccaggatggagtgcagtggtgtgatctcggctcactgcaacctctgccactgaactccagcctgggtgacacagcgagagtccgtctcaaaaataaacaaatagataaataaaaaataaacaataggaggaatggcctagttactttccctggttctttgtcctatacctgacaataaactgttaactaccagcacgcagcctggtacaagaaatgaccgcataagtttctttcttcaatcccaaaaagaaaaaatgctggatttgcttcccaggtcgacgcggccgcga

SEQ ID NO: 56101 - DNA, 2248 bp, Homo sapiens
gaaatagaattatgttagagaaattattaaaagtttaattccagtaggccagttggagaaatctgaaactaattggaaaaacttttatgctgtagtctcattagaatcattttaaaagcactgttcttgcatttttcctagactacagagagtgttctttgtcattttttttcctattctgttgtgaagtttattgtttcagttatttgagggaaataacctcttaatatgtttattttcctgaactaaagttttcatgtagagaatacaattaaatgttttgtgttatgacccaaactggctggaagtagagttcagagagggagaagggacaagaatcagtgtgggcatcctcaggaaagtggcgcccagtggctgggctccagccttctccactggcatgatgggtcctcagattctcctctggataatgagggtgttgggcactgtgagctctgacttctggggaggataggccatcatggactccatacacaattttgatgggtatcagttctcataaaatacctgctacaatttatttattttgtagttgtttagaaaactgtgagcagttgggcattagtaaattgtagttatatcttaacgatcttgggaatcattgaaatatgagtttttttccctcactcctatttatttaattaaaaaattagggaagttgttcattcacagctgtatattaatataaaatctctttataaaatgattcagagaaaaggcagtagtggtcacttactgtgctaaaatacctttttttctaaaaatatttaagctttagggtttgtcatagttttactttttaaattatactttgtgtaacaatttacgttaactagaaaaattagatatataataagttttggtactaagaaacatttacattctacactcattagtcaaatgaacttttctttcccagtgctaacagattttgtttcatgtgaagaaaaataaaatacaaatgaaataaaagtctagaaacagcaacaggaaactcaccacagaaataaagacataacccttgataagtttgtgtaagtgccagaattattggaagcaggtgacgaatgattaagaaaagctttattgtggggacatgctttaagaatcagctctgtatttgtgccaaggagatcaggtattggtgtgcaaacagatcccattaatactctgatttgaaccatgaattccacctactctgcgttgaagccctccagtagactgatagatgtaatcaaatgatcagctaccaagtttaattcctttgcctgtgtgcagcaacagttggtagttttacaagttaagttgatggtctggctgcagataagagaaagactcagtgataggtggtttgtgagtgaagtaacttccacactgtcaagagttgacagcatattaattgtgtggcattataattgtgagaaacaaatgagagcaaaatgttaggtcctttgacaagcattttcctcctgtttttaaaaagggctttaagttgtttcctatgtaaggtaatctttcttttttagtattatctaagaaggatggtagattatgtcattttggaaactattgtgtcccttgtattttaaatatttcaggaaaatgcctacgattgttacaaagatgtgtgttttacttataacataagctctgattctccagtggccactgggccttctctgtgctctgtattcaactgcagtatgaattacagaatgctgtgcatgttcgttagtaccaataccatgtgtatgtggtagaagttgtaaccagtttctggatctgtatggtactataaaatacttattttataattctgtaaccgtatggcagtgttatgccaaaaatgtataaagagcaatagtttttgttgcttactgctgtattttaaaatattgtttctaaaataatagagttagagttccttttgagtaattatttttaagaactattgccaaatatacatcctgtaaaactaataaaagccactccatcttagataacattttagcattgtgctagagtacattatggtgattttgcacgattaaaatatttttaaagatggagtggcttttattagttttacaggatgtatatttggcaatagttcttaaaaataattactcaaaaggaactctaactctattattttagaaacaatattttaaaatacagcagtaagcaacaaaaactattgctctttatacatttttggcataacact

SEQ ID NO: 56102 - DNA, 364 bp, Homo sapiens
tctgaactgattacatacaaacaaattcatgcagagagaaaaccacgttagtaatgtgaactgattaaacagcagtgtgctcctagcatacatgcatataggcagtgtagagcagcctgttgctagattttcacccttggaagacaatgcaatttccaggagcgaattttaatgaatgcagagaatgcactagtgccttcggtgattaattacctcatattttatgtcacaataaacatgtaggaaataaacttgatacatccaatgcagaaaagtcttgaaaattttctaagtaactatgtcttgaaaagtatttactgagataaatcttacaaaggagtaggctaggaaagccttctatggg

SEQ ID NO: 56103 - DNA, 329 bp, Homo sapiens
ccacttcggcctcccaaagtggtagaattatagacatgagccaccacatccgaaaaactgcacttttaagtgggaaagaatggacaaggcccccaacacaccttctttagacagactcctctgctgctatatatcagtctctctactgatgacaccagagctctactccaggccagacctctctgctgagcatgagatatataaccaattgcctattagacagtgttagctacatatcccatgatattccaaattcagcatcacagatgcatcttctcaccaccacacaaagaaactgttacttattattaacttagttatgatcaatc

SEQ ID NO: 56104 - DNA, 1580 bp, Homo sapiens
  misc_feature (1)...(1580): n = a,t,c or g
cgaatttggtgcacgacaattatggtaaaaaaacatttgcttggtctaaagaagatcattaatgttttgtgaccatacaagttgtaacagtggattgtttttatgtgtaggtattgttaaatacagggactgtttccaggcacagaatatgaatcgtaagttaggatggacattagatgtgattatgatgataaagcgaaggtctgcggtcctatatctacagacacgtggtgagaaattagaacaaactggagacgggccattgacacatggactctgcctgggcatgttaggttaattctttgactccaagccttaaaatactcacatggagtcagcgctcacctcattcacacaattatcatagagctccctggacactgaacctctaaagggaaaaggtctaccctggagccaggagcatcagggttggcttgggagcatgagaggtgagcccagggctaggcctgggccaggccccggcagcactgctacttgggaggagccacttcacctttgtattagttannnnnnnnnnnnnnnnnnnnnnnnnnnnnnnnnnnnnnnnnnnnnnnnnnnnnnnnnnnnnnnnnnnnnnnnnnnnnnnnnnnnnnnnnnnnnnnnnnnnnnnnnnnnnnnnnnnnnnnnnnnnnnnnnnnnnnnnnnnnnnnnnnnnnnnnnnnnnnnnnnnnnnnnnnnnnnnnnnnnnnnnnnnnnnnnnnnnnnnnnnnnnnnnnnnnnnnnnnnnnnnnnnnnnnnnnnnnnnnnnnnnnnnnnnnnnnnnnnnnnnnnnnnnnnnnnnnnnnnnnnnnnnnnnnnnnnnnnnnnnnnnnnnnnnnnnnnnnncatagaatttggatcctttggtcgggttctcccaaattcttttgaggtgtccatggtcaactgcttcagctttgttttggcaaccccctgcccgaagtcgcatataggctgttcttcaccttgtttccaaggctgaggaacagaaagtagcctctgttttgaggaggtggaagttaagtatacatttattttttactgtgacttgttcaggaccacattttacaaaatgccttgtttccttcattgtttctggaaaggaaagttctattaatattgttttactttgaatatagaatagtttttttaattagggcttattttgaaaaattctgagtttaattcaaatgtatgccaataccttccaaagtaaggtaatattcagagacagttgttgtgatcagatggcttagagaaatttctggaatattcacattcgaagattccttattaatgaatgtctttgacttaaatctaaccaaaaactgcaacattattctttgtacattttcattatatagtgttaacaagcttagttgcaaacaaataaaatacttaagctatttgtttaccttgccttcttaatactgtgataatgtttattaattcaaataacttatgtgagagctgctataaccatttccccagttcaacattgcattgaaaatttatggacctttaaaaaaaaaagcccaacagtgatttttttttaataattaaagaatgattttactttg

SEQ ID NO: 56105 - DNA, 554 bp, Homo sapiens
ttgagccctttttaggcagggaggcatgtctgtcatctagcgtgtggcccagtaagtgattattacattggaatcagtttttcagtcttttaaaataaattctatgccataagaataaaagataaagagcaaaattaatgttaactatttttagcttattataactatgtcaacaagtgtttattaataccctattatgggaaagtcacctgtggttggcattgaaaattacatcatctttaaagcagtatttgtccccagatggactcatcactagcaaagactaggttcattggaaggcatagggtgagagaatgggaagatggagtggaggcgggttgttaaagtgctgtcagtgagtgattttgtctacttgaataatggtccatgtttgggggcatattgtgtttcataagaagtgaaaggtatttgcaaagtaagctacaaatgacccataaatctgttaacaacagtccttaatatgcaaagatgaaaaacaagcattactgctacccaaagggaactggtgcttggtgatgtgcagatggggctgt

SEQ ID NO: 56106 - DNA, 316 bp, Homo sapiens
ggctagagctaaatgaaccaggggccaaatatagggagaaaagtggggtgaggagagggttgcagatatgcagggatcatgtagggtcttatttgcctttatacagactgtgacttttcctttaagtgagaggggaagccttggagggttatgaccagaggaaggacatgacctaaatcttgttttaacagattactgtgctctagggtcccaagtttttcgtttcggttccttacccattctaccctaaaccactactgtgaataggatagaacggcggagttagatgaattggtgcaagccctgacccatgctt

SEQ ID NO: 56107 - DNA, 1423 bp, Homo sapiens
ctacaactcaagcacagccagatcttattaaacctcttcctcttcataaaatttcagaaaccactaatgattcgataatacatgatgtggttgaaaatcatgttgcagaccaactttcatcagacattacaccaaatgctatggatacggaattttcagcatcttctccagccagtttactggaacggccaaccaatcatatggaggctcttggtcatgaccatttaggaaccaatgacctcactgttggtggatttttagaaaatcatgaggagccaagagataaagaacaatgtgctgaagagaacataccagcatcttcactcaacaaaggaaagaaattgatgcattgcagaagccatgaagaggtcaatactgaactaaaagcacaaataatgaaagagatccgaaagccaggaagaaaatatgaaagaatcttcactttactgaagcatgtgcaaggcagtttacaaacaagactaatatttttacaaaatgtcattaaagaagcatcaaggtttaaaaaacgaatgctaatagaacaactggagaacttcttggatgaaattcatcgaagagccaatcagatcaaccatattaatagcaattaaaagaaaatagaatgtggccacttatttcactatcttcttcaaatacaaagtaaatacaagactgttgtgatcttgcattcattttctgacatgcattgttggctatttgaaatactaaaagcaaatctacagatcctttttccatcattttacagtgaccttttcttcattttggtttatttttgtaatgtgaaaagtatcactctaaaaaacatttttaatttaacaaactaaaaatattcctccaaatctcttgcttgtcattgactcttgcgtgtcaatttccctcaggttctattttcttaaaccaacctttaaaattgtcacctctgttaaggttgaactttgccaaaaaaaaaagaagttactttgtaatttttggggaaaaaagcacatacattaaaactaggtaatgttttgtatatacagttattttggatatattattgtaagttgtacaaatgtattttgaagaatatttaagaaaagcacttttgttattccatcaataaatgctctattttactcttgtgtggtttaggaaataatcacatttaaagtaatcatttaaaaacatcctaagataatggaattttaaaggccttgctttttagcattggaaaaatacaccacttgaagttcatgtttgttaagcctaactgtaattacatgttacataatctgcattgcctttttactatatgttcgtagtttttgttggccatgccaacatactcccatttctgcctagattatgggaatgactttgtatggggcagatagacagatactttaaaagctatttaaaaagc

SEQ ID NO: 56108 - DNA, 416 bp, Homo sapiens
  misc_feature (1)...(416): n = a,t,c or g
gggagcgaaggagcagtttgcttctgaagctcagaaaacatgccttttatttttctgaaaggaaaggagaaaaatatatatactaatacataaaaaaagggaaggcttatgcaggcaaaaacaaagccaaagttagaaagtgcctatgtgtaggattctctggagggttccaccagtggatggtctttaggattgaagaatcctttaaggctgctgtgaaaagggtcctcagaggttacccaagccagtttcccttttggccgaatggggagagagacacacagagaggggaggggtgtgtgctggatgacacagcttcctcagcggcaggaactaggatttaatcccctggcatctgacttccaggccttgccccctncaccgctgagagaatgtgtctcataaacaccatccct

SEQ ID NO: 56109 - DNA, 752 bp, Homo sapiens
ggcagtaaagacaggacgcacccatgtcacaagaggagcacaggcaggggtgttggtgttggggcagccctcagggtctccagacccaagccccactcacacagcagcctaggaaggaagggcagagtcccaggtgtcagctggtgggtctcccaggagctgcccctccctggaagtcacaggacaggaatgacagatcagggaactgcaggaagctgccacctctggggtcagaatatgcccagcctgcgggggctctctatcggggtcttcgagagccagacagccctgccttgtgctgcatacctggctttgctctgtgcagaacccagcacacgtgattttgtgtgacatgccagcagcctggctcccaggacaggaggcctgccctgggggaggggctgcaggaggagggggggcaggcacccatgagtctgtccagccttgtcacagatgcatcgcccgagctgcggtcctgatttcagctcacctcagagtaaatcagaataaactgcacccagactttcacgaatgcatgttgacgctttcagttcacccctttctttgctaactttcttcctattttcttctaatgcgagagcttattaattccatatttatcattttgaataacttttctcctttttagtaacaaaatgtacttcactcttagtaaaatgtatttactattttagtaacaaaaatatacttgcctaatcatgtttaaaatatagtgatgtgaaaaattcaaa

SEQ ID NO: 56110 - DNA, 1137 bp, Homo sapiens
tgaacttgtgaaaatcaataaaatgatttattttatatatgcaaaatcaaaatctctttgtacactttaatttttgcaaattcatacaaacataacaatactgctccatataaacttttgtataaacattaaaggaaatatacacatattttgttcttcttgtgcttccaaagcacagaatgtataagtccatctgaagactttctatcatcacatgcaagaacaaatgtcagaggttgggggcagcctcaagtgcactttgtaatgtctctagacaaaagagaagagagttggaggtagattgtttggtgactctccctgccccttcccacagagaaataagttacccaaatagcagcttcttacttctttgattcaaactatcctgaatattgcatggtttaaaaggcacaactaggaattgttgaaaactttgttcagcacacataagattgccatttcctttctgtacacctattctttctgaaggacacagtaagagcaccaagttgtgctccacttgcaggtggcccctcgccactctgagaatgcctggaatggcaaagttcaagtgagtgacctctcattacccgtggtaggggcagtggtgtttaccgaatttagcctgtgaattaataacatcagcttcctcaattgaggaaaacaaaacaaaacaattcatactttaaaaaattattaaggcaaaagcccagctttcactgccagataatcataaaattcaaaagccccactgctgcttcttagcatctggaaagcaattcccctggactcaaacattccaggaggcttcaacaatatcctgttccatcctacagcacagaaaacttgtcatttttttctcactggtctttgcactaacatgatgatctgctgttgatgtgactaatgttgttgtgaaggtggtgggaatttatgttttctagtaccttctcaaggtactgaattaggactcgtcttttaaaccttgcggcttccttgatggtaaattcaacaaactgtttcttcatctccagaggtccttgcacttcttcaagcaaaatgaaaattctttcatattttcgaccaaactttcgaacttccttcattaattgatggtttatatcagcattggattcc

SEQ ID NO: 56111 - DNA, 1101 bp, Homo sapiens
taggaatcctggtctcaggacctcatggaagatgagggggagagagttacaggttggacatgatgcacactatggggccccagcgacgtgtctggttgagctcagggaatatggttcttagccagtttcttggtgatatccagtggcacttgtaatggcgtcttcattcagttcatgcagggcaaaggcttactgataaacttgagtctgccctcgtatgagggtgtatacctggcctccctctgaggctggtgactcctccctgctggggccccacaggtgaggcagaacagctagagggcctccccgcctgcccgccttggctggctagctcgcctctcctgtgcgtatgggaacacctagcacgtgctggatgggctgcctctgactcagaggcatggccggatttggcaactcaaaaccaccttgcctcagctgatcagagtttctgtggaattctgtttgttaaatcaaattagctggtctctgaattaagggggagacgaccttctctaagatgaacagggttcgccccagtcctcctgcctggagacagttgatgtgtcatgcagagctcttacttctccagcaacactcttcagtacataataagcttaactgataaacagaatatttagaaaggtgagacttgggcttaccattgggtttaaatcatagggacctagggcgagggttcagggcttctctggagcagatattgtcaagttcatggccttaggtagcatgtatctggtcttaactctgattgtagcaaaagttctgagaggagctgagccctgttgtggcccattaaagaacagggtcctcaggccctgcccgcttcctgtccactgccccctccccatccccagcccagccgagggaatcccgtgggttgcttacctacctataaggtggtttataagctgctgtcctggccactgcattcaaattccaatgtgtacttcatagtgtaaaaatttatattattgtgaggttttttgtcttttttttttttttttttggtatattgctgtatctactttaacttccagaaataaacgttatataggaacaaaaaaaaaaaaaaaaaagtcgacc

SEQ ID NO: 56112 - DNA, 761 bp, Homo sapiens
gtgaagggacaggcagatatacccaaagagggagaaaatacttaataaaggaagagtatagctgcaaaacaagacatataggagctgaaggccagatatggcagaaaccagctggagaaagaagcacaggacaactaggacaacttagtcaagcacaatctgtcattccagtacggactaccaagttcaattcaggatgcttcagttgaagacatgtggggtaatgtgctcagctcatgagggtccaaggagtccccattttccctatcaccctatcctatgctcgtggtttggattgttagcacactaggcaatttcagagtccgctctagagttgggttgccacgtcagtgcagacagactctagaatcctcttaaccatggaatgcaaggcctgttcctgtggatctatcctgacttgagtatgtcagtactgttgggaaaatgagttcaagaatatttcagtttatatatcctggttgccgtcatatattttctcatttcaccacttgtttgtgtttgcctcactcaacagtcatgggtgtagaagctggtttcagcttggggctgttacaaactccctacataagccatgtagctgcaatccagggttcctcccacctacggctttagcggtgggttctctggccctcttgataacaaatactccagtctaatggctatattaatgctgctcagaggctattaactcaaatccttgatgtgtttcatttacaattatgtggattatttattttagg

SEQ ID NO: 56113 - DNA, 876 bp, Homo sapiens
tttttttttgggagaggattgcctggcagtgtcccaattctaagtgacaaggagaaccctgaccctgtaagttctttaacaaaatggagataatttttatttttgatttgaagatactatgaaatagggagcaccgcaaaaacaaagttgcttaacattcttgaatctaaactgacatgacgggacgtttattaacggccgatctcagaggtggatttttgcctttgtagtggcattcatgcttcttgctattaaatggtcacagaactatcttagaagatttatgtagactcccaaagcaaactgactgtctcctaactgtagtggaaatttagtatgtccaatcatcaactttctgtaagaaaaaagggaaatgtctggatctgtggacagtgggttctgaactgcatgagaaccctggtgaaacgttttgctgtcccagctgcaggcccaaacactgctctcctcactgtagctgataactcactaccccgagaggcacagtgactcatcaactttcagtttggaccaacatctatggatagagaacaaaaaggaaatacataacttatatctcactaagtattcatgaaccaaaaataaattctatttctatgttatatttacacaattagaaaaatctaaaatgagatggtaaagtcatataaactttgtttaagccccactgaaaataaaatgaattgatccctatgattgtcattcttaatttccatggatatttagagccaaacttggctaataaataaactgcttatacacaaaatttagattcaaatacagcattactgtttgatccaatgaaaaagacgtttacaatcagatcattcctgaatagcctttcatttttaagaacac

SEQ ID NO: 56114 - DNA, 471 bp, Homo sapiens
  misc_feature (1)...(471): n = a,t,c or g
gattcctgataaatttcacagtttgcaaattgagcagtgctgcaacatgtactgtataaggccataaaatagagctagtcatggataacagactttaaccagttaggtgctagatcctaagaggcactcacaaggccagcaggtgcttccttggctcccatgatcgatcgaggcatagtgaaagaagggcaaagacagctttccagagctttgtgctcaggctactaaagtagttgttataggtgtgttaacgaagaagcttagtgaggagcagaatgtggtactatattcatttaactcaacccagaaccattggtcagaattggtgggactggcatcttccctcagacttgcagttgatagaggctgtggtgttctcactagactttgcagagcagtaggcatctcaaggnaacagattcttattgagtaggtctattaagagtcaaaaggngntggggaggagtctct

SEQ ID NO: 56115 - DNA, 478 bp, Homo sapiens
gaggagggaagcctcgcatggccagctggaagagaggcgcctcctggcctggctctgcagaacccaaggggcacgctctgggcctgggctgaggaagtcccgctctccccgcggctctgagttggactgaggacaggtgtgggcgccagtgtgggtgcaggcgcaggtgcaggcacagggccactgtcctccaggcaggctttttggtgctaggccctgggactggaagtcgcccagcccgtatttatgtaaaggtatttatgggccactgcacatgcccgctgcagccctgggatcagctggaagctgcctgtcatctcctgcccaatccccagaaaccctgattcaggtctgcaggctcctgcgggctcaccaggctgctggctccggtaccatgtaaacctaggaaggtaaaggagcaggcaacctcctcgtggcctgtgtgtttgctgtgttacgtggactctgtgtggctcct

SEQ ID NO: 56116 - DNA, 908 bp, Homo sapiens
gcaagtagtttcctcgcgtgacctcaccatgattcacatacgtgccactgtttgaaatctggtctgtttgcatttctgttatgacagagagatgatgtttgcatttctgttatgacagagagatgatgaaagtaggcagggctgtgttcctttgtgtagcctgtatatattttccatatgtagagccctgattaacttcaaggacaaacactggctggagaaagccagactgatgggaatgagactttggccaaaaatcccaaaacatcattttcaatcagtagagaagtgcttagggttgaaaattgatttcatttgctactgaatttggtaaatcctgggtaacttttatcaagatgaagacattttaccctacctactctagaaatatacaacaatgttatattttacactccttggaaacatttgaggaaaaaaatgcaatttgcacttcactttgttggaatatcccatagcactcaataaactcagctgctagagtgccgatgtcaggagggctgtgtcgggtaatgcgtgtggctgaatgggcataaccactgtggcttcttgtgctgcagaagctcgttgacaagactgaggaggatttcaagagcaaccaagtaaagtcatgcattttctaattttgtgtatatggaatatatttttaaatagagatttttctactttagataatgtgttaatattgctattacctaggttaagcactattgtctgtgctagtaagaaaaagaaaggaaaaccatcattgctttatagtagcttatatcaatttagatttcatcattactattttgcatactggaatttataaatgtgtaaattatcattttcttagttttgtaataccttttttatttgtgaataaaattatcacctggtaaaaaaaa

SEQ ID NO: 56117 - DNA, 440 bp, Homo sapiens
gctatgctaaccaaacagtagaaacttccaaaactgaaaatcaaagagaaaaaagactggaaaaaaaaacccataatatccaagaactgtggcaagaactgtagggcaactacgaaagatataacctgtaataggagtaccatagtacaaaggaacagaagcaatatttgaagaaatgaagactaagaattaccccaaattaatgtcatacaccaaaccacagatctcagaagtttagagaacaccaagcagaataaatgcaaaaaaaaattaaacctaggtgtgtcgtatttaaactgtagaaaatcaaagataaagaagaaatcttgaaagaagctagagggggaataaaaacctgtagaagagcaaagaaaataattatatctgacttctcttcagagaccatgcaagcaagaagagaatggcatgaaatatataag

SEQ ID NO: 56118 - DNA, 281 bp, Homo sapiens
  misc_feature (1)...(281): n = a,t,c or g
gcccatcttgtttatattagtatcttaacacctttttattaacttataccaaaatttattttatcctgtctacaataactaaaagtcatgcttttcaaatttttgagaggaaaataaataaataaaaatcagctgggcaagtggtgtgnnnnnnnnnnnnnnnnnnnnnnnnnnnnnnnnnnnnnnnnnnnnnnnnnnngaggagttcaaggttacagcgagttctgattgcatcactggactccacctgggcaaaagagtgagagaaatcctgtctctta

SEQ ID NO: 56119 - DNA, 554 bp, Homo sapiens
attgccaagcaatccagtgaatctaaagtaatttttctcactttaaagaccagtgatgaggagtctggtccttcctgtactgatactgtagaactccagtcaaacttcagtgcactgctttcttacaggaagacaactcagaacacacagccataatctgctttggtgtcagtcacatcacagtggttatacatttgtcctgaatggtgattcattcctttccatctaacttccttgtgacaaatagcatttactattgaaatagtcttaaaatagggaaaagagtgaaagttactcttatgcatgggagtgggcttaaagggttgacttccaccagctgagtacaaacaagtgtaaagaaaaactatgataaagtatggaggtgttgagaattgttcataatgaaatctttaatctgggttatcagagtaatgaaatcacctataaaaacattccatttatcttggatcttctgtggttagcagaggagtatggtctagctatgttagcagcttgaaggcacaaccgtaaaaggaatgagctttccaaggtgc

SEQ ID NO: 56120 - DNA, 364 bp, Homo sapiens
tggaaagggagctacttggaaaccagaaatgggctgtgaatagagttatagccacaagctcttgcagtccaaaggggctggtggggaggacacggagggtaagattttggaagccatttttgatcttcatgacaatttcttgattttgtcggtttggaagacacatctgttagtttttagctatggctgtaaacacaaagtctcagacttgaagctgacctaattcctcgtttggtttcagaccatagcttcctcagaaaattcctgtcagccattttgaagagcacaaaatggctcctatatgccaagagatagagagaatttgctatttagggattttttttttttgagatggggccccctt

SEQ ID NO: 56121 - DNA, 405 bp, Homo sapiens
ggcagcacatgagcttcaataccctgctatcaaagaccatgacccccaccagacacccattagcccagctactttctcctctggcatctattatctgctcttctccttcacccgttcaggtcccggggggatggaagttccctgggggtagcctgccatcctcatcctgggggagtgcacccccggctttgctagtttctcgcatccctgcctaccactgagaactcatcctctccccacagtttcttctttctgagtgtgccatctgtcttctgccaggaccgtgactgacaaaataaaaaacggaattgattatcccagaatttcattcttggaatctacatgccacagtatgtacataataattcccctgcaatttccccaagtcataaaggatagcaatca

SEQ ID NO: 56122 - DNA, 847 bp, Homo sapiens
aagccacaggctccctggctggcgtcagctaaagtggctgttgggtgtccgcaggcttctgcctggccgccgccgcctataagctaccaggaggagctttacgacttcccgtcctgcgggaagtggcgggcacgatcgcaaggtagcgcagaagcttctcaatggccagcgccagctgcagccccggcggcgcactcgcctcacctgagcctgggaggaaaattcttccaaggatgatctcccactcagagctgaggaagcttttctactcagcagatgctgtgtgttttgatgttgacagcacggtcatcagtgaagaaggaatcggatgctttcattggatttggaggaaatgtgatcaggcaacaagtcaaggataacgccaaatggtatatcactgattttgtagagctgctgggagaaccggaagaataacatccattgtcatacagctccaaacaacttcagatgaatttttacaagttacacagattgatactgtttgcttacaattgcctattacaacttgctatagaaagttggtacagatgatctgcactgtcaagtaaactacagttaggaatcctcaaagattggtttgtttgtttttaactgtagttccagtattatatgatcactatcgatttcctggagagttttgtaatctgaattctttatgtatattcctagctatatttcatacaaagtgttttaagagtggagagtcaattaaacacctttactcttaggaatatagattcggcagccttcagtgaatattggtttttttccctttggtatgtcaataaaagtttatccatgtgtcagaaaaaaaaaaaaaaaaaaa

SEQ ID NO: 56123 - DNA, 1102 bp, Homo sapiens
aagcgaaggatagctgtggttgcattttttcctgagaatggagtaagtgattttcaaaaagcacaaataattggcagtcagagagaaaatggatgggcagtgggtgttgagtcagattttgatttttgccagacagctataaaaagaatttttaatgattctgattttactggctttcttactgtggaatatggaacaatcttaagttcggctaactccataaactggggccgactacttccgcaggtagtttatcatgcttccgcatatcttgatcttgttagtcaaggatttatttcttttggaagcccagtcgatgtctgtattcccacaggaaactttggtaacattttagcagcagtgtatgccaaaatgatgggaatcccgattcgaaaatttatctgtgcctctaatcagaaccatgttttgactgattttataaaaacaggacattatgatctaagggaaagaaaattagcacaaaccttttcaccgtcaatagatattctcaaatcttcaaacctagaacgacatttacacttgatggctaataaagatggacagctaatgacagaattatttaatcgattagaaagtcagcatcatttccagatagaaaaggctctagttgagaaacttcagcaggattttgtagctgactggtgctctgagggagagtgcctagcagctattaactccacctataatacttcagggtatattttggatccacacactgctgttgcaaaagtggttgcagatagggtgcaagacaaaacttgccctgtgattatctcatctacagcccattactcaaagtttgcacctgctatcatgcaggctttaaagattaaagaaatcaatgagacttcatcaagtcagctctatttgctgggttcatacaatgcattacctccactgcatgaggctttattagagagaacaaaacagcaagagaagatggagtaccaggtctgtgcagctgatatgaatgtcttgaagagtcatgtggaacaacttgtccaaaatcaattcatatgaaagctttcagagtaaatttttttttctagctataagcatgcaataataaatctcaaacact

SEQ ID NO: 56124 - DNA, 1000 bp, Homo sapiens
acagtacccaaaccagactctgaagccatccctgtactggtggtacctcttggagctgggtttctacctctcactgctaatcaggctgccctttgatgtcaagcgcaaggatttcaaggagcaggtgatacaccacttcgtggcggtcatcctgatgaccttctcctacagtgccaacctgctgcgcattggctctctggtgctgctgttacacgattcctctgactacctgctggaggcctgtaagatggtcaactacatgcagtatcagcaagtgtgcgacgctctcttcctcatcttctcctttgtcttcttctacacccgactggtcctctttcccacccagatcctctacaccacatactacgagtccatcagcaacaggggccccttcttcggctactacttcttcaacgggcttctgatgttggctggcagctggctggcacgtggttctggtcttgcctcattctgcgcatgctctatagcttcatgaagaagggccagatggagaaggacattcgtagtgatgtagaagaatcagactccagtgaggaggcgggcggcggcccaggaacctctgcagctaaagaacggggcagctggaggggcccaggccagcccccactgatggccctcggagccgggtggccgggcgtctgaccaacaggcacacaacagccacatagccgggcggggctggctgtaaggggttgcccccccgccagtgccttggatatttctggggtgactggactggcgcccctgggccacctttctggagacagggagggccccacccggggtgggtgggaaggctgatgatctgtctccagccccttccttctgcccacccgcccttcttcctctgggcaactggacagatctgggagccagcagctggatgctgtggctggccagagacacctccaggctgtagcctgggggctggggggagccccaggctgaaaggggtccaattaaaacaaatggagccaaa

SEQ ID NO: 56125 - DNA, 371 bp, Homo sapiens
gctcagagtacagctgcaaccgcgaccatgggcgggaagaacaagcagcgaactaaagggaacctgaggccttcaaacagtggccgagctgcagaactccttgccaaagaacagggaacagtgcctggatttattggttttggaacatctcagagtgacctaggctatgttcctgctattcaaggagctgaagaaattgacagtcttgtagattctgatttccgaatggtgctgcggaaactttcaaagaaagatgtcaccacaaaattaaaagctatgcaggaatttggaaccatgtgtacagagagagacacagaaactgtgaaaggagttcttccatattggccaagaattttttgcaaaatttcact

SEQ ID NO: 56126 - DNA, 358 bp, Homo sapiens
caaatataaatatatatatatacacattcaagggaaagcaaacagtgtatgtagtatttctaagtgacatgctacatgttataagaatctatttttgaaatcttatacagattatgcagaagtcagaataacaaatacaacacctcaatttttttatagagtctagcgttagtttactataagatttgcttacatcatacttgcaaagatcattcacataatttatttagcattgaaaatctttatatgaagtactaatgtcatctgaagtttagagattaaacaaccaaggtttagaaagatcaaatgactagtccaagataatatggccaataaatggctctaaacctcctatgtt

SEQ ID NO: 56127 - DNA, 458 bp, Homo sapiens
ttttttttttttttcggtcataagtttaatgaagtctgaaaggtaagcgccatcgtggtcagagatacggaggcccggtcagactctccctctgcacctcaatggaaacgatgtggtgtccgggtaccatggccaggcccagcacacggggctccccggcagagaaggaatcaggcgggtgtgcattccccgggcactgacccgacggcttgaggaactcctgcgccgagcccaggatgacattgcagtcacggtcagtgcagaggaagcagccgaccagtgtccgtccatctgtcatgcgaatgcgcatagtcttgttgagcagcgcctctagctgctgtcgggcgcgctcagccgccgagtcctcgcgctctccgtccgaatccccagcactggagctgctctgacgccgactgcaacagccattctcttctcgtagcagcatggtcggtccagct

SEQ ID NO: 56128 - DNA, 429 bp, Homo sapiens; identical to SEQ ID NO: 28727
  misc_feature (1)...(429): n = a,t,c or g

SEQ ID NO: 56129 - DNA, 746 bp, Homo sapiens
  misc_feature (1)...(746): n = a,t,c or g
aaacaatctctatgaaagcacttgttaaccaaaaaatgcaacgtaagtgctaagatgtgatcattatttttgaaggaactgtgagatttgctcctaatattataggtattttttaaacaaaatctttaaacaaaatctagagttatcatctacattttgatggagcaaaaggagatttggctgagtgctcagagaaaatgtctattttgaactgttacgatacgtaaaggtgagcaacgtgtgccccaccctatgttgttagtttatataaaatagtgttttatttctataacgtgtttcgttttaagcagaagttatttcagattatagatattttgcctgttactgctgttttgcagtttttatggttctacatgtttgttcctgacattgattttgctaaataaaagttacagttctataaaaatttctgtaaagaatgttaaaactttctcagtgtttagtgtttctctgagaaaacaattaatatacagcacacatctttagagcaaaataagaaaagaatgcctttgccagctgcannnnnnnnnnnnnnnnnnnnnnnnnnnnnnnnnnnnnnnnnnnnnnnnnnnnnnnnnnnnnnnnnnnnnnnnnnnatagttaatgtgctatgatcgcacctgtgagtgccnnnnnnnnnnnnnnnnnnnnnnnnnnnnnnnnnnnnnnnnnnnnnnnnnnnngattggcaagatgatgtaaaaaaaaaaaaaaaaaaaaaaaaa

SEQ ID NO: 56130 - DNA, 336 bp, Homo sapiens
  misc_feature (1)...(336): n = a,t,c or g
gcttcaaagaacaggcccacaattggccatatcactggggttgccaaacacttccttaccctcccagcaatgggtggagtccaggcttaaattgtttcagcaactggaaagcaaataaccttcaattcaacaaactatttatgccaactgcagagacagatagtgtaatattgatcgagaggatggactcggagccagactgccttggtttctattaattcccaccatttactccctctgtgaccttgaaacnnnnnnnnnnnnnnnnnnnnnnnnnnnnnnnnnnnnnnncagagatattaggagctccatcactgggtggttttatttaattta

SEQ ID NO: 56131 - DNA, 369 bp, Homo sapiens
gaaaggacaggaactaaacagtcctctgtgtctgcatttgcgggtagaaaatattacaggcgtgagccacctcgcctggccgagagacaataatttcaaacatgcagggaaataatgaaggtcccctttagtagaaaaaaaaaaggctggaattaatatagactgaggtttggtggtttaattgaaatattgaaatatgtgcaaagctggtagatgttgggccaaatcaaataattccatgagagaattattttaacataaggataggcctagtccgtggactcaggttgagtaataacttttctgaaagatacttagcatcaaaggacatttggtaagtccttggttagcatctttgataggtgacag

SEQ ID NO: 56132 - DNA, 537 bp, Homo sapiens
ggccagagagtacaaaattaaaaaagtcaagaagaaaggaagaaaagatgatgatagtgatgatgaatctcaatcatcccacactggaaagaagaagccagagatcagttttatgttccaggatgagattgaagattttttaagaaaacacatacaagatgcccctgaggagtttatttcggaacttgctgagtacttaataaaacctcttaataaaacttatctcgaggtggtacgttcagtattcatgtcttcaacaacttctgcttctgggacgggcagaaaacgcacaatcaaggacttgcaagaagaagtttcaaacctgtacaataacattaggttatttgaaaaagggatgaagttttttgcagatgacacacaggctgctcttaccaaacacttgctgaagtcagtgtgtactgatatcactaacctcattttcaacttcttagcttcggatttaatgatgggcagtaggacgatcctggcagccattacaagtgaaataagaaagaaaattttaagtaaattatcaga

SEQ ID NO: 56133 - DNA, 936 bp, Homo sapiens
gcaagggcttagtaataatttttcttttttgtaaatttctgtattttagttttgaagtgctttctatttaaaaataaaaaacatgatttattttcatttctgacacagaagtgtttcttttaaaaaaaaaagaccacattttaaatttctgcttaaatgtatataaagtatacatttaagtatactggcactcgcaacaaatgaatccttccccagggataaatggattggaaaatttgtttttcattcaacatttggaaagagaacaaacctgaaatatgtaatttttaaaattatgtgaaaataatgtgaaaaatttcatatagtatttgtgtgaaaatcaggtggaaaaaaacttccatgaagaacccaatttacaaaaattcacatctttttaagatttacatttaatacaatactactgttttaactgaattgtgtgtgtatgaggtggtttttgcagggagaggggagttgtatagtgactacttttttgtgaccactcaccttcaaccttgggggaaaatgcttactatatgacaaatgtaaattaagatcattactcttccgtcacagatgatttcctagatttgagaacaaggtctttaatggatgaagaaagttcttgaagctctttacgagtagtactggcaacatcttcttgttctttgtctaattcattattcaagggataatctccctgcccagtcttcttactttgactgactagctgctttacaaccaaaccttgatactttaccaaaagagcatgctgatcctctggaattttactattaagaaaagcaatgatctgtgggacacatcttccaggtgcatggagcatgctgtgggttgaaaactgaaacaacaggactgatgtgaggtgcagaataagagcagggtcttctgtgacctttagctgttcagccagtgctt

SEQ ID NO: 56134 - DNA, 422 bp, Homo sapiens
gcacagtgctgggattacaggtgtgagccatcacacttggcctctctttaaagtttttgtcttgaattccattttgtctgatataagtatagctatttttgctcttttatggtttccatctgcatggaatatctttttgtatccctttattttcagtttgtgtgtgtgtgtgtttctaaacagatttaaatatatcaggctgtctccctctggtggaatgcacattttgtgtgctgtttgtggttatgattcctatcatgtggagacagcccccctacaggcgagaatgaaactgatgtacagaaacaatgagatgaggtggagtaagaatcctgcagtcattcaagtccctggttcaaattgttcctctgcatgtctgcccctgtcttgttaatattctctggattctgtaagccaaaaga

SEQ ID NO: 56135 - DNA, 382 bp, Homo sapiens
aaaaactcttggaagtggtgcctgtggagaggtaaagctggctttcgagaggaaaacatgtaagaaagtagccataaagatcatcagcaaaaggaagtttgctattggttcagcaagagaggcagacccagctctcaatgttgaaacagaaatagaaattttgaaaaagctaaatcatccttgcatcatcaagattaaaaacttttttgatgcagaagattattatattgttttggaattgatggaagggggagagctgtttgacaaagtggtggggaattaaccgcctgaaagaagctacctgcaagctctatttttaccagatgctcttggctgtgcagattactgattttgggcactccaagattttgggagagacctc

SEQ ID NO: 56136 - DNA, 303 bp, Homo sapiens
gcttgcctttgagaaaagccagtggtaaagagaggaagggaagggctggggctgatgttgccaatgggacaggggaggagggaactgggaaggaaggcggacttcagagtctgtgtggatcccgtgggttcttgatggaactggaccacaactgctccgatgggaggggagtcaagcgagcagcccggtcttgaggcgcctggcatctcattgtgggtcttggagttgtttaagaggtcacccagggccactggtccatggcaaagatgcttctgcgtgctgagacatgaacggatgtgcagc

SEQ ID NO: 56137 - DNA, 555 bp, Homo sapiens
ttttgacatctggtgtggagacctctctattgcacacaacgtcccagcgcactccactctccacccactcctggggcctctctgtcctcccttccttggccttgggtcattcgttattcctggctcgggtccactccgaggtcctccttagctgccagtcatcacaggggatggctgcctccacactgcctgctccagggactcgagtccactccacggagagccttgcccagctgtggccagcctgtgagtatcttggcccggcacaccctggctttcccggctgcaagtgcctgctccagctccagtcccagcccctcctcatggctccagctctcgggagaggcgggagagttcccgctggttgtcaatgaccttcagctgctggacataagcccaggtgctggctggactccgggtgctcagggactgctccgagcatgtggaaatcctcgccacctggctgtcctcgtggaggtgggaaactcggcttctgagtggtgagagaggcacagggttgtggcttcggcagtggtgcagcatccgcgcggctct

SEQ ID NO: 56138 - DNA, 411 bp, Homo sapiens
ctttttataataaaacctaacagcatatattattgcatgtattatttaaatggtccaccttagttgttttgaaattaatgaattctgtagaaggtgttactttgctattcaatttattcgaattttcttcctagcttgaaaaatatagcaatatgttgcccactagaaaataaacctaacagtcacattagtcaggtgttcttacatgtatgaaaggagtctagtcccacataacacagattctaatttaacatatcgcttttctaggctgctgttcttattgttttaagtattttggtaaattgttttagaagggttttttgtttttaaaaattatttagaattctttgaaaccatttcttcaacagcttctgtttttgtacagtttacctgggccagtcagaaaaggat

SEQ ID NO: 56139 - DNA, 409 bp, Homo sapiens
tgcatcctggaatcctcccagataaactacccacctccaagtactgctttctggttctgcttttgagggatcataactaagacaaaaccttccttcaaagtcagtggtaatgggcaaatttaagggagttaatggggttaactattaagttagtggggttagtggagagagaaggggaggaagaaagaagcgtcaccttttacttagctgaaaatgtgttccagtcatgatattcacaaacgtacctcttatgctaggaagatcttatataagacatattctctattttcaaatgatggctgttttcagcacagtttctggggctatatgtccactgacattttccttatgatatttgattttcagtaactaggtatgtctatggactccaccctttgttttttctgat

SEQ ID NO: 56140 - DNA, 360 bp, Homo sapiens
  misc_feature (1)...(360): n = a,t,c or g
aaagaatccactgcaattgtgatacaaatgtctaaacctggagtggaatgaatttgaaacattattgcattcatgataccataatgataagaaatagtccatgacttaacaggatatcctggggttgatgactttagatcacatacatcactttttttttttttncnntnaccnttaccntanagnaccngaaaaantnggcattttnnnctttggntaaatggggggggnnttaaccctttcgggntanttaccnngacccctngcnagggttaaanttngnccaaaccaaaacccaaggttnnanttttattaaaaaanggggccctctttnnngncttngccngcaaananngtaaa

SEQ ID NO: 56141 - DNA, 371 bp, Homo sapiens
gaaagaaagaaagctgagaagcaggtggccagcctgaaggaagcacttaagatccagcggagccagctggagaaaaaccttcttatggcaaaccaaaaagatttggagagaagacaaatggaaatcagtgatgcaatgaggacacttaaatctgaggtgaaggatgaaatcagaaccagcttgaagaatcttaatcagtttcttccagaactaccagcagatctagaagctattttggaaagaaacgaaaacctagaaggagaattggaaagcttgaaagagaaccttccatttaccatgaatgagggaccttttgaagaaaaactgaacttttcccaagttcacataatggatgaacactggcgtggaga

SEQ ID NO: 56142 - DNA, 408 bp, Homo sapiens
attacacaccagctactttctcccattttcattctgttattattaaaagttctgactggtaagttctggcatgaatgggcagaaagctcgattctactactttccaatgcccttatctttgttttaaatacggaaagccttttaaaaaattattttgcttaaaatattgagggaacctttttatactcactgtgtaaactctaacttaccttaatatttatattgttactcatatggatattccgttgaactttcacttttacttgtgattgtatggtaaattagttttctgttaatatcgaaaagagtgtgactgctttccttaaatgccttgttgtgttaaagaaaaaattattctgatatttgttaaaactgtgaggaagacattattcaagactactgcaatta

SEQ ID NO: 56143 - DNA, 1533 bp, Homo sapiens
gtgtattctaagctgtaaaccccttgggatgttttcatcacgggtcttctcttaataactgctacagaacataaggattagtttgtgggtcccagattttttagggctccaattctgcttctaccacttttctacttgtgagctcttagggcaagctattttaactttgtaagcctcagtttcttctgtaaaatggtgacaataagaaataacagtaagtgcccaataagttttaactattattatgtgtctatagctattttaaagcactttctatatgtaatcctcataacaaccgtattaggtgagcctattacacttctcattttatgacaaaggaaactagatttgtttcaagaatgaaaaacctagaaaattatatgtcactttatgaagtgcctggcacatagtacatagaatagcttagctacaataatatagatatgtgactttacctcataactttaagacatctcaaattgattcacaaatcagaaaaaaaatctgaggcatcagatgtgaggtgaggtgaggtgaggcatctcagtttttgcacatatggttactgttattggagggagctccatgtcattggagggagctccacgtcattgagggaggactgggtgggatgctggccaaaggtaggggcatatttaggcagtgaaattgcagttatgggacccctctatagcactagatgtgtgagaggactaaaaataaaattcctttgaaatttcttacagggtcatatattacctccttcccaatgactactgtggtatattagagtaggggattgatgtcccagaaatattatgtacatcaaacagaagatctacacaaattgttttatcagatactgaatatatcaatgggctagagtgtattatagtacatatgggtatgttttcccccttttgactaaataaactctcccctctctgcaacaggtaaatttccagtttacctttttcttgctgtttttaattttttttattttgaaggctttgtatctttatatctcagctgaaaatattacattctaactccccaaagctattctcacattatttgcaagtattttttcatagtttacatgtttgtgtatttgtttaatacattccacaagactgaaagtcttggtgagggcaggaactctgtctaggttgttcatctggcagccagcaaacccaaaataagtattagttgaatgaatagctaaatagatgagccatggggtagcatatctgttttagctactgcttgcctgttatcatcctgggatgctgcttgcttctccgtgatctcttcttgttcttaaattgtcttcagttgtagtactaagtactaatttgatctgtaatgtgatatgtggctgaagtttgctctgtaaaatcaccgtttcctgaggtatattcaatacctttaatttttccataaatctcttcaaggtttgtgtgtgttttcttttaaattatctaacttagttggatgtatgtttgaagtgctagacaataaaagtttcaatag

SEQ ID NO: 56144 - DNA, 431 bp, Homo sapiens
  misc_feature (1)...(431): n = a,t,c or g
ttgacttgatacngtttgactgattacgaatttaatacgactcactatagggaatttggccctcgaggccaagaattcggcacgagcggagtgagacaggatgcccacggtgactgccgctccgtccgtgcacacacagcggtgctcttctccccttagccacccactgcccaacccaacggcaaagacacagaaaccaggtccccttgcagatggctctcccatcttcctgcaagtcatctgctcacacacagttggcagcacatagcgtttccttctttcagaaacattcctcttctggggcttcagaaagctggcaaggccactagcagagcttttgttaatgccccagctgcttggcgagctaacagctgacctttcgggaagcccacagacgctggaggaatcttgagtttctccaaactgccgtc

SEQ ID NO: 56145 - DNA, 385 bp, Homo sapiens
ggccctgaggattcagccccacaatattcacgcctcttcccaaacgcatctcagcacatcacgccgagctacaactacgcgcccaacccggacaaacactggatcatgcgctacacggggcccatgaagcccatccacatggaattcaccaacatgctccagcggaagcgcttgcagaccctcatgtcggtggacgactccatggagacgatttacaacatgctggttgagacgggcgagctggacaacacgtacatcgtatacaccgccgaccacggttaccacatcggccagtttggcctggtgaaagggaaatccatgccatatgagtttgacatcagggtcccgttctacgtgaggggccccaacgtggaagccggctgtc

SEQ ID NO: 56146 - DNA, 364 bp, Homo sapiens
tgagaccatcctggctaacatagtgaaaccccatctctactaaaaatacaggaaattagccaggcatggtggtgggcacctgtagtctcagctactcgggaggctgaggcaagagaatggcgtgaacccaggaggcggagcttgcagtgagccgagatcatgccactgcactccagcctgggcgcagagcgagactccatctcaaaaacaacaacaacaaaaaagaatgtgaaaatattaccataaagagactatcaggtgcaggggatcaggaagaacaaaaatcaagcatatatatatatgctacgcttttaaatctcaggtaaatgtattggtggtttcttgcttgatgaaatagtcatcc

SEQ ID NO: 56147 - DNA, 398 bp, Homo sapiens
gctagccaacaaagttattgtactacacaggctgtacagcatttaggggccttgagtcgtggtggctggaagctaaacctgccacctctggaatattctctgtgctggatctaatcttgaaattacatttcctctgctcaaagcctgtctttgaaagtgggggtgtttccggtggtttgctgcagtttggagtactgggaactaaataaagcctttgctactttcatctagtctccgggcacacccctgagtaatccaaaggccatcagacggattctcgtgctggactttcccctaccttaggccacatctcactatggagtgaggatcaagaagtaaaggtctgggaaggagagaagctgcaggggccaagggaagactcttcgtgagtcggagag

SEQ ID NO: 56148 - DNA, 2301 bp, Homo sapiens
tcggccgagcccagagacagccagttcctctcccgccgcgccgggccgcgtgccgctcgctccccggccgtggcgcctccgggccagacgcgctgcagcctccagcccgcggcaagcgggcggggcggccgcgccacccccggccccgcgccagcagcccctcgccgcgcgtccaggattcccggccagcagcctccccatacgcaggtcctgctgggccgccccgtcgcgccccccactctgaactcaagtcaccgtggagctccgccgccccgaaactttcaccgcgagcgggaaatatgggatgtataaaatcaaaagggaaagacagcttgagtgacgatggagtagatttgaagactcaaccagtacgtaatactgaaagaactatttatgtgagagatccaacgtccaataaacagcaaaggccagttccagaatctcagcttttacctggacagaggtttcaaactaaagatccagaggaacaaggagacattgtggtagccttgtacccctatgatggcatccacccggacgacttgtctttcaagaaaggagagaagatgaaagtcctggaggagcatggagaatggtggaaagcaaagtcccttttaacaaaaaaagaaggcttcatccccagcaactatgtggccaaactcaacaccttagaaacagaagagtggtttttcaaggatataaccaggaaggacgcagaaaggcagcttttggcaccaggaaatagcgctggagctttccttattagagaaagtgaaacattaaaaggaagcttctctctgtctgtcagagactttgaccctgtgcatggtgatgttattaagcactacaaaattagaagtctggataatgggggctattacatctctccacgaatcacttttccctgtatcagcgacatgattaaacattaccaaaagcaggcagatggcttgtgcagaagattggagaaggcttgtattagtcccaagccacagaagccatgggataaagatgcctgggagatcccccgggagtccatcaagttggtgaaaaggcttggcgctgggcagtttggggaagtctggatgggttactataacaacagtaccaaggtggctgtgaaaaccctgaagccaggaactatgtctgtgcaagccttcctggaagaagccaacctcatgaagaccctgcagcatgacaagctcgtgaggctctacgctgtggtcaccagggaggagcccatttacatcatcaccgagtacatggccaagggcagtttgctggatttcctgaagagcgatgaaggtggcaaagtgctgcttccaaagctcattgacttttctgctcagattgcagagggaatggcatacatcgagcggaagaactacattcaccgggacctgcgagcagctaatgttctggtctccgagtcactaatgtgcaaaattgcagattttggccttgctagagtaattgaagataatgagtacacagcaagggaaggtgctaagttccctattaagtggacggctccagaagcaatcaactttggatgtttcactattaagtctgatgtgtggtcctttggaatcctcctatacgaaattgtcacctatgggaaaattccctacccagggagaactaatgccgacgtgatgaccgccctgtcccagggctacaggatgccccgtgtggagaactgcccagatgagctctatgacattatgaaaatgtgctggaaagaaaaggcagaagagagaccaacgtttgactacttacagagcgtcctggatgatttctacacagccacggaagggcaataccagcagcagccttagagcacagggagacccgtccatttggcaggggtggctgcctcatttagagaggaaaagtaaccatcactggttgcacttatgatttcatgtgcggggatcatctgccgtgcctggatcctgaaatagaggctaaattactcaggaagaacaccctctaaatgggaaagtattctgtactcttagatggattctccactcagttgcaacttggacttgtcctcagcagctggtaatcttgctctgcttgacaacatctgagtgcagccgtttgagaagaaaacatctattctctccaaaaatgcacccaactagctctatgtttacaaatggacataggactcaaagtttcagagaccattgcaatgaatccccaataattgcagaactaaactcatttataaagctaaaataaccggatatatacatagcatgacatttctttgtgctttggcttacttgttta

SEQ ID NO: 56149 - DNA, 722 bp, Homo sapiens
tggcttttttaccataaaattagccatgcaatgaagtgcatagaaatatgtgttcactgaggtttggcaaatgcatatagtgctatggaaataggaaacgttatcaccaccctagaaagtttccacactgccctttccagtcaattcctgtccctacttgaccctcaaaggcaaccactgttcctttttctaccataagatttttctgttctaaaactttatataaatagagtcacgcaacatgtacgcttttctacaaggcttcatttttttattgctgttcttttttattgctgagtagtattccactgtatgacaatattacagtttgttttcttaatttcctattattgatagatacctgggctgtttccaggattggccattataaataaagctgctatgaccattcttacgtaagtctttgtgaacataggttttcatttctttgcagtaaattccttggattagaattgctgggtcacagggtagttttaaaagaaactgccatacctttttccagttcagttttattgtgccctgtattttgtattttgatgtgcataaaggtgtaaactatttttatgatccatattgaagtattagaagaagtgagtttggaataacaatggcattgttcatggtcaaggatgacaattggaactatctgaggaaagcaaagacctgtctgccccagacagctcctcaaggggttcctatgc

SEQ ID NO: 56150 - DNA, 91 bp, Homo sapiens
agtctgctcccagcgccactcactcctctaggcaggtgtgccaaggtggtagaatggcacccctgctctgatcatgattaacaaagtgggt

SEQ ID NO: 56151 - DNA, 412 bp, Homo sapiens
ctccagcctgtgtccccctgcagcctggtcagaagtggccgtagacaggctgcccagcttcctggcggcccccaatgctcccaggggccagccgctgccccatcaccaatgctccatccacctgaactgtgaagacaccctcctccttcatcaggcctttgaagatgccatggatggcctgccttcccacagtgtttgattgcatcgaggtctatgcccctggcttcaaggactctgtggttggcagagacatcctcacaccaccagatttggagagaatcttcgggcttcctggagggaacatattccactgcgccatgtccctggaccagctctacttcgcccgccccgtgcccctgcattctggctaccgctgcctctccagggcctgtatctctgtggaagtggggct

SEQ ID NO: 56152 - DNA, 873 bp, Homo sapiens
taatctgtatgaaatattagttttaataaaacagaaccagtccatgtatggaggcatgggcataaggtcaacttgcactaaatgtaactcgtacgttttttctaaaataatttcttgagcattgtggtggccttatgtactaacccgaagctgaacttcctgggaagctgatccaatggagcacttggaattcaggggtggagtcttcttcctgggtcagagctggttcagggtcacatgctcttgaggtccctaaaggccacatgtgctgcatttcgcccagcagctcccatcacacctcctccaggatgagccccacttccacagagatacaggccctggagagggcagcggtagccagaatgcaggggcacggggcgggcgaagtagagctggtccagggacatggcgcagtggaatatgttccctccaggaagcccgaagattctctccaaatctggtggtgtgaggatgtctctgccaaccacagagtccttgaagccaggggcatagacctcgatgcaatcgaacactctgtctgcataagcgtctctctcctgctcgtcccaggccttgcctccagccagcgtatagggcgtgtactgagtgaagagggagactacatggcagccagggggagccagggtggggtccagcgaggaagggatgcagagctcaatcacaggcctgtgggaaggcaggccatccatggcatcttcaaaggcctgatgaaggaggagggtgtcttcacagttcaggtggatggagcattggtgatggggcagcggctggcccctgggagcattgggggccgccaggaagctgggcagcctgtctacggccacattgatcttggtgacaggcgaccgggtg

SEQ ID NO: 56153 - DNA, 459 bp, Homo sapiens
cggcacgagctgaaatggcattctaatgtttgctttttattcggacaggccacatgatgcatagagcctctttcatgtgacttgtgtctactgcttaaatctttatgctgtgttgatgatattatattgacatatgaagctgtatatgtgtatgtattttgtggagaaagggattacaagatgtatgagtataatgacttgctaacctttcaggattcagagaaagatgaagaaagaccatatctaaataatacacttcatcattttcatgtgtataaatgcttaaagtaccatactttgtttgaggtggttcatgtatccagtttatccagtacagttatttgtcaagcttagctttgatttcaaaggacacgcttaccttgtctggcataagaattaatgctcatgtctgcagtggttgggtaggtcctgcttaggagaattaaaaaattcctcttt

SEQ ID NO: 56154 - DNA, 763 bp, Homo sapiens
aagacgtcgcgcttgcgcaggcgctcggcgcagaggcctgcgggaagccaagatggcgcataggggttctccaggctgcagttggcgccttatcagtatctaagcggagtgttttggaaggagttaaggggctgtggcaaacgccctctccgccgtcatggcccggcatcggaatgttcgaggctataactacgatgaagattttgaagatgatgatctctacggccagtctgtagaggatgattattgtatttcgccgtcaacagctgctcagtttatttattcacggcgtgacaaaccttccgttgagcctgtggaagaatatgattatgaagatctgaaagaatcttccaattctgtttcaaaccatcagctcagtggatttgatcaagctcgtctttattcatgccttgatcacatgagagaggtacttggagatgctgtgccagatgaaatattaattgaagcagttctgaagaacaagtttgatgtgcagaaggctttgtcaggggttctggaacaagatagagtgcagagtttgaaggacaagaatgaggcaacagtatctacaggaaagatagcaaaaggagtcttattttcttcttctgaagtttcagctgataatgttcaaagttcttatcctcagtcagcaaatcatttggattatagtagcaaaccctttgattttgctagctcagtaggaaaatacggattatctcataattcttcagttccaactcactgtttactccatagaaaaaaa

SEQ ID NO: 56155 - DNA, 84 bp, Homo sapiens
taaacatgttatttagacatgtgaaggtaaataccaaagaatcagtcaaaagttgaaaatggttgccttggaggataggaagat

SEQ ID NO: 56156 - DNA, 480 bp, Homo sapiens
cccaaaatgctgggattacaggcgtgagccacggcacgcagccagcaagttgtttttaaatgttaatatagaaaacagtgaaggattagctgaaaatatatgagcaggtgacattgaggtttactgaaatagccaatttgactggtgcttagactattgtgcagtaaacctaaaaggtagtggagaattgcttcctgctagcaggaagccttcatcttcttgagtacccaaaccaggcttcaggtgtcctttgaggatagccaggtttgaaatttttagtttctcaggaagagctcttctatgtggcaggggctgatagggcaaaataaaatgacaatttctttattgctacagagtatcctctataagttattaaacgagtgtaatggtataatgcccttccatcacacaacaggacaccaccccagttttgttttctgggtttcttccccctttgtaggaatcagataccttttgtag

SEQ ID NO: 56157 - DNA, 379 bp, Homo sapiens; identical to SEQ ID NO: 41039

SEQ ID NO: 56158 - DNA, 186 bp, Homo sapiens
  misc_feature (1)...(186): n = a,t,c or g
ttaacccttcctaaattcaagtacccagggacacaaaccttgggaaggccggagggtcctctgctaagaaaaccaaaacctttgtcacttgttatctgntgccttccttccctattggctatgaccctgccaatccccctntgngagaacacccagaatgtcattaaaaattaaaaaaaaaaaaaa

SEQ ID NO: 56159 - DNA, 1940 bp, Homo sapiens
cctctgttcttcccccacctgccacgtacagagcccaagttctcgctaggcttgttgggtcagcgcgattggccggggccgcgcgagcctgcgacgaggtgcggcggtcgcgaagggcaaccgagcgggccgtgaccaccgcctccccgcgacgccccagtccagtggcctcgcgtccgcccattcagcggagacctgcggagaggcggcggcgcggcctcacgcaagccgtctttctctagagttgtatatatagaacatcctggagtccaccatgaacggacagttggatctaagtgggaagctaatcatcaaagctcaacttggggaggatattcggcgaattcctattcataatgaagatattacttatgatgaattagtgctaatgatgcaacgagttttcagaggaaaacttctgagtaatgatgaagtaacaataaagtataaagatgaagatgggagatcttataacaatttttgataggttctgacctttcctttgcaattcagtgcagtagggatactggaaactgacattatttgttaatgggccaggcccaagaccccttggaattcaagtcaggtgaaatatctccgtcgagaactggatagaacttcgaaataaagtgaatcgtttattggatagcttggaaccacctggagaaccaggaccttccaccaatattcctgaaaatgatactgtggatggtagggaagaaaagtctgcttctgattcttctggaaaacagtctactcaggttatggcagcaagtatgtctgcttttgatcctttaaaaaaccaagatgaaatcaataaaaatgttatgtcagcgtttggcttaacagatgatcaggtttcagggccacccagtgctcctgcagaagatcgttcaggaacacccgacagcattgcttcctcctcctcagcagctcacccaccaggcgttcagccacagcagccaccatatacaggagctcagactcaagcaggtcagattgaaggtcagatgtaccaacagtaccagcaacaggccggctatggtgcacagcagccgcaggctccacctcagcagcctcaacagtatggtattcagtattcagcaagctatagtcagcagactggacctcaacaacctcagcagttccagggatatggccagcaaccaacttcccaggcaccagctcctgccttttctggtcagcctcaacaactgcctgctcagccgccacagcagtaccaggcgagcaattatcctgcacaaacttacactgcccaaacttctcagcctactaattatactgtggctcctgcctctcaacctggaatgggctccaagccaacctggggcctatcaaccaagaccaggttttacttcacttcctggaagtaccatgacccctcctccaagtgggcctaatccttatgcgcgtaaccgtcctccctttggtcagggctatacccaacctggacctggttatcgataaggaggctcctctacaccaattaatgtagctgctagctattggcctcccaaaagactccagtactattttaatttgtattggaagaagttcagaaatttaaaagcagagcattttttatgatatcattgttggtgttaattgaaagtataatttgctggaacacaaagaccaaaatgaaagttttttcctccctgcttaaaaatgtagcagcttcttagttactttggaacactactcttacatgtataaagtgattgacttgactttctagcttcccttgtccggaggatattaaaatgctagggtgaggtttagccatcttacttggctttttactattaacatgatgtactaaagtagagccctttgagaatacaagatattatgtataaaatgtaacactgatgataggttaataaagatgattgaatccaaaaaaaaaaaaaaaaaaa

SEQ ID NO: 56160 - DNA, 417 bp, Homo sapiens
tgggattacagacatgagccaccatatctggcctttatcagattttctgctgacatcattctgagaccagcccctgagaggtcacaaaaggaagggagactgattagaaaatgaaacacagccacgggacagaaaatagttttctaattggggtgctagaatacacaggaaccgtttctatctttttttgctggaaattgcctagggcctgagcatcatgaaggtatattggaattggtttgagaagacagttatatcctgattagatatcacttgacatttatgtaaacctggcctacctgacagagcatgagtttttaaagtgttatctgtggtgatttccagggaaaagcatgttttatggagaaagacaaagtcgatgtcttcaggtttggttcttaaatttttttttttttt

SEQ ID NO: 56161 - DNA, 333 bp, Homo sapiens
cggacgcgtgggttttgagccatatatttcctattttaaatgtttgcggaatcgccagtcttcctttgaaagaaacagcccccagaattctaaatgacacgattatagaagacagtagaatgtgttaccataaagactgaagatattttagttgtaaaaccatgtgaacaagggcttttgccctattgtatctaagtatttcaagtgcacaacttgttaaaccatgttgctgctgtttctaagccctccaccaactgaactttcatgtttagcattgtagaggcagaaataacatactaggttttttttttctttcattgatttttctcctgg

SEQ ID NO: 56162 - DNA, 384 bp, Homo sapiens
cagaaacctctcttgtgatctctgtcaccattcaagccaccttcctgggcaccagggccaggcactggatgggaccgtgtcagcaggagagggacagagggagggattggaagtgtcccaacatagacttgccaggacgtcgacgcggccgcgaattccagatctatgaatcgtagatactgaaaaaccccgcaagttcacttcaactgtgcatcgtgcaccatctcaatttctttcatttatacatcgttttgccttcttttatgtaactatactcctctaagtttcaatcttggccatgtaacctctgatctatagaattttttaaatgactagaattaatgcccatcttttttttggacctaaattcttcatgaaaatata

SEQ ID NO: 56163 - DNA, 340 bp, Homo sapiens
gcttcttccttatttcaaccttgacattcacaacctcttgatcaaagtagatgaaaaagacctgggatattatattaataacaagtcttctaaagtggctactgtgctatgttatgctgttgtttgagatgtaatttcattacaatggcaagaaattatgcagcacttactgtgtgccaggaatgctctaaacattttgcaaatgctaacttttttaatcctcataacaagcctatgggatatatgaggtaggtgctattataagttactttaagtccattttatggataaggaaactgaggaacagaatggttaactaactcagacaaagtcatgtagc

SEQ ID NO: 56164 - DNA, 1484 bp, Homo sapiens
atcatccaaactgtttcgaaggacgtgaacaccaccatcatggagctcctgatcatggtgtatgcatgtaagacctcttgtgccaagagcatcattggcgtgataccctactttccttacagcaagcagtgaagatgagaaaaagaggctccattgtctctaaattgctggcttccatgatgtgcaaagctggtctaactcatcttattactatggatttacaccagaaggaaattcagggcttcttcaatattcctgttgacaatttaagagcatctcccttcttattacagtatattcaagaagagatcccagattacaggaatgcagtaatcgtggccaagtctccagcctcggcgaagagggcacagtcttttgctgagcgcctgcgcctgggaattgcagtgattcatggagaggcgcaggatgccgagtcggacttggtggatggacggcattccccacccatggtcagaagtgtggctgccatccaccccagcctgggagatccccatgctgattcctaaagaaaagcccccaatcacggttgtgggtgatgttggaggaaggattgccatcatcgtggatgacatcattgatgatgttgacagctttcttgctgcagcagagaccctgaaggaaagaggtgcatataagatctttgtgatggcaactcatggcttgttgtcttctgacgccccccggcggattgaagagtctgccattgatgaggtggtggtcaccaatacaattccacatgaagtccagaagctccagtgccccaagattaaaactgtggatatcagcatgatcctttcagaggcgatccgtcggatccacaatggggagtccatgtcctaccttttcagaaacataggcttagatgactgagttttcctttaggaaaactcccgagggccaaactggaaacataagagtgactgctcggtgggatggatttcacaggaaccgtcatgcttgttcctccctctcccctgtaacctcacttcttattgattcctaagaagatagaccaactttttatgtcggtttgggtgtttgtgagtttggggagcaatttttataaaagaaaaactttattctcctcttttgaaaaggtaagacctcgttttagttgtaactgtttaaaaaataacacttggaataagatttgtaagctcacaaagccttcttccaaagttgcttgagccaagtgcttaaaaagttaataaaataaaatgatctgtatgatacctgcaattgaaaagccgaaaagattatactgtcaagtccagtaaatgacatttttagagatgcttttgtagacaagcatatggaatatgtgattgtatttattttctgcaactaaaaaaggaataaaaacttgtgtttgtgtgtttttctaaaactttgtgttttggcaatcgttttataactaaaataaaatgaaagctaaatctaaaaaaaaaaaaaaaaaaaaaaaa

SEQ ID NO: 56165 - DNA, 373 bp, Homo sapiens; identical to SEQ ID NO: 41330

SEQ ID NO: 56166 - DNA, 1342 bp, Homo sapiens
ggagaatattaagagcagtggtcaggggatcgacccaatgctactcctgacaaaccttggcatgatcaagatggatgttgttgatggcaaaactcccatgtctgcagagatgagagaggagcaggggaaccagacggcagagctccaaggtatgaacatagacagtgaaacctaaagcaaataatggagagaagaatgcccgacagagacttctggattcttcttgctgatgatttttttccttgagctgtaaatctgtgacttctgcgacatgggatttaatttggctaaagcacccctgttgggtttcacagctggtttgcaataaatggttcttggtggagatactgagcatgtcttattgagtccctaatggaaatggtgatcaacaaaaggttatggaagaatggtttatgaacttcccataggaagcacctgagagatagtaaactgcagcaagtaactatgtgtaagtcctcatcaaatgaaaagcagaaagacaagaacaattagtcaagagcagtagccctgtcagagcctcggagcaatacctttctgtacccgtggtgagacaagacccagagctactggaaaacaagcactttggaagatttgttttgttttcatggaataataatatgtcaggatataatttaacgtgagtttcttatgtccccttaaagactgttagacaagaaaagcattcactggctaataatccataggtcgacctatgtcctaagttaggtgtaaggtccgatgccttggcccacactcgagctctctttacattgttagttgtcaaccttggctgatggaaatcccgtaaccactatttgttgcactgtgccttgaagggcagcaggcccaagtgctgctctgactgaaaactgagttaacaagacgaaatctaaaggatattcacagtgacttcaattcaggaagaatgcttccaaaagagcccagtggggaaatctgacatcacagaagacattaattcagtcactttcaaagagtttgtctacaggcggtttctctgttatcaaaggcatttgaaataggattttacttaaacaataatggaacacaggagtatttaaagtgaagaacactttgcctgaatgtgatcagggcacataagtgacattggcgtgcttcatatggcgtgcttggagccagaaaaacttagcggtttattttgtttatatttaagcacagctttaaaaaattcattatcgtttattcagtgtccgaattgaggcccatttgggaagaaaattctagcactggtggagaattatagaataaagattataaatggttggataaaaaaaaaaaaaaa

SEQ ID NO: 56167 - DNA, 433 bp, Homo sapiens
accgttatgacatgattacgaatttaatacgactcactatagggaatttggccctcgaggccaagaattcggcacgagatcccaaagaaataaaaacagggtctgaaacagatacctgtacatctacattcaaaataacattattcacaatagccaaaaggtggcaacaacccaagtgtccaccaatggctgaattgataaacaagatgtggatatacaatggaacattactcagtcttaaagaggaaggagattttctgcactaacttgacccagctcctctgacatgattcgcatgagcctctgattcccacactagagtggaagctccttagggagaaggcctgtgtttttcttgtctttgttgccttttcccctaacctcagcttaacacgatgattgcacaaagtgctcgttaaggcttttaaatgag

SEQ ID NO: 56168 - DNA, 385 bp, Homo sapiens
gtggtcccagcacaaggcctgcacagaggtgggttatctgctgaattgatttaacaggataattcattttctgcccttcctagggaaagatttgtcacggtgagccaataccagggggaaggggagaacagaggcaggggcctgctctgctttacttctcacacccacagtccccttcctatggtcaggagccactggccagcaacacagcaactcctgcctctgtccgccctctaggaatgagctgaaagaaaggcaccaacagacaacaagcaagttccggatattctttggaatcatgggtggtccttgtttcgccctcatcttaaagccctccagaccccaaaccagtgtccttctccctcctcccttccttttctagaat

SEQ ID NO: 56169 - DNA, 568 bp, Homo sapiens
  misc_feature (1)...(568): n = a,t,c or g
gcaagactggcgtttactgtggatgataatccgaccaagccaaccacccggcaaagatacgacggcagcaccactgccatggaaattctccagggccgggatttcactggcaaagtggttgnggtcactggagctaattcaggaatagctttctgaacctgaanaactttgtagattgaaagctgtanctngaggacctctctctgtggagatcagcatctcagtatccagggggaagccatctcttcacccaaagcttccgctaggagatnaagaggcccggaaccccgcagtcctgaatgctaaccagtanagacaagggaggaattcatttctgtttgtgttcaacatanactgagcangaagggccaggtgttttacnactctttggagttagcagcttgtnggctctgatttggtaaaagcaanggaaatgccttcagcacngtgaacngttacatgcaaatgttggnaagtnttannaaagggaatttttangcnanggaattnncattgnggaangccctgcttcnttttaacncanctntcgtnnctnaattggtattct

SEQ ID NO: 56170 - DNA, 416 bp, Homo sapiens
  misc_feature (1)...(416): n = a,t,c or g
gcttggctccatccgctttggggtttccagtctttgttggagtcaggactctcaaaagaagggaacgcgttataggggcccaaactggatttggggactgcaaaggcgagcagcgctcgttcagtttatctcctgggaacgcaccaggagttgggcacacgcgggagctgggtcggtgctcctggcaggtaacggcttgttcccggtgcatactggcagactgcgaggaacgggaggccgagaggcagcaagcgaaccgcatcctcctgcagntgcagcaggaggccttccagaagagcctggcacagccgctgccgctgaccctctgtgcgtgcacaactcgtcgctcttcgccctgcanaatctggngccgggtctgacgactcgaccaaaatcacntagcgnnnnnnnggggg

SEQ ID NO: 56171 - DNA, 723 bp, Homo sapiens
ttttttttttttttttcagagagcaagctatctgtacttgtgcgtttctcctaccagattgtgcatgcctcctgtgggcagagcctgttgctgacttgctcctgggtctccagcatcacccagtctggagctgaggacctgggtacctacagatttccttccacactgtcagaattgagatgaaggaagcccagagaaatcaagtaccctccaccaggcagagcaaagtcctgggtgcccaaaatccagggaaggcaagggctgggggtacaagcagaggatctgaagaggtatatgagagtggccagcacagacctggcataagcttggtgctcagtgaaggttacctgatgttgctgggcaccagggtgatgcagtgcaaagggccttggccaacccactttgcagcatagctgggtgacctggtacagatcacatcgcatttcagagcttcagtttcccctcaggcagagaaagatgacaagagaagcctggaagggttgttctggggagtcagtgggtaaaaagaggccagggtggatcctggcacatggtgggtaccagaccagtttgtcagaggaggtcctctctccccagaggtacccacactggctgttgcaaccaaacccttttgttgttgcttttcagctgcgtcacacgaaggccgtgtccaactgcaagagcccgcctgcttcactggcccccagtgcagcctggcacagc

SEQ ID NO: 56172 - DNA, 532 bp, Homo sapiens
  misc_feature (1)...(532): n = a,t,c or g
gggaatttgtcctactggcaagtaggagtacggtatttctgcaagaggggatggccagcaagagcagagactagaaatgagaaaggagtttaaggtatttcacaaacaagtacttcagatgactgaattgaaatctgttggaaaaagccactactcttctcattgttaaattcatgacatgctttggtcactattgcctgataattttattcattttatcaaaaatattcattagtcgaggccaggcgcagtggctcacacttgtagtcccagcactttgggaggccgaggcaggcatatgacttgaggtcgggagttcaagaccagcctgaccaacatggtgaaactgtatctctactaaaaatacaaaaattagctgggcatggtggcacatgtctgtagtcccagctgttcagcagcttgaggcaggagaatcacttgaactctgganacgggggntgaattaactnaggtgtgcantggactccaanccctgantgacanaanaactcgntctcaaaaaaaaaaaaaa

SEQ ID NO: 56173 - DNA, 984 bp, Homo sapiens
  misc_feature (1)...(984): n = a,t,c or g
ggccaagcacacagttcacagctcctcttcactcagcagatgctttaaggggttgctgatagcttaaatttagtaaccttttcaatcactaattcttcagggttcctttcaagatgtctttccacgacatctgaaaacacaataaatttcaaaaacatgttcaccacttgaatctgaatatcgagaaggccaagtgtaagactccaaagcctctcaaagggattttccagatggcaaaatgataacagctttcagattagaaacgtaaacctaagtgcagtttttcaccgtgtcagactcaacaaataccctattagtgtgttaaccacactggtgagacattcaggccgtagatcaataanggatgatttgagaacatggatgntaatgaaagagnggatggccaatttgactgtaggtaaatacctacatcttaatggtaaccaggagagatataactatacaaaagccatttnnnnnnnnnnnnnnnnnnnnnnnnnnnnnnnnnnnnnnnnnnnnnnnnnnnnnnnnnnnnnnnnnnnnnnnnnntntaataaagtcnttttggggagtacagacnganganagggatcctaaacgtaataaggaacctttactttactacacnggctttcaaagnaccccaacnattctattcccttcttacccaatttctttcgggggattnaantggtntcatcacactntttattgggctggctnccnantgggccttcttcaaaagancncaanaattncnnangnccngncnnaaanaaannntcccnaaaccnnnggggaantnncannttttaaaacgggtnaacctggttggntnaannaaaatttttcntggaaccttctaccnantgggcccanggcccctggggcccananccctttaaaanttnnaacggncaangggaaacncaaanttnncccccnannaccccccnnncttnntggggnnaaaaattttctccc

SEQ ID NO: 56174 - DNA, 1307 bp, Homo sapiens
tgttttttctttttcaagtaactaaaacagcatctacatgtagagtgttgtggagagctgaaaccagggtaaagtcaagtgcagcatcagtactgcgagacccaccagcccctggagagggtcagccgagaatctggtagtgaagcctgtctagggtcccggcaccctcaccctcagccacctgcagagaggccagggccccagagactagcctggttctgaagtgggcaggggtgctgccagagccctctgccccttatgttgagaccctgctttcaggacaggccagccgttggccaccatgtcacattctgagtgagtgtcacaggtccctaacaataattttctgatctggagcatatcagcagaatgcttagcctcaaggggcctggcagctgtaatgtttgatttatgatgagaactatccgaggccacccttggcctctaaataagctgctctagggagccgcctactttttgatgagaaattagaagagtacctaatgttgaaaacatgacatgcgctcttgggatctgctgttctctccagggctccagaacctgatacctgttaccaaagctaggaaagagctttatcacaagccttcactgtcctggcatgagaactggctgccaggctcagtgtaccccattaactgtgaatgaatctgagcttggtttcctttattgcttcctctgcaatatgattgctgaaacacattttaaaaattcagaagcttgtcactcctgttaatgggaggatcagtcacacatgtgtagtacaaggcggactttgtgtttgtttttggtgttaatttttagcattgtgtgtgttgcttccccaccctgaggagaggacaccatggcttactactcaggacaagtatgccccgctcagggtgtgatttcaggtggcttccaaacttgtacgcagtttaaagatggtggggacagactttgcctctacctagtgaaccccacttaaagaataaggagcatttgaatctcttggaaaaggccatgaagaataaagcagtcaaaaagaagtcctccatgttggtgccaaggacttgcgaggggaaataaaaatgttatccagcctgaccaacatgggagaaaccccgtctccatttaaaaatacaaaattagcctgggcatggtggcgcatgcctggtaatccccagctactctggaggcttgaggcaggaagaatcgcttgaacccaggaggcggaggtcgcagtgagccgagatcatgccagtgcactccagcctgggtaacaagagtgaaactccgtgtcaaaaaaa

SEQ ID NO: 56175 - DNA, 306 bp, Homo sapiens
gggacacttcctggctctcttccagggccaatggcaacatctgtccacagctgggctccagggcaccctacccactcctctctgagatgctgttggcatagaggcagtgctggcaagaactacccaatgacagaggatcagctgggtgctcatttgatgaggaccgccctgactggggagcacttgcaccaagatccctcggccagcctgtagaaccgtacctatgactctggcatcagattcctggcaccccagtcccactagctgtggtcccaagaatgaacctgcattttaacaagattcaaa

SEQ ID NO: 56176 - DNA, 553 bp, Homo sapiens
actagttctagatcgcgagcggcgcaaaatggcggcggcgatgaccttctgccggctgctgaaccggtgtggcgaggcggcgcggagcctgcccctgggcgccaggtgtttcggggtgcgggtctcgccgaccggggagaaggtcacgcacactggccaggtttatgatgataaagactacaggagaattcggtttgtaggtcgtcagaaagaggtgaatgaaaactttgccattgatttgatagcagagcagcccgtgagcgaggtggagactcgggtgatagcgtgcgatggcggcgggggagctcttggccacccaaaagtgtatataaacttggacaaagaaacaaaaaccggcacatgcggttactgtgggctccagttcagacagcaccaccactagagcgtgtggcacgccgggggtcccgcagcatcctgtgagcatttccgcggggaagctgagcacgtgaagctcgctggttctgtgcgaagggtattcctggtgctgaataaagggtgttgctgtcaaggctgaaaaaaaaaaaaaaaaaaa

SEQ ID NO: 56177 - DNA, 366 bp, Homo sapiens
ggagactttagcatgtatttaagcagagggaacgttgctgtaaaagagaagacagaaagagaaagagagagaaaggaagaaataggttggaagtctgagaaaggaataagaaaattgttgaatcactaattcagaagactgtgtgaaaggcacaagtgaagagagccttggctaggaggaggaaccaccctgagactgatagaaatgggatcacggtggcagtgggtaccatgacaaggagtgcctggaagctgagatagaggataccaatagtctcaactctcttaatgcagtggagacgatacagtctgctgaaaatgagtcagggtggcccggacgtggtggctcacacttgtaatcccacaa

SEQ ID NO: 56178 - DNA, 1434 bp, Homo sapiens
ttttttttttttttagcagacgatgctatcagcagataatagcacttttattagcagtactcagcaggaaaagaaaaagcagttcctggttgttatttctgttttctctgtttcttagggcgtccacttttcttctgtcctttcttcttcgttttaaggagaacagctttttctccaataaataagcttttaggatgtccttctgcagttttggaagtaaaattaagtccctgcttaggtttactgacattcttcaatcgtggatttgaattttgttgtttaaatttttctttattaacagaacgcatgactctgagttttctccccatgagttcagaattatttaatttcagagcaagatgaacagaatctgtattctcaaagagcacatagccaaaccctttgccgatgcctgtcattttgtctctcacaatcctcacggccatgatacttccacagtccagaaagtgcttctcaatggcagattcttcaactttataagggagattccccacaaaaaccgatctcttgtctctagatgaggtctcagatgcgagatcaactctaatacgaaatccatctgcaatctgggccccatttcttttcaatgcttgcgtggcagcactctcctccttaaacacaacataggcattaatatttttctgatcaggatgaattttacgttttattgctgccaactttttggatagcgttccctctgctggaatcagagaacgaaatcgtacagattctatttgtccatactctttaaaaaacgacttcagcttcttcttattacatgtaacaggcaaattcccaacaaacacagttctctcattctttaatctctcttcttcttggttgatttgaattttctttctttgactgacaactgtgtcttctgtgtcatcaagtatttttctatctgctactttaacaccaggttgagaatttttccttttctgcccttgtttctggtgaatttcttcttctaaatcagcactcgctaagagcgctttccctgtctgccaactttttttctgcgttagtgtgtttcttcttcgctttcacttttttggcaggttcttgcgaaagtggtctttcaatctgggatgtactttcttcctcctcattccgtttcgtttttttgatggtttgtttaggcacaggcacgtacacgggttgaatctggggctccagagaactgaagagggacgccagccgaccggtgccacctctggaatggtgttcgccgcgaaataagctactggcgacctgtccaagcctgtagtcttccggcggactcccgcgaacgccgtcgtcaggattctctccctcctggacacttctctttctcttccgtttgctcatcccttccaaggccattcttactccaaagactcccagactgcagtgcgccagctcgcacttccg

SEQ ID NO: 56179 - DNA, 331 bp, Homo sapiens; identical to SEQ ID NO: 40044

SEQ ID NO: 56180 - DNA, 1198 bp, Homo sapiens
  misc_feature (1)...(1198): n = a,t,c or g
aaaaaagaaaaaaagagaaaaaagcgaaataggttatattttaaaaacaatagaaaggcaataagttgcgataactcnttactattgaccaaggttatacaggaaagagactgaagtgtacccttgaataggttttctgtagtcagagttctaaactcctaatttgtaacttggactttctaattgcaaatggcaataactattaagttatcagcaataataaatttagcattaaatttgagtacaatgttttgtttttgcactccccatagtgcgtatgtattaagacagtggatagtgtttaggtcctgttaattttctttggaattcaatgtggttgtgaatcaaacttaaggaaggaacgtttaaatagcaatgagatacagaattatgggcctttggaacaagcccgacttcccctaaattctccttagtttgttaataccagtattcagattcctgattcatttatacatctgtttccatatggcagggacattatgatacttaatgaataatgctttgaggagttctgcagttaactttcaagtcttccagatgattgtcaacaacaaaaaaggcttattgaatcccatcttgctatgcaagttttatcagatgatcaaatagtagatctgatacatccccattgtatgtacgacattttcaaaccaagtcttaacttttcaaggacattttagtagctaattcaggggagggggaagaatgatgcaggtttttagattgactgactatttttgagttatggggctcattttgaaagactgctgtccagatcagcttgttgctgcagataatagaaggttcttatgaatccaagttgtatattcacttgtaggataatttaaaaattagattttttttgcatatgagcaaaaaccttttgcctggatacaggagaaggttggactttatctacagttaaccttttgattacagcaacagcctctgggtgagagtagaatttatagagggataatttgtcaagccatagaaagaaaatctaaattaatctagtaagtgtatgacctctcaccattttaagaggtatcagattcatttgcactattaggaatgctagttttgtgcaaaaataatgccttacctgttttttccccacatttaggttgaaaagctttcaaatgttccaagttatgctgaaccaaaaaaaacaaaa

SEQ ID NO: 56181 - DNA, 373 bp, Homo sapiens
gtccacagctgctcccaaattaccaaaaatcaaataagtagttgccatgtgtgatagcaggattagaggctgcctcaatttccattatggaaaaataacgtaaattgccacaagtcccgccccccagtctcaaataagcacaaaggacacttttattcagatcctgcatactgtgaaacagcattgttgcctggctgcttcagtggcgggctcaattctgctggatctgtcactacacaaccaacagccagttaaagctatttcctagcttctgcaggacagctcaattcatgatttttcttctgaaataactgaactaaggatttgtttctggataaaattatgaaagtatttaagtgccaataccacagac

SEQ ID NO: 56182 - DNA, 404 bp, Homo sapiens
gtcaaaggatgctgagaaggtgcctgtgggacccctttgggaggctgggaaggtgctcaaggcaaaagggccgggctggagaacaggcttggggaatgtcagtagaggcagaggtggaagccacatatgacttggtcatcccttggaagcagttgagccttgaagggcagaggcagctggaggcagccatggggtagaggcaggcttgggagcctgttcagtgctggtgtgtagggtcctgggagacaggagtgatggcagggaggctgctgaggcggcaggctgggctgggattttagcaggctggaggagcactgttgggggatgctgagttgagtcaatccatgtctggagttggaggtgagaccctcctggtggcggaagaaaagtctcaagctaagaaa

SEQ ID NO: 56183 - DNA, 340 bp, Homo sapiens
gcctacatgtttattctctctcatgttgggaaagctcttttgaaatgttgcacatgccttggttatcaatttacataaaagagaaaagaatattattaaaatgagtggatgtcagtttactgaggatctcacctaaggactctaaattttcagaatttttttcctctggaaaattcacatttctacaatgacaaaatccccctctaaactcttagttaaaaggtatatgccatcctgcagtatattatgagcgcaagagatggaaagtgacttaggtggaagggactcagtacgatgattttaaagctgctaaattgtaaaatacaaaatgcaagaaatt

SEQ ID NO: 56184 - DNA, 246 bp, Homo sapiens; identical to SEQ ID NO: 42154
  misc_feature (1)...(246): n = a,t,c or g

SEQ ID NO: 56185 - DNA, 326 bp, Homo sapiens
gctcaaataattaatttttttgcaaactttagttattacaggcagcaaaaaccactgtctgaaactaaatctgtgttcaaagatgaagacccctcattaaaagccaaggacgttcttaagattggaactgacataattagtcttgacttacttcattaaagcaagattcaattccttgttcatttgagtgttcattatatgccaggcattgactagttgcaattttatggtccagaattaatattattattcgtaaactagctataatagagtatatacagtgctgtgggaatacaggggaagaagcaattaaatctgctagaagg

SEQ ID NO: 56186 - DNA, 340 bp, Homo sapiens
ggagtggatgcccttgttatcccacttttcagatgaagaaaccaagggcaaaagaagtatggcccagctaggagctgggatgggcttgagcctgcccagcctgttggcagggtgagcctggcctctggagcggagccgatctggcaccttgtctccgctccactgctttgggatttggagccttcatttcattttccgcagaataggatgggaggagctggttcttgggtcctcatggcagtcaaatgtgaggacctctggggagcgccagaccccaaggaggccccagcaagagcagctttcccattgttcctcactaccacgaatggtgggatctcag

SEQ ID NO: 56187 - DNA, 504 bp, Homo sapiens
cggacgcgtgggatgaatttgtctcctttagacaagtatgtttctgttttgactgtcactgccaggtggtgaggaagcaaagagttaagaaataaacaggcaggtctgaggaaggtgatttagaaaaatattttgatttatttaaactttaaactacagagtagaaggaagaaaaaagcaccacttggggtcccactctctaaataccacctgttttaaatgttgtgatatatttctctttatcttttgcctgtatatgaacttgaaaaaatattatttaaaatttgaggaattataaagtttttgctttaaaaacaacagaagctggaaatagaaaaatgggaggagagtattcattttgcaaaagaatttcctcagatttgttttttaatgttgctttattgtttttggaaatctgtgacactcttcgtaaaaagattaaaactgtatagaaaacttcgaagaggaaagtaagaacttgaaataccactatgtaaaaaaaaa

SEQ ID NO: 56188 - DNA, 535 bp, Homo sapiens
gctgactttttactttacataattttatttacagtgatttgttatgccaccatattaattttgaagcagcagtttacagcaaaaggaaaataggtatgttggattattttaaatgatctatatttattaaataataaaattaataaaatttttaatttttctcttttatgcagagttaccttcctaatgacactgtagaatctggcatccatccagtatatttttgcagcacccattatattgaaatgctactgaaggctgagttgcctcttgtgttttcagcttttcacatgtctggttttgcaccatcacagatttgcctgcaatggataacccagtgtttttggaattacttagattggatagaaatctgccattatattgctacttgtgttttccttggtcctgattatcaagtgtatatctgtatagctgtattcaaacatttacagcaagacattctacagcacactcagactcaagatctgcaagttttcctaaaagaagaagcactgcatgggtttcgagtgagtga

SEQ ID NO: 56189 - DNA, 381 bp, Homo sapiens
aaagcctgttgaaggagaggaagcgaatgccgtggggtttacagcaggaaaatccgtggagacagcagatccgagaagcggcgatgtttgcgtagaaccctgtacgtgcttccttcggcctgtcgctcttcccttctctctgaccagcaccatgcttctcctggtgacaagccttctgctctgtgagttaccacacccagcattcctcctgatcccagagaaatccggatctgcgaacagtggcaccagcctctagtctcaatgtgaggtttgactccaggacgatgaatttaagctgggactgcaagaaaacacaaccttcagcaagtgtttcttaactgacaagaagaacagagtcgtggaacccaggctcagtaacat

SEQ ID NO: 56190 - DNA, 597 bp, Homo sapiens
gaagtaataagttgtgctgtgacataatgacggctatgatggcactagacgataggaattttcaagctccatttgtaatcttcctggaccactattgtatatgtggttcctcattgaccaaacgttgttatgtggtgcataacagtatatttaaaatacataataatatataatattatagtggtgcatgaatgtggcaaaagccatgaaggtggtttgagaatgactaaagtttgagtaacagtgatctagtctaaatcatcctttttagatgaagaagtgagtttagcaattgtgactgtttctggggttttctaatttcaagttccctttgccttctaggaaaagcttataacatcagtatttcccacacgaatttactttgccacgtagatagttccagagtgttaagtgcccagtggaaatgaaaatacttagcactgccctccgggaccttatagatcaagcatagaactcataaaaatggtggctgggttgaaaattctcattaatacacagtcaaaggattattttggttttgcttttttaaggtgatggcttttttggtcaacgtgatgttttataaatgagtaatgt

SEQ ID NO: 56191 - DNA, 965 bp, Homo sapiens
atgattacgaatttaatacgactcactatagggaatttggccctcgaggccaagaattcggcacgaggttgcggttgttttccttctctccgtgcaacgctggcaagtctcaaagtcgccacagaaacatgcccctgattcagtgcctctgcttagctgtaacatgttaatcagaactacctggcatcttcctgaacaagactttcaataggggccagtatgcttcgcttcatccagaagttttctcaagcatcttcaaagatactgaagtactctttcccagtgggactaagaaccagcagaacagatatactttctctcaagatgtctctccagcaaaacttttccccatgtccaaggccttggctttcctcatcatttccagcgtatatgagcaagacacagtgctatcatacatccccctgcagctttaaaaagcagcagaagcaagcacttctagccagaccctcaagcaccatcacttacctaactgacagcccaaagccagcattatgtgtaactctggcaggactaatccccttcgttgctccaccactggtcatgctgatgacaaaaacttatattcccatattagcttttactcagatggcttatggagccagtttcctatctttcttgggtgggatcagatggggttttgctctaccagaaggtagtccagccaaaccagactaccttaatttagctagcagtgcagctcctcttttcttttcatggtttgccttccttatttctgaaagacttagtgaagccatagtcacagtaataatgggtatgggagtagcattccaccttgaactttttctcttaccacattatcccaactggtttaaagccctgaggatagtagtcactttattgggccactttttcatttataatcactttagtagttaaaaagtagttttccaggaaaaaggacataagagaccgggtcaagtata

SEQ ID NO: 56192 - DNA, 341 bp, Homo sapiens
gggatttgataataatgggttgtacatatttcttaataggtatctcaggccagtatagtggctaacgccaaagtgctgggattacaggtgtgagccaccgcgcctggctgggcattgggatttttaatgtgcagctaagattgcataccaatgctttgaacccagtccttgtcatctgtggttgtcatggctcattagcaacaattctctggtaatttgttttggtatcttatgtaaagtggtctctcccagttttcctctctctttcctttgtgacacttaacacagtgtacttttggcttggttacttgtttgtggtccttctcccctctacggtagtg

SEQ ID NO: 56193 - DNA, 306 bp, Homo sapiens; identical to SEQ ID NO: 42886

SEQ ID NO: 56194 - DNA, 409 bp, Homo sapiens
ggacaagagaaagctcgggcgacggccatcttcatccgaaatcatcacagaaggaaaaaggaaaaagtcatcttctgatttatcggagataagaaagatgttaaatgcaaaaccagaggatgtccatgttcaatcaccactgtccaaattcagaagctcagaacgctggactctccctttgcagtgggaaagaagcctaaggaataaagtcatctctctagaccataaaaataaaaaacatatccgagggtgtcctgttacttccaagtcatcaccagaaaggcaactcaaagttatgttgacgaatgtcctatggacggatttaggacgaaaattcagaaagaccctacctagaaacgatgctaatttatgtgatgccaacaaggtgcaatcagactcattgccttca

SEQ ID NO: 56195 - DNA, 227 bp, Homo sapiens
  misc_feature (1)...(227): n = a,t,c or g
aaattgttattgactacagggttatttttatgatcataataaaaattatacagaaatataaatannnnnnnnnnnnnnnnnnnnnnnnnnnnnnnnnnnnnnnnnnnnnnnnnnnnnnnnnnnnnnnnnnnnnnnnnnnnnnnnnnnnnnnnnnnnnnnnnnnnnnnnnnnnnnnnnnnnnnnnnnctaaaaatacaaaatatagttgggcattgtggtgcatgttt

SEQ ID NO: 56196 - DNA, 367 bp, Homo sapiens
  misc_feature (1)...(367): n = a,t,c or g
aaaagaccaagtcacagctctagatcttacattccagactgtaaataaattattataaataaataattagctgatatagctctaaagaaaaaataatggaggacagaaggaaagctgggagggagagactattttagagaaaatggtcagaagactgttaagctgttacttgaaccacaaacggaagtgtagacattttatgtaaatgtgtaaggtgatttttaggtatataaaacatattagntnnatagntatnanggctctgnnnttataaatgttttgaatatagtngangaatngctagttgtncngcttanttanacntcatntggnngttgcctcttttttttgnnantgtgattacttg

SEQ ID NO: 56197 - DNA, 246 bp, Homo sapiens
ccacagggccatggacattttgagacagcctaatagccactaagtgataatctgatatggtaaaggatttgatgaagtaaatgcgcaaaagcttgatgctttccctgccactcccaggaggtaggtcagttcagtttcggaaccatccaaggaattgtttcattcaactaggaccaagctttgatcttcccaggtggacaccctagatgtccccgcctctcccttaacttggacccaaatccctgg

SEQ ID NO: 56198 - DNA, 314 bp, Homo sapiens
gagcagtcaggcagtgactgccttcggctttttttctgctgactaagatctcctatagagagctacaacaatgcccaaaagaaaggctgcaggtcaaggtgatatgaggcaggagccaaagagaagatctgccaggttgtctgctatgcttgtgccagttacaccagaggtgaagcctaaaagaacatcaagttcaaggaaaatgaagacaaaaagtgatatgatggaagaaaacatagatacaagtgcccaatcagttgctgaaaccaagcaagaagcagttgttgaagaagactacaatgaaaatgctaaaa

SEQ ID NO: 56199 - DNA, 379 bp, Homo sapiens
catttttggtgggttttctcaattttaaaaaagaattcattttaaaaaataattattttcagagaccaaataaagacaataaaaatgactatcacataaaaatccttgttaaaaaagagatcttaaattatgttggctctccctcaaaactattaaattagaaaacgaaactaaagctccagtttgtagaggctgttggacctcagtagacattcttcttttcaatcacaaatctctctctactactgttctcatgggaagaaaacaaggtaggacttcttatctttcatagtttaagaatctgacaggtcactgatatggagcccctgaagaagcacatcatctgggctcagaagattattttttggtttggtttatt

SEQ ID NO: 56200 - DNA, 764 bp, Homo sapiens
gaatttttggaacaaattttaaatataggcattactagaggaaaattatctatggactgtcctattaatgaagaatgtctgtcttacctccgtttgttttgggaggaggagaaaatatagaagaatctaataaggaacaagtgattttacttttttagctcccagctactgttgtgctcgttttaattgctgttttgaagatctgctgcttaattatccccatcccttagccggagatgtggagtgtttcctttcagtttttggtgatgttgaattcttttgtattcccctcctggggccaggggtcagaattcccaagcatgaccacagcttcttttaaacattaagcttcccagtgggaagggaaactccagctcgacaggtaaagggagtgggtggggttgctgcctgcaatttctctaaaaccgctttagtgccttcgtacatacacccagacatcctgagcaagggggacgcacatgtgtgtgtgtgtggtccagtcactccacagatgtaagatactcacccataaaggaaattggagtggttctggacaggccccaaaggcagtgggctgaatttaaaataaataaacaaacgtcaagcaagttaatatgcttatgtctcagtaatgtagaatgccaagttccttcctgtgtcgtgtgccctccattactgtgcattgattcctccaggtgtgtaattgtgacaactgcagtgatttggaaagtctctttgtcttggggcaaattagaaggggttcc

SEQ ID NO: 56201 - DNA, 343 bp, Homo sapiens; identical to SEQ ID NO: 36694

SEQ ID NO: 56202 - DNA, 369 bp, Homo sapiens
gtccctcctcactggttctgcaacagcattgctgccacagagagcaagagagcctgagagtagcatgtttagggctgttggaggtgactccatacggcagtcactgccaccagcagttcacaccaactgggacccagagggtggcaacatcactgttagtgccattacccacaccacactggcttcccagagagttaagaattcactcattctcttgccactactggaatttgaacaagccccctggaggcccaagaatcagcctgccagtaaacaccaacacaggtgccagaatatattgctcagtgacacaaaaacaggcatgctcagcctaccacttccaccactggcccacctggcttcccagtc

SEQ ID NO: 56203 - DNA, 437 bp, Homo sapiens
caattcctgaggctttaaaagctgggaagaaagtgaaactatctcatgaagaagttatgcagaaaatcggtgaactctttgctctaaggcaccgtataaacttgagttcagacttcctgattactcctgatttctactgggacagagaaaaccctggaaagactttacgataaaacgtgtcaattccttagcattggccgaagagttaaggtcatgaatgaaaaacttcagcactgcatggaactaacagatctaatgcggaatcacctgaatgagaagagggcactccgcttggagtggatgattgtcatcctcattaccatagaggtaatgtttgagctgggacgagtatttttctgatcaagtgataaccaaagtgtcactgcaagagatattcaagttctacaatcaaaaattaaatgttcggcccggcgcgg

SEQ ID NO: 56204 - DNA, 186 bp, Homo sapiens
gccccgtttttttcccactgtccaggaatcgatttaatttttacagttgtttactttctcacatttttactaagtccagaatatcatcaaactcacaaaaccactggtcaaaaaaacccaaatggccactaattaggcaatacagcacctgcctcaaacttgggttcatatagatttttttcctcc

SEQ ID NO: 56205 - DNA, 409 bp, Homo sapiens
  misc_feature (1)...(409): n = a,t,c or g
aaacaaactgcacccactgaactccgcagctagcatccaaatcagcccttgagatttgaggccttggagactcaggagttttgagagcaaaatgacaacacccagaaattcagtaaatgggactttcccggcagagccaatgaaaggccctattgctatgcaatctggtccaaaaccactcttcaggaggatgtcttcactggtgggccccacgcaaagcttcttcatgagggaatctaagactttgggggctgtccagattatgaatgggctcttccacattgccctggggggtcttctgatgatcccagcagggatctatgcacccatctgtgtgactgtgtggtaccctctctggggaggcattatgtatattatttncggatcactcctggcagcaacggagaaa

SEQ ID NO: 56206 - DNA, 389 bp, Homo sapiens
  misc_feature (1)...(389): n = a,t,c or g
gaaacaaactgcacccactgaactccgcagctagcatccaaatcagcccttgagatttgaggccttggagactcagatcctgaacaagagagaacaaaatctctactttgatggaacttccattctgtggggaagagactgacaataagcaattaaataaataagaactcagcagtaggccttgcctcagatccaaggtcactcggaagaggccatgtctaccctcaatgacactcatggaggaaatgctgagagaagcattcagatgcatgacacaaggtaagactgccaaaaatcttgttcttgctctcctcattntggtatttgttttatttttaggagttttgagagcaaaatgacaacacccagaaattcagtaaatgggactt

SEQ ID NO: 56207 - DNA, 378 bp, Homo sapiens; identical to SEQ ID NO: 43695

SEQ ID NO: 56208 - DNA, 330 bp, Homo sapiens
  misc_feature (1)...(330): n = a,t,c or g
ggagcagggctgtcgtcctcagcagcagcttggtctcatctcaggatcggctgagttggatggtctgggtcttgctggctggtccacttgtcctgggctgctggtttcagctgactgtggagatngaaggcanagttccgtggtcgccgcggaacttcaagggtccttcctacccgcgttgctgagagtctgggtttacgcgtcacctcgggcgggacccgatcctccgctcctgaggcccccacaatgaagcantcggacgcgtctccccaanaaaggtaaccgccagcctctcttgtacggaagggggctgcctgcgtgggatgcaat

SEQ ID NO: 56209 - DNA, 524 bp, Homo sapiens
catcagaccacacccagcagtcagaaaagaggtgcaggggcccgggctgggacagtgaagagtgctgggcagtctgtggtcctctgtatctcaactttttcatcttaaaaaaacaaatagggttgtgtgtgtggctggtggtcataaggtcctttctggctctaataacctgagcttctgttatgaagctgggacccttagagcctcaggatgatcctctgtttgtttgtgaagccccaatcaggtgctaagcaccatagtggcacttagctgaagctcctctgtaactcctgtggggccctgccttgcccacccccgacagctgctgcagtgctcctgagcagcacaggcctgatggagcttctggagaagatgctggccctcaccttggcaaaggcagattctcccaggactgcactcctctgctctgcctggctgctcactgctccttctctgcccagcagcacaagggcagtttgcagaaggaccctctattgtcccaggcctgtgttggctgcctggag

SEQ ID NO: 56210 - DNA, 1128 bp, Homo sapiens
tgctgactgttaacatccaaacacctgaatgaaaactgactcatttctgtattggtgtttaaaaatattgatttgcagatgttcacagaacacttgcattttttgattcacattgctaaatcaaatgtaaaggcaaatatgtatatttaataaatgagaagtatttttttattactgaaatttattctcaaagcaaatgtattttgtagatgtttcatttgggagattttgctttgccttaaaacatacaaaataaacctgtcttgtggtctgcccacctcaaaacctctgttaacttgacatgtagaaggagttcagaattctttgataatgtgtggttttcacttttgtttggattaaacaaaaataaaattagagtccatagcactttgtaaactaatgtgaagtttcttgttgaatcataaaagctacctgtatgtactttataatttaatgttctgttagtaaaaattgtcagcattttatctttttctcttctcattaccattttagtctccaatctttccccactctcagcagtcacagttttgcagagcaaaacatttttagaaactgaatatgtgtgagttctatataaaatgaatgtgttagtaacatccatctgctgatcaaggaggcattggatctggtactagaaggtgaaattgattgtagctatcaaagcattttatcaatgtaagtcaagaaaaaagaagaaaactgtgaacctctgatatttttaacataaaaactgttcccaatgagtgttctcttgctgattttgtgttaatgttattgtctatgatttttaagctaatgctaatataaaatctaaaatttcaacatgatgacaacaattcctgtagcctgtttttaccattaggatgtttttgaaaacagatgtcatcttagaaattatatttttaagtgcaaataaatcatcctgacttgaaagtcaacacattttatttttcattccgtagtatcacagaatatgctgcatttagatacaggtttaatttgccagattttctcaaaattctgtatttttatattgctacaactggtttacttaacatgcaattgaattgttatttaaataaattacatttgatggaaaaaaaaaaa

SEQ ID NO: 56211 - DNA, 1055 bp, Homo sapiens
ccagtttgttttagcttattataggttttggaggaactttgccattttgtaatctttcaaatcattcttcacccttcctcacatcagcttcctgcttttcccagtgttttactgtaaattgtgtagcatatgacaaatcttgagctgactttcctcttcacctgttatggctggagtattttccagacctgaagggactcacacttgttttgatacttggatcacatctccgtgaggttaggaaggtaaatctaccaacaggaagccctgtactctgtattccaaggccattggtaaatgtgttggtgccactgatcggactgtatgaccttaaacaagtcaccttagttttcagtgaaatgggaatatcattgtctcctctttcatgaatgctgtgagaatcagatgtgcaacaggtacagacttgccctttgaaatctatacctctggatacattagaggcattttattaacaaaggcccttctaaatgtgctatttatttgacaataactatcagatttgccttaattttgtgtttatagcatttatcaaaacgtatcctcatagactttatgcagattaatatggtcaattgatttggataaaagaaagtaatttcagggtttgtttttaagccaggacaagaagtgcaaatgcctctttgaagcaatttaggctaaactgattttgaaatttcaaaatgttttattttactttgttttattaagccaggacaagaagtgcaaatgcctctttgaagcaattcaggctaggtaaaccgattttgccatttcaaaacgttttattttactttgttttatatcagagtcttataaaacctgctgcaaatatttctgaatgtctttgtaaaagtgtttgttagtgtacctgtgattatagtacttcacttttttcctttggattaattggttaaatgaatgagaaatgtgttatgttttttactaaaaagtataaattaaaattttggaaagaaaaggcaatattatctggctccccaattaaagtttgattttattgtcacaaaaaaaaaaaa

SEQ ID NO: 56212 - DNA, 349 bp, Homo sapiens; identical to SEQ ID NO: 36810

SEQ ID NO: 56213 - DNA, 286 bp, Homo sapiens; identical to SEQ ID NO: 40152

SEQ ID NO: 56214 - DNA, 388 bp, Homo sapiens
gtgatctaggtgaggggaatggaaggtgcagagaccagagctgagagggcctgaggcactttccagagcgtggggaggggcctccaccaaggcgagaagggctgcaggtccagatcaccagcgtttgtagacagtagtgtggcgcttggagtttacctgagggccagtggagctccagggacctatcaggacggggacctgtggggactgggaaggcctgtggggctgcgtggagcccggtactggaggccgacgggggtgacggggacgctgagggcacagagcggaggggcatgatggctgctgggccgtggaggtgtccagagtgactgtgctggggctgctccatcgttgtctgacctccggtgctgccgctgtggccgttctt

SEQ ID NO: 56215 - DNA, 1271 bp, Homo sapiens
ttttttttttgaaatcaaatagtagatttattggctgtctctgtaatacaatgtggtgaaaacgtcttaattcaggacatcttccaccttgttttggcttccagttgtactgcaagaccagtgtcaggcacataggctgattaatcagtggacaacagaagcaaactgctgctgggttacatgtctacgtgatccattccacagttttaggaattttttttttctttcatagcatcttcctcttttcaaattccttgtagatcgtggttcccagctgtgcaggagacatactgaccacaactcctgcactctgaagggcagagatcttctctttagctccaccttttcctccagcaataattgccccggcatgacccattcttctcccaggaggagcagttaaaccagcaatgaaggacactacaggcttggaatttggacctgaattatgttgcttcaaaaattctgcagcattctcttctgcattaccaccaatttcaccaatcaatatgatgccttctgtggcagaatcgttcaaaaagatttcgaggcagtcaataaaatctgttccattaaaaggatcacctccaatgccaacgcacaaagactgccccaatccaacttgcgttgtttggtgaactgcttcataagtcagggtgccagatctggacacaatgccaatcctccttttttggtgatatgggccgggcatggatgccaatttaccattctccaggattgatgactccagggcagttgggcccaattagccttgtcttttcctggccgcagcagtttgtgcttgactcgtaccatgtcctgctggggaattcctctagggtgaacaaacaaccaagggaatttctgccctcaatagcttcattaatggcagcagcagcaaaaggcggaggaacataaatgacagaagccgttgctcctgtctgttctttggcctccttcacagtattaaagacaggtaagcccagatgtgtctggcctcctttccctggagtggttcctccaacgagtttggtgccatattccaatgcctgctggctgtgaaaggtgccctgtttgccagtgaaaccctggcaaataatctttgtatttttatcaacatagagatgttgccgagaagctgtgtaggaacaatgccgaattccattctgcggcaggaggaagctgcgcgacaggagacgggcggcggcgaggccgctgctgccggagaccatggtagcgatgtcagcggcagcggcaagggttgcggtcat

SEQ ID NO: 56216 - DNA, 406 bp, Homo sapiens
  misc_feature (1)...(406): n = a,t,c or g
atttggaactgtcggtttgcaaatcacataataaaagccctcattttactgtagagtcacacttaacattagacaaaattatatatctagattgataactagaccgaactaggtggcttttggccattgctacaaattaaatccaacctggaaaaaatattcaggctgtaaaggcagttccaaaagctgtctccaaaaatcgtttgggacaacaatgtctcattctttttgtcttccatggggctttgcctaactcctcgaagatagctcaaactcagaaaatgnttatctgggtgagtcactttaataaaaatagtcttggtacctcatggttcacatgttatttatttatttatgaaacagtctcctccagcctgggnggacagagcgaggctccatctcgaaa

SEQ ID NO: 56217 - DNA, 314 bp, Homo sapiens
tttacttttttagtgcggccagtagaatatttttaattacttatgtggtttgcattatatttctgttgtacaggcctggatagggtcatgggaggggaactgagctggggaaaggagtgggtttgtggaagaggtgatggactgtgaggccagggagttagaaggattatctgttgatactgaagtggccacaaatgagaaaagtaattgtgttggggagagcgctgatgaacgcagcgctaacgttttgaaggaatgcgagggagcgatgggggtctgtctgttaataagcacaaggtaccgtagcaggtggt

SEQ ID NO: 56218 - DNA, 1259 bp, Homo sapiens
  misc_feature (1)...(1259): n = a,t,c or g
tttctttttttacttatttaaaaaggccttggtggcaggaatatagtgtaaaaatcattggaaaaactaaaaggcatcgatacatatccgaatatacattttgtacataaattacatttcctttagtctttctgagtgaggtcctgattcagtactgaggtctagtaattaagaggtcccgggagctgcacgttcaggccggcatagtccaccatgtacattggccattgcacgagtgagatctggttggccgatgccactgaatccgggttagaggacgaggaagaggaagacgaggaggaagaggagacggaatttccttccgagacccgctttctcttgcgcttgggaatgctgctgtctttggctggcaccttggcatcattgcagatttctgcaaagggttggagctggttaatgatgaccatgcggacatgctctcgggccttcaggatcttctccagccggtggatgtcgtacgtgttggggttccggaaggggatgtcatcaggcagacccgtgacctccacggcgtctgggctgtcccggattagtttataagggaccagcaccggccggtttcagccagggcctcaccgtatttctcgttgaagagttcctctcactgctcccgcaggatcaccttctccccgagtctgttggcgtcatcttcatcaggctttgggatgagtccttggaaaggcctggtgactgtgaacttgatcttgtcagccacagcaagaatcctctccaggttctgggagccgaaggtacagggctttcggaacgggattcctgggggcagcccctcgatgatcacggagccggggttactcttgatccgcttgtaggggacctggaccgggtacttgatgcccaaggcttccccgtatttcttattgaaaaggtcctggacctgctcccttagtgtgttggcgatgtcgatccgtgagagcctcgcgtcataattttcttgaaagccctgtctcttcaggctctcgtccaccagagggtccccggaatccctctcttgactatccatgatgggctctttgactccctcagtgagcagctcgggccgtatcgtgtgttgaagagcagctccgactgttccgcaggggcctggatcacgtcaccgtggctgtcctccacngggcctctcctctgggccgcgcgtcctcactcagacctttgtctgtcagcatctccatcccataaccagaatcctccgatggcaggtgcccaggcatcgagtctgc

SEQ ID NO: 56219 - DNA, 650 bp, Homo sapiens
  misc_feature (1)...(650): n = a,t,c or g
tttttttttttttggttgcgatttttcttttttaatgatcaccatgaaatccactgggccaggccctggtgttctgctgccatagtcagagtcagagtggagggatgaccccaggaggggacaagaagccaagactgggctggggagccgagaaggagatagataagggggagagggtgcagtggggcaggcagaggaggaagtctggagccctggataacaacacagatataaggtgaaggcctccctctgccaccccagccctgagccacagacgttgaggtgcaagaagatggggattttggccacaactcctttcccatgtcaaagggaagacactgagagcagacaaaggccaagtgcccaggggcacaagaacaagttaacaagtaaaacaattagggacaccacctcctttccccagcccatttttcacatttacaactgaagcaatttgacaagatgatataaaaatctcaaacaaattttctagcccctggtcggggtgtggacaggaagtggtatcccgtgatccagaaatcaacacctaaaatccagaggcaggaggcaagccatgaagggtggggagggaaggaggagctccnacagtcactaggtcacctgctccgtgggcctcatctggatgtctc

SEQ ID NO: 56220 - DNA, 1018 bp, Homo sapiens
ctccgtagctgcctgaagtagtgcagggtcagcccgcaagttgcaggtcatggcgctggctgctcgactgtggcgccttctgcctttccgacgtggagccgccccggggtctcgtctccctgcggggacttcgggcagccgcgggcattgcggcccctgtcgattccgcggcttcgaggtaatgggaaacccaggaactttcaacagaggccttttactctcagctttgtcgtatttgggttttgaaacttaccaggttatctctcaggctgctgtggttcatgccacagccaaagttgaagaaatacttgaacaagcagactacctgtatgaaagcggagaaacagaaaaactttatcagttgctaacccaatacaaggaaagtgaagatgcagagttactgtggcgtttggcacgggcatcacgtgatgtagctcagcttagcagaacctcagaagaggagaaaaagctattgggtgtatgaagccctaggagtatgcaaaaagagcactagaaaaaaatgaatcaagttttgcatctcataagtggtatgcaatctgccttagtgatgttggagattatgaaggcatcaaggctaaaattgcaaatgcatatatcatcaaggagccatttttgagaaagcaattgaactgaaccctaaagatgctacttcaattcaccttatgggtatttggtgctatacatttgccgaaatgccttggtatcaaagaagaattgctaaaatgctgtttgcaactcctcctagttccacctatgagaaggccttaggctactttcacagggcagaacaaggaaagacatacttgaaactacacaacaaaaagcttgctgctttctggctaatgaaagccaaggactatccagcacacacagaggaggataaacagatacagacagaagctgctcagttgcttacaagtttcagtgagaagaattgagaacttttcagagaagatttatgaaatagctaataaacattgccttttcttttaattct

SEQ ID NO: 56221 - DNA, 378 bp, Homo sapiens
ggataagttgttcttgttttccctgagatcttgctgctgggattacaggtgtgaaccactgtgcctagccacagaagcttttatactttgttaagaaaactaacttttgtggttttatatagactacattcattttgtcaaacttaaggtctacagtaagcattttattcacttaagtgaatctgagtagtagcaacattatagttcaaattagatagccaaatatgtaccaaaattttggacctttaaagtaatagttgggactgggcacggtggctcacgcctgtaatcgcagcactttgggaggccaaggcgggtagatcacaaggtcaagagatcgagaccatcctggccaacatggtgaaaccccatctctac

SEQ ID NO: 56222 - DNA, 183 bp, Homo sapiens
tataatgcataatagtctctttttcatttaatacataactgtctttctatttcagtgaataataaaagtatcaaaattttaatggctgcatagtattccattatatggatataccatgatttccaaatttcaggtgttttgaacagtagtgtagtgaactttacacatgtctttgagtatagg

SEQ ID NO: 56223 - DNA, 674 bp, Homo sapiens
aacagcaccctgactatgcggaatacatcttccatccaatggacctttgtacattggaaaagaatgcgaaaaagaaaatgtatggctgcacagaagccttcctggctgatgcaaagtggattttgcacaactgcatcatttataatgggggaaatcacaaattgacgcaaatagcgaaagtagtcatcaaaatctgtgaacatgagatgaatgaaatcgaagtatgtccagaatgttatctagctgcttgccaaaaacgagataactggttttgtgagccttgtagcaatccacatcctttggtctgggccaaactgaaggggtttccattctggcctgcaaaagctctaagggataaagacgggcaggtcgatgcccgattctttggacaacatgacagggcctgggttccaataaataattgctacctcatgtctaaagaaattcctttttctgtgaaaaagactaagagcatcttcaacagtgccatgcaagagatggaggtttacgtggagaacatccgcagaagtttggggtttttaattactctccatttaggacaccctacacacccaacagccagtatcaaatgctgctcgatcccaccaaccccagcgccggcactgccaagatagacaagcaggagaaggtcaagctcaactttgacatgacgg

SEQ ID NO: 56224 - DNA, 551 bp, Homo sapiens; identical to SEQ ID NO: 38350

SEQ ID NO: 56225 - DNA, 10693 bp, Homo sapiens
acacagtggtcctccgccggctacggcgctgcgtcactggtttgcaggcgctttcctcttggaagtggcgactgctgcgggcctgagcgctggtctcacgcgcctcgggagccaggttggcggcgcgatgaggcgcagcaaggctgacgtggagcggtacatcgcctcggtgcagggctccaccccgtcgcctcgacagaagtcaatgaaaggattctattttgcaaagctgtattatgaagctaaagaatatgatcttgctaaaaaatacatatgtacttacattaatgtgcaagagagggatcccaaagctcacagatttctgggtcttctttatgaattggaagaaaacacagacaaagccgttgaatgttacaggcgttcagtggaattaaacccaacacaaaaagatcttgtgttgaagattgcagaattgctttgtaaaaatgatgttactgatggaagagcaaaatactggcttgaaagagcagccaaacttttcccaggaagtcctgcaatttataaactaaaggaacagcttctagattgtgaaggtgaagatggatggaataaactttttgacttgattcagtcagaactttatgtaagacctgatgacgtccatgtgaacatccggctagtggaggtgtatcgctcaactaaaagattgaaggatgctgtggcccactgccatgaggcagagaggaacatagctttgcgttcaagtttagaatggaattcgtgtgttgtacagacccttaaggaatatctggagtctttacagtgtttggagtctgataaaagtgactggcgagcaaccaatacagacttactgctggcctatgctaatcttatgcttcttacgctttccactagagatgtgcaggaaagtagagaattactgcaaagttttgatagtgctcttcagtctgtgaaatctttgggtggaaatgatgaactgtcagctactttcttagaaatgaaaggacatttctacatgcatgctggttctctgcttttgaagatgggtcagcatagtagtaatgttcaatggcgagctctttctgagctggctgcattgtgctatctcatagcatttcaggttccaagaccaaagattaaattaataaaaggtgaagctggacaaaatctgctggaaatgatggcctgtgaccgactgagccaatcagggcacatgttgctaaacttaagtcgtggcaagcaagattttttaaaagagattgttgaaacttttgccaacaaaagcgggcagtctgcattatatgatgctctgttttctagtcagtcacctaaggatacatcttttcttggtagcgatgatattggaaacattgatgtacgagaaccagagcttgaagatttgactagatacgatgttggtgctattcgagcacataatggtagtcttcagcaccttacttggcttggcttacagtggaattcattgcctgctttacctggaatccgaaaatggctaaaacagcttttccatcatttgccccatgaaacctcaaggcttgaaacaaatgcacctgaatcaatatgtattttagatcttgaagtatttctccttggagtagtatataccagccacttacaattaaaggagaaatgtaattctcaccacagctcctatcagccgttatgcctgccccttcctgtgtgtaaacagctttgtacagaaagacaaaaatcttggtgggatgcggtttgtactctgattcacagaaaagcagtacctggaaacgtagcaaaattgagacttctagttcagcatgaaataaacactctaagagcccaggaaaaacatggccttcaacctgctctgcttgtacattgggcagaatgccttcagaaaacgggcagcggtcttaattctttttatgatcaacgagaatacatagggagaagtgttcattattggaagaaagttttgccattgttgaagataataaaaaagaagaacagtattcctgaacctattgatcctctgtttaaacattttcatagtgtagacattcaggcatcagaaattgttgaatatgaagaagacgcacacataacttttgctatattggatgcagtaaatggaaatatagaagatgctgtgactgcttttgaatctataaaaagtgttgtttcttattggaatcttgcactgatttttcacaggaaggcagaagacattgaaaatgatgccctttctcctgaagaacaagaagaatgcaaaaattatctgagaaagaccagggactacctaataaagattatagatgacagtgattcaaatctttcagtggtcaagaaattgcctgtgcccctggagtctgtaaaagagatgcttaattcagtcatgcaggaactcgaagactatagtgaaggaggtcctctctataaaaatggttctttgcgaaatgcagattcagaaataaaacattctacaccgtctcctaccaaatattcactatcaccaagtaaaagttacaagtattctcccaaaacaccacctcgatgggcagaagatcagaattctttactgaaaatgatttgccaacaagtagaggccattaagaaagaaatgcaggagttgaaactaaatagcagtaactcagcatcccctcatcgttggcccacagagaattatggaccagactcggtgcctgatggatatcaggggtcacagacatttcatggggctccactaacagttgcaactactggcccttcagtatattatagtcagtcaccagcatataattcccagtatcttctcagaccagcagctaatgttactcccacaaagggcccagtctatggcatgaataggcttccaccccaacagcatatttatgcctatccgcaacagatgcacacaccgccagtgcaaagctcatctgcttgtatgttctctcaggagatgtatggtcctcctgcattgcgttttgagtctcctgcaacgggaattctatcgcccaggggtgatgattactttaattacaatgttcaacagacaagcacaaatccacctttgccagaaccaggatatttcacaaaacctccgattgcagctcatgcttcaagatctgcagaatctaagactatagaatttgggaaaactaattttgttcagcccatgccgggtgaaggattaaggccatctttgccaacacaagcacacacaacacagccaactccttttaaatttaactcaaatttcaaatcaaatgatggtgacttcacgttttcctcaccacaggttgtgacacagccccctcctgcagcttacagtaacagtgaaagccttttaggtctcctgacttcagataaacccttgcaaggagatggctatagtggagccaaaccaattcctggtggtcaaaccattgggcctcgaaatacattcaattttggaagcaaaaatgtgtctggaatttcatttacagaaaacatggggtcgagtcagcaaaagaattctggttttcggcgaagtgatgatatgtttactttccatggtccagggaaatcagtatttggaacacccactttagagacagcaaacaagaatcatgagacagatggaggaagtgcccatggggatgatgatgatgacggtcctcactttgagcctgtagtacctcttcctgataagattgaagtaaaaactggtgaggaagatgaagaagaattcttttgcaaccgcgcgaaattgtttcgtttcgatgtagaatccaaagaatggaaagaacgtgggattggcaatgtaaaaatactgaggcataaaacatctggtaaaattcgccttctaatgagacgagagcaagtattgaaaatctgtgcaaatcattacatcagtccagatatgaaattgacaccaaatgctggatcagacagatcttttgtatggcatgcccttgattatgcagatgagttgccaaaaccagaacaacttgctattaggttcaaaactcctgaggaagcagcactttttaaatgcaagtttgaagaagcccagagcattttaaaagccccaggaacaaatgtagccatggcgtcaaatcaggctgtcagaattgtaaaagaacccacaagtcatgataacaaggatatttgcaaatctgatgctggaaacctgaattttgaatttcaggttgcaaagaaagaagggtcttggtggcattgtaacagctgctcattaaagaatgcttcaactgctaagaaatgtgtatcatgccaaaatctaaacccaagcaataaagagctcgttggcccaccattagctgaaactgtttttactcctaaaaccagcccagagaatgttcaagatcgatttgcattggtgactccaaagaaagaaggtcactgggattgtagtatttgtttagtaagaaatgaacctactgtatctaggtgcattgcgtgtcagaatacaaaatctgctaacaaaagtggatcttcatttgttcatcaagcttcatttaaatttggccagggagatcttcctaaacctattaacagtgatttcagatctgttttttctacaaaggaaggacagtgggattgcagtgcatgtttggtacaaaatgaggggagctctacaaaatgtgctgcttgtcagaatccgagaaaacagagtctacctgctacttctattccaacacctgcctcttttaagtttggtacttcagagacaagtaaaactctaaaaagtggatttgaagacatgtttgctaagaaggaaggacagtgggattgcagttcatgcttagtgcgaaatgaagcaaatgctacaagatgtgttgcttgtcagaatccggataaaccaagtccatctacttctgttccagctcctgcctcttttaagtttggtacttcagagacaagcaaggctccaaagagcggatttgagggaatgttcactaagaaggagggacagtgggattgcagtgtgtgcttagtaagaaatgaagccagtgctaccaaatgtattgcttgtcagaatccaggtaaacaaaatcaaactacttctgcagtttcaacacctgcctcttcagagacaagcaaggctccaaagagcggatttgagggaatgttcactaagaaggagggacagtgggattgcagtgtgtgcttagtaagaaatgaagccagtgctaccaaatgtattgcttgtcagaatccaggtaaacaaaatcaaactacttctgcagtttcaacacctgcctcttcagagacaagcaaggctccaaagagcggatttgagggaatgttcactaagaaggaaggacagtgggattgcagtgtgtgcttagtaagaaatgaagccagtgctaccaaatgtattgcttgtcagtgtccaagtaaacaaaatcaaacaactgcaatttcaacacctgcctcttcggagataagcaaggctccaaagagtggatttgaaggaatgttcatcaggaaaggacagtgggattgtagtgtttgctgtgtacaaaatgagagttcttccttaaaatgtgtggcttgtgatgcctctaaaccaactcataaacctattgcagaagctccttcagctttcacactgggctcagaaatgaagttgcatgactcttctggaagtcaggtgggaacaggatttaaaagtaatttctcagaaaaagcttctaagtttggcaatacagagcaaggattcaaatttgggcatgtggatcaagaaaattcaccttcatttatgtttcagggttcttctaatacagaatttaagtcaaccaaagaaggattttccatccctgtgtctgctgatggatttaaatttggcatttcggaaccaggaaatcaagaaaagaaaagtgaaaagcctcttgaaaatggtactggcttccaggctcaggatattagtggccagaagaatggccgtggtgtgatttttggccaaacaagtagcacttttacatttgcagatcttgcaaaatcaacttcaggagaaggatttcagtttggcaaaaaagaccccaatttcaagggattttcaggtgctggagaaaaattattctcatcacaatacggtaaaatggccaataaagcaaacacttccggtgactttgagaaagatgatgatgcctataagactgaggacagcgatgacatccattttgaaccagtagttcaaatgcccgaaaaagtagaacttgtaacaggagaagaagatgaaaaagttctgtattcacagcgggtaaaactatttagatttgatgctgaggtaagtcagtggaaagaaaggggcttggggaacttaaaaattctcaaaaacgaggtcaatggcaaactaagaatgctgatgcgaagagaacaagtactaaaagtgtgtgctaatcattggataacgactacgatgaacctgaagcctctctctggatcagatagagcatggatgtggttagccagtgatttctctgatggtgatgccaaactagagcagttggcagcaaaatttaaaacaccagagctggctgaagaattcaagcagaaatttgaggaatgccagcggcttctgttagacataccacttcaaactccccataaacttgtagatactggcagagctgccaagttaatacagagagctgaagaaatgaagagtggactgaaagatttcaaaacatttttgacaaatgatcaaacaaaagtcactgaggaagaaaataagggttcaggtacaggtgcggccggtgcctcagacacaacaataaaacccaatcctgaaaacactgggcccacattagaatgggataactatgatttaagggaagatgctttggatgatagtgtcagtagtagctcagtacatgcttctccattggcaagtagccctgtgagaaaaaatcttttccgttttggtgagtcaacaacaggatttaacttcagttttaaatctgctttgagtccatctaagtctcctgccaagttgaatcagagtgggacttcagttggcactgatgaagaatctgatgttactcaagaagaagagagagatggacagtactttgaacctgttgttcctttacctgatctagttgaagtatccagtggtgaggaaaatgaacaagttgtttttagtcacagggcaaaactctacagatatgataaagatgttggtcaatggaaagaaaggggcattggtgatataaagattttacagaattatgataataagcaagttcgtatagtgatgagaagggaccaagtattaaaactttgtgccaatcacagaataactccagacatgactttgcaaaatatgaaagggacagaaagagtatggttgtggactgcatgtgattttgcagatggagaaagaaaagtagagcatttagctgttcgttttaaactacaggatgttgcagactcgtttaagaaaatttttgatgaagcaaaaacagcccaggaaaaagattctttgataacacctcatgtttctcggtcaagcactcccagagagtcaccatgtggcaaaattgctgtagctgtattagaagaaaccacaagagagaggacagatgttattcagggtgatgatgtagcagatgcaacttcagaagttgaagtgtctagcacatctgaaacaacaccaaaagcagtggtttctcctccaaagtttgtatttggttcagagtctgttaaaagcatttttagtagtgaaaaatcaaaaccatttgcattcggcaacagttcagccactgggtctttgtttggatttagttttaatgcacctttgaaaagtaacaatagtgaaactagttcagtagcccagagtggatctgaaagcaaagtggaacctaaaaaatgtgaactgtcaaagaactctgatatcgaacagtcttcagatagcaaagtcaaaaatctctttgcttcctttccaacggaagaatcttcaatcaactacacatttaaaacaccagaaaaggcaaaagagaagaaaaaacctgaagattctccctcagatgatgatgttctcattgtatatgaactaactccaaccgctgagcagaaagcccttgcaaccaaacttaaacttcctccaactttcttctgctacaagaatagaccagattatgttagtgaagaagaggaggatgatgaagatttcgaaacagctgtcaagaaacttaatggaaaactatatttggatggctcagaaaaatgtagacccttggaagaaaatacagcagataatgagaaagaatgtattattgtttgggaaaagaaaccaacagttgaagagaaggcaaaagcagatacgttaaaacttccacctacatttttttgtggagtctgtagtgatactgatgaagacaatggaaatggggaagactttcaatcagagcttcaaaaagttcaggaagctcaaaaatctcagacagaagaaataactagcacaactgacagtgtatatacaggtgggactgaagtgatggtaccttctttctgtaaatctgaagaacctgattctattaccaaatccattagttcaccatctgtttcctctgaaactatggacaaacctgtagatttgtcaactagaaaggaaattgatacagattctacaagccaaggggaaagcaagatagtttcatttggatttggaagtagcacagggctctcatttgcagacttggcttccagtaattctggagattttgcttttggttctaaagataaaaatttccaatgggcaaatactggagcagctgtgtttggaacacagtcagtcggaacccagtcagccggtaaagttggtgaagatgaagatggtagtgatgaagaagtagttcataatgaagatatccattttgaaccaatagtgtcactaccagaggtagaagtaaaatctggagaagaagatgaagaaattttgtttaaagagagagccaaactttatagatgggatcgggatgtcagtcagtggaaggagcgcggtgttggagatataaagattctttggcatacaatgaagaattattaccggatcctaatgagaagagaccaggtttttaaagtgtgtgcaaaccacgttattactaaaacaatggaattaaagcccttaaatgtttcaaataatgctttagtttggactgcctcagattatgctgatggagaagcaaaagtagaacagcttgcagtgagatttaaaactaaagaagtagctgattgtttcaagaaaacatttgaagaatgtcagcagaatttaatgaaactccagaaaggacatgtatcactggcagcagaattatcaaaggagaccaatcctgtggtgttttttgatgtttgtgcggacggtgaacctctagggcggataactatggaattattttcaaacattgttcctcggactgctgagaacttcagagcactatgcactggagagaaaggctttggtttcaagaattccatttttcacagagtaattccagattttgtttgccaaggaggagatatcaccaaacatgatggaacaggcggacagtcccatttatggagacaaatttgaagatgaaaattttgatgtgaaacatactggtcctggtttactatccatggccaatcaaggccagaataccaataattctcaatttgttataacactgaagaaagcagaacatttggactttaagcatgtagtatttgggtttgttaaggatggcatggatactgtgaaaaagattgaatcatttggttctcccaaagggtctgtttgtcgaagaataactatcacagaatgtggacagatataaaatcattgttgttcatagaaaatttcatctgtataagcagttggattgaagcttagctattacaatttgatagttatgttcagcttttgaaaatggacgtttccgatttacaaatgtaaaattgcagcttatagctgttgtcactttttaatgtgttataattgaccttgcatggtgtgaaataaaagtttaaacactggtgtatttcaggtgtacttgtgtttatgtactcctgacgtattaaaatggaataatactaatcttgttaaaagcaatagacctcaaactattgaaggaatatgatatatgcaatttaattttaattccttttaagatatttggacttcctgcatggatatacttaccatttgaataaagggaccacaacttggataatttaattttaggtttgaaatatatttggtaatcttaactattggtgtactcatttatgcatagagactcgtttatgaatgggtagagccacagaacgtatagagttaaccaaagtgctcttctctagaatctttacacctcctgtgtggttacaagttaactttgtaagtaggcgtaccttccttccttaaaatatctagcttcctgtgccctttcatagatattcgattaatttttacattttaaacaagttgactatttcctttaggggttttgtttcaaacttttctgtcatctgtctctactacctcagaaactgcagcttggttctgatgatagaaattgaatttttccttgtagttattgtgataaagtatgaatatttttagaaagtctataccatgttctttcgttaaagatttgctttatacaagattgttgcagtacctttttctggtaaattttgtagcagaaataaaatgacaattcctaag

SEQ ID NO: 56226 - DNA, 889 bp, Homo sapiens
  misc_feature (1)...(889): n = a,t,c or g
cctggcctactgagcatttttatcttgaatgagtgttggattttgtcaaatgctttttctgtacctattaatacaatcatgattttttcctctttagtatgttgatatgatgggttacattaattgattttcaaatgttgaatcagtcttgcatacctggaataaatcccacttggtcataatatatcattctttttacacattattgcatttgatttgctaatattttgttaaggatttttgcatctatgtttatgagagactgtagttttccctttcttgtcatgtctttatctgattttagtattagagtaatgctggtctcctagagtcagttagggtgtgttcccttagcttctatttttttggaagctattgtagagaattggtatgatttctttcttagaaaaaaaaattttaaggaaatatttctgggtcaaagatttatttcttaaatgtttgatcaatcatcagtgaacccatctaagcctggtgctttctattatagaaggttattagttattgatttagtttaacaggnataggcctattcaaattttctatttctccttgtgtgagttatggaacactattcctttcaaagaactggcccattgcatgggttggccataatcccaaaagacacaatcttgaatgttataatcccaaatgatgaaatcctgaaagatcaaaatccctgaagtccaaaatccccaaaattccaatcccaaatgattaaaatcctgaaaatataattcttgacaaaataattttaaaaattctttaaaattctttatttatattttttaaaggagatttgagaaacataaaaacacaacagagcacttcatagaccattttagacaataaaacaggaaataataacata

SEQ ID NO: 56227 - DNA, 324 bp, Homo sapiens
  misc_feature (1)...(324): n = a,t,c or g
ggattcctttcatgcggtgaaggaacaacaacaatattcaacttcaccttggtgtgtgagggtcgtcgtgttttaaaacactatccctgtagaaagattagtgaaatgtattggaagaagtagtggaaacgtgaatcttcctggtctcgcgtttggatcttctttggagtcctcaccttcttaaatctgatgtttgtttgaaatcagggctgaatttccatatataggacagaaagaaagaaccccaattttttaaagaaagctccccccccccccgccacgtttttcctgagcccncttggtctcccgttnttangcggccca

SEQ ID NO: 56228 - DNA, 395 bp, Homo sapiens; identical to SEQ ID NO: 37679

SEQ ID NO: 56229 - DNA, 352 bp, Homo sapiens; identical to SEQ ID NO: 43655

SEQ ID NO: 56230 - DNA, 685 bp, Homo sapiens
ggcgttcccgcaaggtcgctttgcagagcgggagcgcgcttaagtaactagtccgtagttcgagggtgcgccgtgtccttttgcgttggtaccagcggcgacatgacggggtacactccggatgagaaactgcggctgcagcagctgcgagagctgagaaggcgatggctgaaggaccaggagctgagccctcgggagccggtgctgcccccacagaagatggggcctatggagaaattctggaataaatttttggagaataaatccccttggaggaaaatggtccatggggtatacaaaaagagtatctttgttttcactcatgtacttgtacctgtctggattattcattattacatgaagtatcatgtttctgaaaaaccatatggcatagttgaaaagaagtccagaatattccctggtgatacaattctggagactggagaagtaattccaccaatgaaagaatttcctgatcaacatcattaaagattatgtaaaaagttaaaaggcttatgagcctaagtttgttcctatattaccatatttactgaattttctggaaaagtaactttaataaagtttaatctcagaaattgtcatatctgttttcaagcattgtacaatttgagactgagtaatttaacaataagtaaaaagtggacatgctaaacaaatatgagag

SEQ ID NO: 56231 - DNA, 435 bp, Homo sapiens
gtcacattatattataaacaatacggaaggggagataggtgagatgatatgaaaaacaaattttctcactgtcataaaaggctctaattatggttactttccttgtgatgaaaaacttggccttacagggctctagttatggttactttccctagtcaatgctctgaaaatgtgtcacattataaacaatacagaaggagagatagatgagagatcatgaaaaccaaattttatcttttacatggcccctttgtcttcgtttgaaacatccccaacatttcctacaaatcagcgtagttacaaaggggtcagtcttttaaaataagtatttcctattaaactatatatatatacagtgcctttttggtgttgtgagtcagtggaacactgaaatacagcggttgtgtaatttatgagtggcaacagtttcatttg

SEQ ID NO: 56232 - DNA, 338 bp, Homo sapiens
gttctgggctgcactggaactctactgttccaggaacatgggcttccatttcctactctgcggatctcagctatggcatctacctcttagtccaggagagttactgaagttcttgccatctggatgattctacccaagtaggcagaggaggggatgaagtggagcctgtctttcccttatattccattgggcagaatttaatcaccaagccacacctacaagaatggctgggaatctcagccttcagtctgtgtaaaaatgtgcctaattaaatttacgggttctattaacaaagaggagaaagggtatctgagacacctagaatctgaagcaagtcc

SEQ ID NO: 56233 - DNA, 217 bp, Homo sapiens
tgtctcaaaaaataaattaaaaagccatttttatattcatcaaagtagagttaggaacaaccaaaattgccaaggataattagggacattatataatgataaaattcaccaagacagtgctaaaagtgtaagcacttattatcagatcttaaaaatacatgaagagaccaggtacagagactcattcattcctgtaattccaatgctttgggaagcc

SEQ ID NO: 56234 - DNA, 245 bp, Homo sapiens
ttctgtctttgttctctaagtgaagcattttaccactaaatcaaattacttaactagataacagatatcatggtcattttatcagatatcagtatagtttgcactgaagttcattgttgcaatagacattccaatttctattttaccgctattattagagagacatattgacaaatagaaaaaatttaaaagcaagagggaaaatttcaaaatataattactaaaattcagaatgtaattgttaa

SEQ ID NO: 56235 - DNA, 371 bp, Homo sapiens
gcaggcagaaatatgttcttcatcccctcagggctagctgtgtttacacgatttgctctaaagacactgggccaggaaactttgtgttctttgcaggaagcagattatgaggtagcttcctatggcctccagcataactgtcttgggattctgggggaagacactgattacctaatctatgacacttgtccctacttttcaattaaacgagctctgcctatagagcctggacaccgtcatgctctgcagagagaaactctgtgagagtctgggcctctgtgtggccgaccttcctcttctggcctgctccttggcaacgacataatcccagagggcatgtttgaaagctttaagtacaaatgcttatcggc

SEQ ID NO: 56236 - DNA, 313 bp, Homo sapiens
caagatactgaaggttcccagtgtttgtgctaagcagggactcaggtggagagaactaaggtcaccctcagggaatttcttgctgaattaggttccactaagccttgaaatcaaaacgcttctgaaatctggatggagaagcagtatttatctcaaagagaagtggacctagaggcttatttcactaggaatcacaccgttttgcaaggttgcttcaaagatggtcaacattatgaagagggatcagtaattaaagaaaactgcaactcctggtaataaatttaagtggcacagaactgaaaaaaaaaaaaaa

SEQ ID NO: 56237 - DNA, 490 bp, Homo sapiens
gctctttgttgcttcccaaacacttagacgccagcagcatgggttggtgtgctgggctggttaaggccgatggtggagcagagccaacctgcaaaatccacttcctcagcatcagatctcttgataaaagcatgaacctgcatgtaaggaaacgagaggacgtggtgttaaaaagaaacaaaaaaacaaaacccaccaggaaggaaaatccaagagtttcaggtctagagcttgtgctgcacttggaaagagcaccctggcacctgcccctgagcaacagtggggccagctgcaggcccaaagacctgctccaccagtcacagcagctgtgaggccttgggcaagtcacctcttggagcctactcgtgcagtatggagacagtaactctgccttaaatgcctcacaggcttgttagaagggacaaagaaaatgatggacttagtgcatattatatactatatacaccgtctatggctgtccagatattta

SEQ ID NO: 56238 - DNA, 5661 bp, Homo sapiens
gctttgtttgatggtgatccacatttatccacagagaatcctgccttggttcctgatgctttgctagcctcagacacttgtctggatataagcgaagctgcctttgaccacagtttcagcgatgcctcaggtctcaacacatccacgggaacaatagatgacatgagtaaactgacattatccgaaggccatccggaaacgccagttgatggggacctagggaagcaagatatctgctcatctgaagcctcgtggggtgattttgaatatgatgtaatgggccagaatatcgatgaagatttactgagagagcctgaacacttcctgtatggtggtgaccctcctttggaggaagattctctgaagcagtcgctggcaccgtacacacctccctttgatttgtcttatctcacagaacctgcccagagtgctgaaacaatagaggaagctgggtctccagaggatgaatctctgggatgcagagcagcagagatagtgctttctgcacttcctgatcgaagaagtgagggaaaccaggctgagaccaaaaacagactgcctggatcccagctggctgtgctgcatattcgtgaagaccctgagtccgtttatttgccggtaggagcaggctccaacattttgtctccatcaaacgttgactgggaagtagaaacagataattctgatttaccagcaggtggagacataggaccaccaaatggtgccagcaaggaaataccagaattggaagaagaaaaaacaattcctaccaaagagcctgagcagataaaatcagaatacaaggaagaaagatgcacagagaagaatgaagatcgtcatgcactacacatggattacatacttgtaaaccgtgaagaaaattcacactcaaagccagagacctgtgaagaaagagaaagcatagctgaattagaattgtatgtaggttccaaagaaacagggctgcagggaactcagttagcaagcttcccagacacatgtcagccagcctccttaaatgaaagaaaaggtctctctgcagagaaaatgtcttctaaaggcgatacgagatcatcttttgaaagccctgcacaagaccagagttggatgttcttgggccatagtgaggttggtgatccatcactggatgccagggactcagggcctgggtggtctggcaagactgtggagccgttctctgaactcggcttgggtgagggtccccagctgcagattctggaagaaatgaagcctctagaatctttagcactagaggaagcctctggtccagtcagccaatcacagaagagtaagagccgaggcagggctggcccggatgcagttacccatgacagtgaatgggaaatgctttcaccacagcctgttcagaaaaacatgatctctgacacggaaatggaggaggagacagagttccttgagctcggaaccaggatatcaagaccaaatggactactgtcagaggatgtaggaatggacatcccctttgaagagggcgtgctgagtcccagtgctgcagacatgaggcctgaacctcctaattctctggatcttaatgacactcatcctcggagaatcaagctcacagccccaaatatcaatctttctctggaccaaagtgaaggatctattctctctgatgataacttggacagtccagatgaaattgacatcaatgtggatgaacttgatacccccgatgaagcagattcttttgagtacactggccatgatcccacagccaacaaagattctggccaagagtcagagtctattccagaatatacggccgaagaggaacgggaggacaaccggctttggaggacagtggtcattggagaacaagagcagcgcattgacatgaaggtcatcgagccctacaggagagtcatttctcacggaggatactatggggacggtctaaatgccatcattgtgtttgccgcctgttttctgccagacagcagtcgggcggattaccactatgtcatggaaaatcttttcctatatgtaataagtactttagagttgatggtagctgaagactatatgattgtgtacttgaatggtgcaacccccaagaaggaggatgccagggctaggctggatgaagaaatgctaccagatgattgacagacggttgaggaagaatttgaaatcattcatcattgttcatccatcttggttcatcagaacaatccttgctgtgacacgaccttttataagttcaaaattcagcagtaaaattaaatatgtcaatagcttatcagaactcagtgggctgatcccaatggattgcatccacattccagagagcatcatcaaactggatgaagaactgagggaagcatcagaggcagctaaaactagctgcctttacaatgatccagaaatgtcttctatggagaaggatattgacttgaagctgaaagaaaagccttagttggccatgctggaagaagaggatgcttttctggttcatggttctgttgaaacatatctacctgaaagagacagggctgatgttacctttttccactttgcactacctggtgccattctaaatttctaaggggaaaaatagaaagtttgtttactcttaagatattttatgaaattgtgtgtactttcctattttgccaattatgtgcctcaaagattttagttgagccttagcaagaaagtaggaccttccatttcaatacttcattaacacggtgtagtgatactttgtcccttagactggtgtttaccagtaagatacctttaatccactgttaagtatgagtggatttgtttccatagattagctggatttccttttggtgattgcattaggtttaaagtacacaggtctcaactctccccaggaaagtttcccctgtttgactccacctttaaaatcctaagcctgactaggacagccacaaaccacacaaggtgtaaaaccatcatcagctaagtgcccgttttgttcttgtttaccagaatctcctttaacttctcaaagggaagccgggctttctaatccacgtcaactttattttagttgtcaaattgggcattatattttatgtaaattggtcttttaacatcattttcctgatgaatgttggtgaccaccacattgtgaaatttaagaatccgtgttgcatgtttggtagctctctgagtttcaggccataaactcagctccagaggttaccttttaagtgccaagaactcaagtgcaaggtggcctactcaaaaatcatttggtagcattcagttattcatgaattcctctctcgcatgcattataaaaagtgatctgctttaaaacaccgtaatctgatcataggcttaaaattcaatatgagtattactttcatgtataaaatatttcctttatagtcttcatatgccctttaaaatgccaacaagatttcaagtctgtaggcctctagtgaggtggggtggcaaaccacagctaagtctcgctcaccactgcaagctaagaatggtttttacattttgggttggaaaaattttttttgaatatttcatgacacatgaaaattattcaaatgttagtgccgataaataaagtggtactgaaacacagccacacaaacttgtttttgtactgtctacagctactttcacactacagccgcagagctgagcagttcagcagaccgtatgtcccacaatgcctaaaacattgactatgtttacagaaaaagtttgctgacccctgctctagcaaacgcatcctttcctactccaccccaatttgtatttagatagtttctctaacagaacggacaaatgaggctgcaaactaatttatttttgtcaaaaatcaatgttttgacatccacagacagtgaaataaaagaaatggcttgctgaaaaacatgaggagtcctagccacaaaatcactgcttaggttgcaattgccaaaatgaagccttcttagaagcacttctttagtatatacaggtgttggctgaagtccgtgcctcactctgggaaccattcttagtctccagtgtctcctattacaaagaagctggcagaaataaaaatgaaggggtgagagcggttccaccctagtctcatggtggaaaattcattggggagagctgtccaggatatttggagtcctgggtagaaggagcttgtaactactttaaagtcgacatctttgcacaggtgattgagtttctctgacctcattgcttcacctctgtctcctcccgtccttccgcacgtgcccacacacacgcagttcagccctctttcctccataagcctccatcgttttctcttttctcctcttgatcctttcaagcgagtatcttgttgaattgtatgttctgttggatctcctccttcataacatctgggcttgttgggacagaaaaaccctacagcccaccccctcccacagcccacctccacttttgaaagcccaaattacacctctcccagaacacagtgttgacgtaaatacagttacccaatattcctgtttgttcacctatttgctactttcactcagtagcatcccattttgtaaaatgaattccatggtcaccctgtcacaggaagtaatgaaaaatccagtgttcagtgtagtggtgcaaacctgagggcatagagctgttcatagagggctcttgttatagccaaacagacacagcaacaatctcaccatttatatatatatttttaacttgtccagctcatctatggaaaactactcaggtggtatgctgtttgaagcctcatcttcctacatgaaaattatgggcatttgtcccaatgattttgtttcagctgttctgtaggctgcataaccactctgatatttaggtatctgctattttattatcttaaaagacaaattaatttaattgcatgtgctagggaaaagctaccatgtacattcaccccaagtaaatagaatcctagatgaatcctagaaaaataatccctaagcagataggtagacagaggtaaacattcacatgatttagctctctagctcttgcactctgaacattcttgctttggttctgacttctgggaactgctttgcatttctcctatagatctgtagttaagggaaccaaggggtcattggggggcaaaagcattgtttctcaaagctccttgattaagagaaagaacagaaatttgcacagaagatagtgtcaaggagtgagaaagtttgtttgagggcagtagctcagtgtggaagaaaatcctgaagtttctgttgaagccatacaatgttctatggggttactctctaagacattctctgaggtgtgtgaggaagtcactactcctagcctttgttaagatgtaattttaaatattcagttatggtactatgtttgcaactctcgtcttatcacaatgcctcagtagtttgttcccttagaaacatttagatgtgcacaaattaatcttttatatatctaaaggtttttctatcatgcattggattgctcagaataaagtgtctgttagacttcgttttggtaaataaattctccataatgtagattaataatataaaagtctttaatgacacaatatatctatatagcctcactgtataattcagaaataaaaattgattctgcaaa

SEQ ID NO: 56239 - DNA, 344 bp, Homo sapiens
aatgcaaacagtgagtagagaatgaaatacacagtttaaatgccctcactatctttgggttactaatatactaagcctttctggactaagtataagatgcaggttcctgcggctagggatagaagccagactggcgtcttcagaatctcccaccaaggctgtacctctggaggagttctaggtttggatttggtcatctcaagaagagacttcagatggattttaaaattgaacacacttgggatggttttccagtgaagcatgagcccgtatttatcaggctgaatccaggtgacagaggagtgatgatggacattactgctccatttttcagggatccctcc

SEQ ID NO: 56240 - DNA, 412 bp, Homo sapiens
gttaaacccatagcgtgtattttctagtgtcctgccagggttggtttgtacgtgtggtgggtgggagtgggggacaggtttagcagcttgaaatctatccaaggacatctcttccagacagttttccctgcttttctgttcatgtcgcagcgtcggtagctgtctcaggatgtgggtgtatcacactagacctgagaatagaccaaaagctccggacaaagtaatgggtgaagaggtacatcctctttgccctttttaaatgcgtgcataaaacatgtgacgacattctggggttatgttcttcaccatgattacttctagggattggtagaaaagagtttatgaaggatcatcagaactttactagtggcttatccagcaaatagtttctcttgatgggttggtctgacaa

SEQ ID NO: 56241 - DNA, 342 bp, Homo sapiens
gtagaaaagccatgtgctggtactcagaacatatgccattgctgggcctcaggaagatcattttatcccaaagtctcagaactagtgactgaccaaatcaggattcaaacctatgcatgtctgacaccaaacctacacttttgccatgatgcttggtcctacctcgaatgaattcatggagctttactccataggaaaaagccagtgaattcaattcagcaaatagttactgggtattctctgggcaacgggccctatgttaggtcctgggggataaagagaagaagtctatgagatctctgtgctcgacaggttcacagaatgtcaaggaaagtatgcatg

SEQ ID NO: 56242 - DNA, 393 bp, Homo sapiens
cttgcagacttttgacacaagttctccacaaagtgtgaagagagccccaggcattcctgattggtcaatgggagagcctaactttcattgttttcttcagtacaaagagtatccaaaagctaagtttttgtattccactactttcagttcaataaaacctagagttgtttcatctgcgcctaaagtgtatggcacaattttcttaagaattaggggaaccaggtgcctacagttaaaggaacgtttcagttcctttcattcattcctgggtttttcttttattttctaagaaggttgaagaaggatgagtgatagagaagaaagcaacaccattgatttttttttttaagaaatgatatatatatgtatatgtttgggggggggggggggggg

SEQ ID NO: 56243 - DNA, 730 bp, Homo sapiens
  misc_feature (1)...(730): n = a,t,c or g
ggctggctcttgttttgtaaaccaaatgattaatcttcacttgagaaagcagtttctaggaaatgtttaaataaaagagagtcttcaccttaaagaaacctatggagcacaagaaagataaatttctgcaggacagtctataaaattgtggtactttttgatgtttcagtaaacttgacattgtcagagtttcaaggacttttctttcacaattttcctagttcatggatatgaaaaaggaattctcaatccatattccttgtattgaaccttgaacaaaaacttgtatgacagacatttttaaaaatgtgacaacacttttattctctgaattttgatctcaaaggacacagaaaaaaaatggcccaggagatctgatcacacttcctcctgaggcacctctcatggatgttgcaataagcattcgggtactatcacccagaaatatgaattgccagaatagaacatttagcatgttaagcgttgatgcatataaaatcagaaatagatgtgagaatggtggaactttttaaaagaacccagtcaaatgtattttctggctggaaatctggcatatttgggagggcatttcccaccaccggtttcacagcccatttgatagtgtgggtagttaggggacttcgtgggagttggtgtttcagacgtccccgggggggctttaaatctctttcatatttaggtccattcatttgttaacttnggggccttt

SEQ ID NO: 56244 - DNA, 370 bp, Homo sapiens
ggccaagcccaccaaggccgacatcacgctctcgggatgcgcctccggcctcgtccgcgtgttcctgacgtcgcccactgaggtggccaaagtccgcttgcagacgcagacacaggcgcagaagcagcagcggcggctttcggcctcggggccgttggctgtgccccccatgtgtcctgtgcccccagcctgcccagagcccaagtaccgcgggccactgcactgcctggccacggtagcccgtgaggaggggctgtgcggcctctacaagggcagctcggccctggtcttacgggacggccactcctttgccacctacttcctttcctacgcggtcctctgcgagtggctcagccccgctggccacagc

SEQ ID NO: 56245 - DNA, 358 bp, Homo sapiens
gttcctttggtccagggaagggtccaagcagccacagttgccctaaatctccatcattaagtcttccagcaaggttaagtgcagtatggaaggagaagggggaagaggacggtaacggccccacactccaggctgagaaagagtaattaggaggcctgaggaggggccgaggaaaggctgttggggtgtgctggggttggtacccgagcgccttcccctcacctcaaccagagaagagcatccggttgctttttaaagcttttagcctgccctagcaaggacaaagcatgttagattagagatgcttctgctgatcgcaggggttcttatttgaaaacatctatgatgggggtggggt

SEQ ID NO: 56246 - DNA, 369 bp, Homo sapiens; identical to SEQ ID NO: 43831

SEQ ID NO: 56247 - DNA, 384 bp, Homo sapiens
  misc_feature (1)...(384): n = a,t,c or g
ggtcttttctatatctgcagaagtgatcgagggtccataagagggatcttcctgtctttctgagggtttgttttctttttctctgacaagcaggcacatgacctccttgctacctttgcgtccaggtcaaaaagcactgggaactactaacttatcaacttttattatttctgtgatagaaaaaaaaaggagccaaaggggtattccaggtagtgggaaggatcccttaaagtacctggcattgcacctgcccctgggaagcaggagagctgccaggaagtaatgctccctcagcctcctgggccaggaccgcctctgcatggaaacttctcgtgaatcccanctcgggaggaccctggcctgccctcccttgatttttgggga

SEQ ID NO: 56248 - DNA, 295 bp, Homo sapiens
catcccccttcattcaatcctgtagcaactggcagtgacaagtggtgcccaggacagggacatgagcaaagaaggtctgctggagcagagaaagtgaaactgaccagatgagcaagaaaccttgggacaagtctactggcagctaatataagcacataccaaggttaccagcactcggggaagcaaggacggaagaagaaaagaggatgctctttctccctcatgtaccccaggtatctgctagaaagagaagagaactagggacacctgccaccctcttcctaggttctgtgga

SEQ ID NO: 56249 - DNA, 343 bp, Homo sapiens
gattgttcaggttttttattttgaactgtgaaatgtatgcttttcaaaccttggagcccccgttctggtgtgataaagttaggccctggaatgatgaggcagacccatatctaccccatccatgcactccagcctgggcaacagagcaagactccatcttaaaaaaaaagaaaagaaaaaaagaagaaaaaggagagctgggtggcaaaaagaaattgaagaattaagagtaggaaaaacaccagctagaaaatactgaacttggccaggtgtagtggctcacgcctgtaatcctagcattttgggaggccaaggtgggtggatcacctgaagtcaggagttc

SEQ ID NO: 56250 - DNA, 381 bp, Homo sapiens
ttatcaagaaaacataggaggccaagcaagaatccaaaccaaagattggagagacttaaacttgctgcttccattgaaaaatagtaatagagtatgctggcgattccaagaacaaaaagaccaagaataaaaattaccaaaattaaggaatttgctgttttttcccatcttacgtatagacctaagcatatagcaaccaataaattgattctggctaaatagccaagataccgcactgaagaatgcatgttcacttctctatttacttcttccagtcttgtcattgctaaatagagacaatgactaaagcaataacgcagtgatttacacatgtaaccagcaatgtgggcttttccctcacgttacaaaaattaaccgctt

SEQ ID NO: 56251 - DNA, 369 bp, Homo sapiens; identical to SEQ ID NO: 45156

SEQ ID NO: 56252 - DNA, 427 bp, Homo sapiens
taaaaatataattttacaaagcaaataaagaattctctgattcctttgagcacttgaaccttagcgttatgtggaatgtactcatttaaaatatttattattccctgtatgtcagttaccattttataacagtgaataaaatacacaaaaatcttgaaagttatgaactttagtgggggaggggaggataaataatatacattattacgtaaatataagtgccttaaagaaaaataaattttgataaggtcagtggggagtgctgatgttgaaaatgaggctgcagtttctaatacgtgatcaatataggtctcactgagaaagtgacatgtggaccaaattcttgaaggaggtgaaggagtgagataattcagatatctctgagaagaatggggtccatcagaaagaatgtcattagatcaattac

SEQ ID NO: 56253 - DNA, 403 bp, Homo sapiens; identical to SEQ ID NO: 26061

SEQ ID NO: 56254 - DNA, 384 bp, Homo sapiens
gttatttcaatactggttaatgtattttcagtattatttgtatagcattttttttagttttaaagaatacagaaagatttacagaatggacttacataataattgggggaatatactgtatgtgggcacacacacattttaaagtcataaaatgactttaaaatgaaggaatttggtagatatactaatataacaccttgaacagttaagctgtgtttgtctttgttttgtttttcgttaacaataattacgcattttatccctttgccttatgtcttggctaggatctccaatttaattttgaggagaaatccttgtcttattccagattttaaaggcaatgtttcgaatattcaacaattaaatttttttttttgctctagg

SEQ ID NO: 56255 - DNA, 439 bp, Homo sapiens
ttggttttggacatataagtttaattacctgctagattatcagatggaaatatgtggtaaatggatggaaacaaggtacataaacttaggaggcagaaatttttaaactttagggttagacattcaccagattggacaatttttaacatttaaaataaaactttttgtcataaaaaacaaatgtattaaaactagtttccagaactgcccaaatgactttttaaacatgacttaaatgtcgttttgacaaatctatccaaaatactaattttccttttagaacttagtttataatttatatattaaagtgcccttaattgatattcattgggataccttcctctgagccctaatggttttggggaggcctaggcggtggatcacctgagggtcaggagttcgagaccagcctgggccaacgtgggtggaaacccagtct

SEQ ID NO: 56256 - DNA, 269 bp, Homo sapiens
  misc_feature (1)...(269): n = a,t,c or g
tatctatattgcatcttggaccccgtgggtcctggcatgtgctgtgtgctctttctgtccttgataggatcataggccttttctttccacatgtacattttccccaatacaattgtttttttttttngaggcagggnctnactntgtcactnaanctgnagngnaggggggcaatctcggntnactnaaacctccanttcnnaaattnaagcnanccgcnnacctnagnttntttanaaccnggaactacagccanttgccaacatgcc

SEQ ID NO: 56257 - DNA, 421 bp, Homo sapiens
ggcggaggaaccggtgttcgccgccgccgctgcttcagcttattccttgtggcctctgcgggtcctgcctcagccatgatgatccacggcttccagagcagccaccgggatttctgcttcgggccctggaagctgacggcgtccaagacccacatcatgaagtcggcggatgtggagaaattagccgatgaattacatatgccatctctccctgaaatgatgtttggagacaacgttttaagaatccagcatgggtctggctttggaattgagttcaatgctacagatgcgttaagatgtgtaaacaactaccaaggaatgcttaaagtggcctgtgctgaagagtggcaagaaagcaggacggagggtgaacactccaaagaggttattaaaccatatgattggcctatacacagattat

SEQ ID NO: 56258 - DNA, 467 bp, Homo sapiens
tttttttttcagtattcataagtgtttaataaaaacaatctataacttaaaaattacaaatttatatagttagcccgttttgcatcactataaggattactgaggctggtaattataaggaaaaaaggtttgttttggcttacggttctgcaggccatactagcacggcaccaatatttgcctggcctttgatgaaggccccaggaaggttacaatcacaatggaaggcaaagggggagcagactcttttaagccaccagatctcacacgaactgagtgagaactcactcatcaccagtgggctctaagccatttcatgagggatcatccaccatggacccaaacacttcccatcaggccccacctccaccccccaacactggggattacatttaaacatgaaatttgaaggagacaaacatctaaacaatgtcattctacccccagccccccaaatctaatgtctt

SEQ ID NO: 56259 - DNA, 2334 bp, Homo sapiens
tttttttttttcaggtagtcactgtattttattggaaaacattgatatatatttttcttcacagcttgaactgaacacaatattgcccggtttaaaaaaaacaaaaccaaaacattccgaaaatgtccacagcctcacgcctacctgcccttaccctcagctcttggctgggtctcccactatgccccatccctccttccctcagaggctgggtgccagagggtggatgagaagagattctcaaagctgggcaggtcccaggaaaagccacttgatcgacctgggcagtgaggggaagcagggggtggggggtggggtggggaggtggtggggggagccagatgaaatgaacagaaaaggggaaaaaaacccagacgactgaactgcccacattgacttacttgtcccagaggcgaaagtcagaagcaagggcacggatcatgctctccgctgggggagtatgggggcaggcaggtgggcgagggaagaggcagggaagagggcacggagcacagatgtgaggaagcggcgccaagtcaccacggagaagcgggaggtgctggcggaccaggacgcagaggctgctgtagctgccgtcccctgggcagctggccgacaagactgttttattgcaggtgcgttctcttgagagcgtggtggggcccatcttccctctccccaccctttagctagcccagcatggttctgaacaaaatgaaagtcttaagggccatagaggggaaagaaaaaaaaagagaaccagcacattacaaagcgaccatccccacatccattcctaggacgggccctcagggcggtgggtgcatcgtgaggagggagcggcatgggatgttagcaccaggtatttacagaacagctcgagagcgcttcaggaacgcgggcaagtccaatctgcagagtggccaaatgagcagtccccacccagccaaacctcagaaagccaatcagatggtttcagaacagcagccagtgggatgtgagtgttgcccactgtcagtccccttctgtgagttggccccctcgaccccctcctgggccacatccagtcaacgccacaattcctcaacgccccctcagtccttctggaatgcctctcttggcacccctgccccaacaggctgctgggatctgcacgtggaatcacagggctggttgcatgcaacggcaaagggcatgctcttctgcctgggggagggcctcttgtccctcccagcaggtcccgggacagggctggcagccaccccagcacccaaaataagatgacaaacaagaggaaacaaaccaaaatggaggagagccatccgggctggaggagggcagaggcctccccaaggggatctggggagggcttcaacttatgaatgcatcaggccttggaagacatggatggaagaggcgagggcaaaaggaagagatgaggggcatggagagagactcagggaagaaggagaaagagcaatcatgcagcttgggacaaatcttttgttgctttatcagattctcagtcaatcaattggtgtttgctagaaccggggtacgcaggggagtgttgaagagagagtgcgcgcgcgagaagagagagatcaagagaacgggcatcgccagctgcccggggggccttcactttgcagtcatcatctgtacaaactcttcataattgacctggccatctccatcgatgtcagcctccctgatcatctcatccacctcctcatcggtcagcttctcccccaggttcgtcattacgtgacgcagctctgcggcgctgatgtagccattcccatccttgtcaaagacacggaacgcctctcggatctcctcctcactgtctgtgtccttcatctttctggccatcatggtcaggaactccgggaagtcaatggtcccgttcccatctgcatccacctcattgatcatatcctgcagctctgcttcagtggggttctgtcccagggatctcatcactgtccccaactccttggtggtgatagtgccatctccatccttgtcaaagagggagaaggcctccttgaactctgcaatctgctcctcagtcagctggtcagccatggcgaggcccggggtgtccggagcacggggatcaaggttcctccggcggcggcagcagctgcagcagttccagctccgccgcgcgtccgcgcctccacactcactgcctcttccctcgcccacctgcctgcccccatactcccccagcggagagcatgaaccgtgcccttgcttctgactttcgcctctgggacaagtaagtcaatgtgggcagttcagtcgtctgggttttttccccttttc

SEQ ID NO: 56260 - DNA, 326 bp, Homo sapiens
ggtaatttttttcctcaaacttgtgtgtgtttagtgttgatgtatatatattacctaggcttttaggtctaaaatgatttataggacttttggtttcatttttaatattaaaattcttttatattttgcttgaaaaaaatctatcttcaagggctggatgcggtggctcacgcctgtaatcccagcactttgggaggccgaggtgggtggatcacctgaggtcaggagttcaagaccagcctgaccaacatggtgaaactccatctctactaagaaatacaagaaaaaattagccgggcatggtgcaggtgcctgtagtcccaggt

SEQ ID NO: 56261 - DNA, 374 bp, Homo sapiens
  misc_feature (1)...(374): n = a,t,c or g
ccagacacagctttccaatcgaggtcatttttatcgtaagcaatgtcagctggtaacacactttctacaattcaggaaccagtttccagggtcataaagaatgattgtgtgtagtggtttcactacngntgccatgntggtancnntggtgatctattnttngatttngttntacatttttnttnatgnttaantnntntntntatnntnttnagctntgttntnntcttcttcagnngnnttntctttttnnatttttntntantntncttnctctnctttccnatnntnnntantttnttntctnnnatnnctnctnttnnanntcttcttttntnntcccnntnannttctnctattttnttnntncgtcc

SEQ ID NO: 56262 - DNA, 455 bp, Homo sapiens
atgaagaaatgcgaaagtggtggtaagtcctcaggattaagtgtaaagggaaaatatgcaaggaaaaagtagcagtgtcagcccttttggactgcttatgatttctgccttagagctacaagacttggaacaagaaataacaatacctcaagaaaatgtctggagagatagcaccactgtccctcaaagacttcagccactgcacattaccaattcagctgtgaagcatttacaactgtattatctgtgattgtctgcatttcctgtttacatgcatgtgctggggatatgctttagtgtgtatggactagagtttaaatcctgtctttaactgggctgcaaggatggctatcaatcccaaattctgttttcaactcactggaataattaatctgggttcctgatataaaacaggtgggttctattcacatgatggctgctctttaccatatatt

SEQ ID NO: 56263 - DNA, 1092 bp, Homo sapiens
ttttttttatggtttaatacatttaatttgttttttcatgtggttcacagaaccagtacactcaaagtttgactagatattgcaacattaaaatttcccaatactgacaaggattctagttcatcagatacattctcattgttttcctcaaatagaggtgaatgaagtgaccttttattgacagtgattagcagtaataaggctattgtatgtaactggcatccccaagaattctttcctcactaccattcagtgtcatagggaggattttgaagctgttctctcgtgaagctttcctgagcatgtcttagtaaagattctaattctctttagcaccctcagtgggggaaacagaattagatactgaaagtatcttacattaaaacccatggctttaaacatgtacttagccaatggagaagacacttcagtggggcattccacaaataaatgctttaagactcaggctaaatcttgaccaaaaattaataaactgacaaaaaagatactgtctcagcattaacaggaattttttttagaagtcacaggaactatatctattgcaattagagatactgaataaggcttaaacttaataaataacaagtgaggaagatcaaatcccaagtctggccacttagcaaagcctcattgttgaaggttatccaagagtgtttccccttgtgccatggggaaaataatccccgttcaatagctactacctatacctacccagaggtgcatgggaataatcctattccgacagaaggtaggggagcaactaggtaaaggccttagtgtctgaaaggatagtgcttcacaccagattctctctgaaacccttagtaatgactatgataaatcatgaggcaatgacacaccttttactgttctcaaataacaagatgtcatcgaactaacttgtgtaccaaagttcagttgtttccatagttttatgattttactataactcattttagaattttaggcaaatattgagagaaaaaaaagccagggtaaagggttggaataaaaagttcccatattactatggcaatatttcaaactaccttctttgcactaccacccatc

SEQ ID NO: 56264 - DNA, 448 bp, Homo sapiens; identical to SEQ ID NO: 26565

SEQ ID NO: 56265 - DNA, 423 bp, Homo sapiens
caagattgacattaaatccatcaaggaagcgagaacaggaaaaaacacagacatattccgcagcaatggcatttctgaccagatatctgaacattgtgcgttttccgtcatatatggagagaattatgagtcactggatttggctgccaactccgcagatgttgcaaacatctgggttacaggactgcggtacctaatttcttatggaaaacatacacttgatatgttagaaagtagccaagataacatgaggacttcttgggtttcacaaatgtttagtgaaattgatgtagataaccttggacatataactctgtgtaatgctgtgcaatgtatcagaaacctcaatcctggtttaaaaacgagcaaaattgagcttaagttcaaagaattgcataaatcaaaggacaaagctggtaccga

SEQ ID NO: 56266 - DNA, 304 bp, Homo sapiens; identical to SEQ ID NO: 42946

SEQ ID NO: 56267 - DNA, 391 bp, Homo sapiens
ccaacaccccgtcacagccggtgtccacccaaccacacagtgtctagcgcctctctgtccctgcctagccgtcaccgtctcttcttgacctatcgtcactgccgaaatttctctatcttgctggagccttcaggctgttccaaggataccttcttgctcctggccatcaagtcacagcctggtcacgtggagcgacgtgcggctatccgcagcacgtggggcagggtggggggatgggctaggggccggcagctgaagctggtgttcctcctaggggtggcaggatccgctcccccagcccagctgctggcctatgagagtagggagtttgatgacatcctccagtgggacttcactgaggacttcttcaacctgacgctcaaggagctga

SEQ ID NO: 56268 - DNA, 375 bp, Homo sapiens
tgatagctcctccccttgctcctcccactcggccagagcgccaagagccactgtgtgaccatccctgcctgcgcacattagccatggctgagcacacgtgtcccagtctggcaccaggcatcagtgggaacagaacactcatgtcctctgtgatcctggagctcaagcagccggcagaggaggcagaacaaacagaaaaaacaaaattaaaaggtaaatcttgaccagcattctcaaggaaagctttagaaaaggctggtcccaaaggcctctttgaggaggtgaaatcatctgaaactggaaggatagagtcggcttgtgcaaagagaacatggaagagctccaggcggagaagatgacaggagaaaagaactc

SEQ ID NO: 56269 - DNA, 375 bp, Homo sapiens
caggaaccagcggatctgcaaagacctacaatcaaaagcaaatccccattttcctttataaaacattctaccctcacctccaatataaacacattaaaagagtacaataaaaatgtttaaaatcatgtactaataaattcattgtatgttagaattgcaatagaatgaagagaaacatttagctagtaacgtgatctgaaaactgaatgtcctatgtgagtattagattttaatagcatgctttaaagactgatgagtataaaagcagaagttttgcgttttttactgctttcaaagctgtatcctagtttagtgatacaaatgattgcaatttttctaaatcattaaattatttggtttggtggagtgaggcat

SEQ ID NO: 56270 - DNA, 427 bp, Homo sapiens
gtgggatctaagggagtgcaagtaaagtgggattttatgagtctaaatgatgtgatttagataaaagtgattcttaaaatgtggttattggtcacacaggaatctctgagtccttcccaagagtgaagcacatgaatatgctgatgatgaagtggggattagtaatagaaagagagctaggcaataggtttaagtgtattccccactacagatttaatttctacatgaaaaagcacgagaacagatatttaaacgtccttttattactaaggtgaaatattggcattttttcaggcagaaagaaagagactgtatgtggtcttcctggcctttgccttgccaaaatgttccccaacagaaagatctgaagaactttgtagtatcgaatgcacaacagcatgctgatatttgaacagatttcttctgt

SEQ ID NO: 56271 - DNA, 324 bp, Homo sapiens
gctggaagatcagggaaggtggtgaaatcttcaccaaggccaatgattgcacaacacataacttcttgaagcacttttttccacctgctcaaacactaaacataaggagtgtttcaaattacttgaggattcaccaatccctaactttcccttcctaaaagttcttccagagtttctgtcagaaattccttttaagaaaactccaaagaatttcaggagtggtagcataataactggggagacccctctctctaattaatcaaaaacgtagtgtagcttatatagcttagagaaattgtggatctatgaggacatgtgaaggta

SEQ ID NO: 56272 - DNA, 534 bp, Homo sapiens
ggggagattgtagtgttcagcaaaagcaggggtttattaaagcaagaaagcactccacgggatgggtgtgagccccagcaaggggctcaaggacccggttacaatgttttctgggttttaagtactccttttgaggttcctatcagctaccccttatctgaatgaaggatttggtccttggctaatcaaaggttgaggcgaattggtaccccatgcagatgaaggcatggcctgtgcttggcctgcggccactccaaggcactgtccttttctatcagagaactggtacaagggggagggttgtagcgacagtcgccttcgatcctttgctactcgggtgtagatgggttttttccttttggtttagctttaggaagttcacgttaactggctttaggttccctgctcccagaccttggtgttttttcttgtaggaagtcagcacgaattggccttaagttccctgtctccagaccctattctcctgcctcacttctgtataagtcaataccatcttaaaacaaatctaacttt

SEQ ID NO: 56273 - DNA, 716 bp, Homo sapiens
tctgctttcatcagggctgcagcccccaggcagcagtactgggagcccctctcatctccgagaataaactctgaagccagcgaccctgcggacctgaatcatcagggagcctgtcagaggaggggcagtgactctgcgggacaagcaagcaggctatataagtttcagaaggctgggctccactcagatcttttccagcagctgctgccgtgccagagaggcgccttcagagacccagcgcttacacaatacccaccatgtcccaggctggtgctcaggaagcccctatcaagaagaagcgcccccctgtgaaggaggaggacctgaagggggcccgaggaaacctgaccaagaaccaggaaatcaagtccaagacctaccaggtcatgcgagagtgtgagcaagctggctcggccgccccgtcggtgttcagccgcacccgcacaggtaccgagactgtctttgagaagcccaaagccggacccaccaagagtgtcttcggctgagaagtgtgcgccacttcccctttgcttgcccgaatgcttcggaaacaggagccttacccaggaactctttttttatgccagaacgcttcctctcccctgctgtctctggggctgccaccctcccccacagtccaggcccttcagccaagggctctgcaccagcaccttggaagcaccaataaagaggatgcccacgtggccccagcaatc

SEQ ID NO: 56274 - DNA, 150 bp, Homo sapiens
aaagatgcaagtgcgttacaaagaattttgtttcctgaaccgtgtgagtcagttgctgagagtctgctacccgcccacgatacagacactgaacaggaagtcagcatggacgcagtactcctagcgggtcctcaggcccagtcatgtcct

SEQ ID NO: 56275 - DNA, 784 bp, Homo sapiens
ttttgaagggtgagaaatttattcagatttcttcataattccccccaaaagctccaaccacgttgccagtccttgggtgctgcagttggtcggggagaggggctgtgtggaggtcaccttctggtagacggagacccgcttttcagactctgtggcgcagcaggcgggcccaggaacatttgggccactattgctcttagccctgccgcgcctgactttctctcctctactttccttccgaccgtagggacaagtgtggggatccgctttgggctccaaggccctgcccgcactggcagcaccaagcgggtgtagaatgactggaaggagcagggaaggaagatgggtgtcaactgtcccggccagtggctgcgtgcatgtgtgtgtgaacagggaaaaggccaccctctcccatgtttctcccgtctcctcggttctcctcggagacccgcagggctgcccgaggtagctccgagttgccctgggtcgctggggcttggtccgcatcctcctccgctaggtcgctcccgcgttccacagcgccccgccgctcggtgtgcacgcactgcggcttaacccagccgacaaggcacgcttgccaaagaggcgcgggtgtgtgtgtgcggggtccgcgttcggaggccaaaggagggtggcgtggtagagcccttctcctcctggccgcgacgccttgcccactctcctgccctaatctcggcctgccagcaaaagtgacacctgagcagggactggtccgtagaggcggcaggcccgctggtccggc

SEQ ID NO: 56276 - DNA, 402 bp, Homo sapiens; identical to SEQ ID NO: 44598

SEQ ID NO: 56277 - DNA, 393 bp, Homo sapiens
gacaaaaactttcttctttgttttcttctagaagctttgtagttttggcttttatattttatatgagctatgctgaaattaatttttgtatatggtttcaggtagagttaaggaaggtttgtttattatctgccccatgtggattcccagtatcatttgttgaaaatacttgcctttccacattaaattactttggtgccacttttaaatgccagttggctttttcaatgtgggcttatttctagactttctattatattccattgagttatgtatttattcctgtgccaagaccaactcttgattactcaggctgtggagtaagctgtttcgtttttctggatcctttgcattttcatgtaaatattagaaacagcttgccattttcatttt

SEQ ID NO: 56278 - DNA, 171 bp, Homo sapiens
aatgttacttaccctgatttgatcactatacattatatgtatcaaataaaacgtaacagtgaagtgaaggaaaggatcaattcgtcactatgtatgccatggatatgtataattattacttgtcaattaaaaaatttttaaatggctacaaatatgagtaactgaataaat

SEQ ID NO: 56279 - DNA, 367 bp, Homo sapiens
gctgggattttctccctgttggatggttctaataacgaatccatttttaaacaggagtttatgttacatatccatgtatgcatgccaaaaatacaaatgcatataggctagttgtaaccagattgaacaaggtgaaatggtgaatgacaaatgctaacttcccaaactgctgcggatacagactgtcagatcacagaatgacaactggatggaaggcttaacatggtgtctataaatacctggtctggggcccactccagctgcagtacacacacactacatgcatcatggcttctgacgctctgtgtgaattaggaaacagacaagcaaacttgggttaacaatgcaaaccacacagcatgcaggg

SEQ ID NO: 56280 - DNA, 411 bp, Homo sapiens
tggcagagacccccagaggcacctgccccaggagccagactcctcagactggagacctggagcgtagatgcctgcagagactggatggcttaccaaccgctaccaggagacagtggccactttttagttaaactacagttttagggaagaggagtgaaaactgccctttgctccaccataactacaaatttgctgtaaaaaggaaagaaaatggaagaaatttaaaaaaaaaataaaagaaaaactaccagtacagggaaggaggaggagtatgtgacctagtcagtttccaatgagcagttaaaacatatgggggctctgttttcaaattctgcttctgccaaggtatcagcagcgtggctcgggcaagtcgctcacctcctctccttgcagtatgctttgattgcactg

SEQ ID NO: 56281 - DNA, 365 bp, Homo sapiens
caacaataacagcaacaacaaaccttggggattctgatttctgaggtgcccacattatattatttaaaatatccaggtgaatacaaaaagttataaggcatacaacaaaacaaggaagtagactcatgcacagtggaaaaaagcaatcaattaaaactatccctgaggaagtccagatgctagatttactactcaaagattttaaactgactatttaaaatatgttcagagaactaaggaaaccatgtctaaagaattgaaagtatgagaatgaggtcccactaaatagagaatatcaataatgagatataaaaaataaccaaatagaaagtatgcagaagaaaataaaatagcgcaaatgaaag

SEQ ID NO: 56282 - DNA, 446 bp, Homo sapiens
gctttgctgaaaaggaccatgaacatcaaggagaacaaagccatgcttgcccagttattggcggaattgaactcgatgccagatttcttcccagtacgaaccccaacctcagcttctaggaagaagacagtgaggcgggccttctcggagggacagatcacgcggcgtatgaacccaacccggagtgcgcggcctcctgagaagtttgctctagagaacttcactgtctcagccgctaaatttgcggaagagttttacagcttccgaagaaggaagacaattggggggaaatgccgggagtacagacgacgtcaccgtatatcttcttttcggccagtggaggatatcaccgaagaggacttagaaaatgttgccataactggtcgagataaaatctatgataaagttctgggtaacacgtgccatcagtgtcgacaaaagaccat

SEQ ID NO: 56283 - DNA, 403 bp, Homo sapiens
tttttttttggtctccatatacatttattttgtgtagacaacaatgacttttcaccatttcctttcctgtggttccatggttctcaaaatggtaatttcatttatacatagcaaaaagttcacaaaacctttcagcactgttcacattttcacatttgtttaggaaacaatttgtttaggaatacagctagctgattttcttctgatttcttccacttttggaatcccacataataataatgttaaagtataccaagaagaacaggaagttcaagcaagatacaaaacacaccaatacagaaaacaagtccggtagtttctgaggaggatccagtgtgacagtcatcaacgtcagaagcaccatagtgatgactgagataagaaacaaatattgtataattct

SEQ ID NO: 56284 - DNA, 2765 bp, Homo sapiens
aagcctgtgatggagtcgtacacactcctgctgagcccaccggagactcaagatgaaggctggacccttgcgctgtccctggctctaacctacagactggggcctggctccgtcttactggcccccaggtctccatggagactgcagaaacccccgcctgctggaggcctgccacactcacagttaccagctagacagtggggcttactaagacaagcaggacctaaaacagtgtctcccctgggaacctactccccacccagcatttgctaagtctgatcacagggaggttattttgtctctctgtctcggtttctctgagccactgagacagatggctgtccgctttgaggctctgcagagctgttggcaccccatggtgtgtctgcagtgttctgggcacatgcatgggcacccatcgttgagagtgcagctgggaagaactctgaaccagaagtcatcagagctgaggcatggccttgaacatgtcactcagtctctggggcttctgtttcacaaatgcatgagggggccaccagcccagtggctttaaaccaggggcaggttgtccctccaggcagcattggaaatgtgtgtgtgttgagggggtcacagtgactgtgggggcacccctggcatctagtgggcatcccacaatgtgcagaacagtctctgacagcaaagaattggtccattcaatgccaattgtagtacctttgagacattctggctgagccaatgccttctccctgtcagagtcccccagagcagagagggtcaggcttccctggaccttggctcccagagcaagccaaaataaagactacactgttgccttgggggcttgtcggggccagggccaagacggtctgcgtgctgcagggccaggacagaaatagccacacatgccggtgagaacaaagagcctctttctttctcatgttgacatcgactttctgtgccaagtcctttgggtataaggatgctagggaattcctataggcaccaaacagaaggaaagctaggggcttggactactgggtataggacttgctctagctctcaggtcctagcccaagctcaatgcaaacacagcccctccggcttctctgtttctgtgaggttctggaatcccttcctctgtgtccgtgagtctgacagaatcgatgatgttcccttagagctggggaaatccatgtgtttattcacggagggaactcaccattacctcccttgtcttctttgcctgccttgggagaaatccagagtctttcgggaatgggcaaagggcagctcctggatttccctggaggggagggcactagctgagggaagtagctcccttcattcatgatgcacagtttacgcagcagacacacaactgcgcctactatttgctcggtgccctgcaaggtgctgcctaactttgatttgttatttcagctctctccaggatagtgccaaatggtgcaatgggaaacctgttttgctggggggctctagatcactggctccagaactcccggctgccagggtagcccctaccccccagcccccttgctcctggacagcagtgggtctcacctttagcctctgccccccagttctggtctgacccaacagaggggctctatgatattaagaaggggcccttcctgctctgtgcctcaacctattctccataatagggagtctaatcctattccttccctgcctgatgaggatggtgtgaggatgaggaggacggcatctcatttggggctttttggcagtgggcctcattttaatcctgcagggctgcctgccagtggatctatccagctgcttccttgtagccaagaatgagttcaatgaattgtgattcactgattttattgattttgttttaaaacagggagactggtatttttgaagctgctatcattttctatttctttattaatttctttgtaatcatcttattaaagttttcttatttagtgggagagggagctttgtttaagtttggaatttgcctaaggcagaagttataaggcttcataaccttttgtatgtattgccaatatttgaaacttgggagattacgtataaaaaatacctagttttctgggtggaggatggggcatgctgtcatctcaagtctgctgcggctcacccccaccacctttaccccctcccccgcccttcccatcccccactgcacttcactcatgtaagacgtctgcccggtgctggtccaggcgggcatgtgagtttgtagcctctgctccaaaggatggtttacacattattttttcattaccttcagtattcctgtgaatggttcaagagagaaagtcttcatttactaagatttgggttctgcctcccaagtgacaatacggggctgagatccctctcagcttctttgagatgtggccaccataagcatcatcgttgtagggacagtctcattgctgtcttctagcagacagaagagttaggtgccagaaaggacaatcttgatggtgggtcccctccctgaaggactttaagaaggcataaaggggttggggtggagggtggcgtgtgaaggaggaggcccttgattaggtcagtggtccctgggagccatcggcgagaggcctccagccgggtgacagtctgggctctcgggtactaatctttctaatatggcagtggttgtggcacttctgacttgaattgataattctcatatctaataaaaccaagaagtacctcgttgatatcttaaaaaaaaaaaa

SEQ ID NO: 56285 - DNA, 336 bp, Homo sapiens
  misc_feature (1)...(336): n = a,t,c or g
gcctatgcatactttgctttttccatcccataacccattagactaagtgactaaaggacgagatgggtgggtggcattaacagtgtgaatatgctgaacaaagggatgacatgtcccattcgagatttcatcacactagtcagaatggcacacaatttaaaagtcgtgaattgttggctaggcgtggtggctcacgcttgtaatcccaacactttgggaggccgaggttagtggataacctgaggtcagaagttggagaccagcctagtcaacatggtgaaaccctgtctctactaaaaatacnagnanaaaactaccgggtgtggnggncntcct

SEQ ID NO: 56286 - DNA, 372 bp, Homo sapiens
ctgtcttaaggcaggggagaggtgagttgtagaaggcaccgtgaagtaggtatcttttttgagaacaagtttgtgtaattgtgtggttgtggggattgaggggaatgacattgggcagtctgtctcaaacagtgcagagaattctcttttgggggattggagggaggggtgccaataatacttaaacttgtcctactgcaaaacctcctttacctcccttcaccaattcacatgacattggccagaagcagctgtaccaagtgcaggaactctctgaaggcttgagttttatcaattcatgcaaaatctacattgtatggatactttaatatttatttttaaaagtttatttttccccactaatgtttaagt

SEQ ID NO: 56287 - DNA, 1332 bp, Homo sapiens
tttttttttttttttttcttgggggggtttctgtatttccttttacaaatgaaacaaggtggcaacagggtgaggggcggggttgggaaggcatcaggacctatatacatgggacttggagggagtttgaggtgaggacttggggacaggcagggaggggagccctggcagaaccataatcttcatatgtcagtggcagccggggtccctctgaggccccaggggcccgagtcccagcagtccagactagcacccctggggctcctcctccccgcaggatatgttaagtggggtgaggctcgcggctaggaccctgctcacggcccgagtcccggtccttggcctccgaggaggacgatgaggaagaaccagagctgtggctgcggcctgactgccggtaggcagcactcagctcctgcagccgttcaggcgtcggcgcccacttggcaaagccagggtcgttctgtaggaagagcacagccgtgttgtggacggccttgtagtgcatttcctccttcttgcagatgtgctgggagccactgcggtactcatgctcaaaggcaggcaggatcaactggtggcgtttgaagcggctctgctccatgcgggtgagcgctggtgttgggggttcccgccactcagggatgaacacgatgaaggacaggggctccggtgagctctcaagcagtctctcaaagtgagagaccatggcatccatgagctcctcgcagaagggagggttggcctcaaatgaaccactcagtggagcaaagtctaggcagggcccgcgggagccaaagtagccgtctgtgtcggggaaggcagaacagtactggcggaagtagcagttgaggggtgaggcgaagcactcggaaactgacgccaaagagtcggtggagggcctcaaagacatgcacaggcagcgatccctgcaggccagtccccctcgtagaggcccacgccgaacatcatctggtaccgtcggagaagacaccagacccggggcaggaacctctcaaaggcagagtcatcaatgcagctgtagcggtaaaggagccacagcttgctgaagtagttgcggctgaccttgaccatctctcccttataccggatgcagaccacgttgttctccatgtgcatctccacgctgggcatgggcggtgcagacacagccagccggactgggtagcagtacactaggcggggctccacctcaggggcctccacctcctctgagatgttgttttccttgaggatggcaaggtgcttctctcggatccgtttgacgtactccagggagatgtggtagatcttactgcagatgccttccac

SEQ ID NO: 56288 - DNA, 378 bp, Homo sapiens
  misc_feature (1)...(378): n = a,t,c or g
ttatggtcactttgaaagccaggatgacaaattatggattacctagatatcggtggcttactcatgcttggaatttttttcagagagagtttaagtgctgtggagtagtatatttcactgactggttggaaatgacagagatggactggcccccagattcctgctgtgttagagaattcccaggatgttccaaacaggcccaccaggaagatctcagtgacctttatcaagagggttgtgggaagaaaatgtattcctttttgagaggaaccaaacaactgcaggtgctggaggtttctggggaattctccattggggttnacacaaatcctggccatgattctcaccattactctgctctgggctctgtattatgag

SEQ ID NO: 56289 - DNA, 274 bp, Homo sapiens
  misc_feature (1)...(274): n = a,t,c or g
ggtaccactgggtagcttaaagagtatttatacactatctcatttgattctcacaacagtcctggaaaatggatgttttaggtatttctacttccctctgttctccctatttctctctctacaccctcttttctttccccttccctttcttatttacctcaatataggacaaagtaggtgtaagcaaagtaggtttaacagcaagtcatctgagaactcacaggttgccagtggtggaagngnncccccccttgnntgntncttnncctnttct

SEQ ID NO: 56290 - DNA, 411 bp, Homo sapiens
gcaccaaataactacaaaatctcattttaaatgagtaaggagaacgtgtacagaagcaaattttcttcaaaatagttgtgggaagagcttatatgtgaaagcttatgactggttttgagggagaacttactggagaaaatggactctatgttaagtatggttttcagatagaattctttccttttttaatgaggaaaaaaaatccacattaatattgaaactgcacctgtaatcccagcactttgggaggctgaggacagaggattgcttgagcccaggagttcgagagcagcctgggcagcaaagtgagaccccatctctactaaaaatttaaatgtatttattaaaactgttctctagaagctttggactgaatcccaaaagtgtttataagttcaaaagcaaagtatt

SEQ ID NO: 56291 - DNA, 1112 bp, Homo sapiens
tttttttttcttaaatcaggttgtatttattaaaaacaaaatacaaaataacttggaattcagattattgtgatgtttatcccctaacaggtcagtcctaaagaaaaagctaattgtttcaagggtggtaacggaagaattttaagtaaggattatattaaatacatctagtttgatgcaaactgagttttattcaatgttggaggcctcactatgttcctctaagttttcaaccattaacaacccaaaccggttgtttccctcataccaacacttggtgtgtgcagtggttctccctctgttcttagaacagctggtattctgtttcttctgcctttttttttttgaatttgatctaccttttggtaggaatatttcagcgggggcatatgaccttgtggcattgaatagatattcataaagttgcttagcctcaggacatatgctcaggagactttctacagaggtcgatgctagcagttgctggcatagtccgtgcaccaggcttccactgtacagtcgagttaggtctggctctgggagaggagtggacagcagctggttgagatacatccccatctggagacaggactgccactgacagaagatgtgagctgtgtctaagtccagtcttgtgcccagccgtgtctgcgccttcactctttggaactctgcatacaacatcttagcaccatcttcctgcagctcttccttaccagggctgttgattatggcaatcaagggccccactagcattgtgagcagtaaggattgtagatgatgtagctttgctttggtctcggtgtgctgcaaccagtagcaactgacagcaatgggcaacttcagtgaagtagggattggctccagaatggtctgtttcaccttcagggtttctaacagaagcatctgccgcctcctcaaggagagctcagtcaatctgcttaagtcagaatgatccttggccagttctactgcatcaatgattgaggttctgatatttttattaatcctttccacttcactgaaagctagaggctgaggaggcaatgcattccaggatgtcttgtccagatgtggtgaggcatttaaaagaagcccatagatgatttgcc

SEQ ID NO: 56292 - DNA, 1581 bp, Homo sapiens
gaacaaccccctctttgtcaacctcaataatgagctcactgtggaggagcaggtggagatccgcagtggcttcctggcagctcgggcacagctccccgtcatggtcattgttaccccccaagaccgcaaaaactctgtgtggacacaggatggaccctcagcccagatcctgcagcagcttgtggtcctggcagctgaagccctgcccatgttagagaagcagctcatggatccccggggacctggggacatcaggacagtgttccggccgcccttggacatttacgacgtgctgattcgcctgtctcctcgccatatcccgcggcaccgccaggcttgtggactcgccagctgcctccttctgccggggcctgctcagccagccggggccctcatccctgatgcccgtgctgggctatgatcctcctcagctctatctgacgcagctcagggaggcctttggggatctggcccttttcttctatgaccagcatggtggagaggtgattggtgtcctctggaagcccaccagcttccagccgcagcccttcaaggcctccagcacaaaggggcgcatggtgatgtctcgaggtggggagctagtaatggtgcccaatgttgaagcaatcctggaggactttgctgtgctgggtgaaggcctggtgcagactgtggaggcccgaagtgagaggtggactgtgtgatcccagctctggagcaagctgtagacggacagcaggacattggacctctagagcaagatgtcagtaggatgacctccaccctccttggacatgaatcctccatggagggcctgctggctgaacatgctgaatcatctccaacaaaacccagccccaactttctctctgatgctccagcattggggcaggggcatggtggcccatgtagtctcctgggcctcaccatcccagaagaggagtgggagccagctcagagaaggaactgaacccaggagatccatccacctattagccctgggcctggacctccctgcgatttcccactcctttcttagtcttcttccagaaacagagaaggggatgtgtgcctgggagaggctctgtctccttcctgctgccaggacctgtgcctagacttagcatgcccttcactgcagtgtcaggcctttagatgggacccagcgaaaatgtggcccttctgagtcacatcaccgacactgagcagtggaaaggggctatatgtgtatgaatagaccacattgaaggagcacaatgccctcctgtgttgatgccacttcccagggtggagacagtggaaaagaaccgaggacaggaaaggattgggtaggtgaaggggtcaggggactggtagtcacccaatcttggagaggtgcaaaaagcactgggggctacccgttagctgcatctgccctggctgtttgcccgttcatgtcacaaactgccactactatgtacctgcagtggggttgcagagatgggggagactcaagtcttactccccaggagctcccagggcccaaggaggagaatgctgcctcctttcagtctggtctacaccactttctggtagctctct

SEQ ID NO: 56293 - DNA, 1178 bp, Homo sapiens
ttttttttttttttacgggggaaattaagcaatttaactttttatttaaaagagatggggtctctctgttgcccagattggtctagaactcttgagctcaagtgattctcctgactccctaagtgttgggattacaagcataagccaccacgcccagctgcaatttaattttaaatcagagttcaaaacaatagaatttatgccactgtgtgtgcctgccaaacgaactgaacagacagtaactgctctaatagttcagaggagggaaagatcacctcaggctgggggcgagggatgggcttaaggaggggcactatttgagctgagtctggaaaaacagccagaattacaggaagcagagaggctaccagaaagtgggtgtagaccagactgaaaggaggcagcattctcctccttgggccctgggagctcctggggagtaagacttgagtctcccccatctctgcaaccccactgcaggtacatagtagtggcagtttgtgacatgaacgggcaaacagccagggcagatgcagctaacgggtagcccccagtgctttttgcacctctccaagattgggtgactaccagtcccctgaccccttcacctacccaatcctttcctgttcctcgggttcttttccactgtctccacccggggatgtgtgcctgggagaggctctgtctccttcctgctgccaggacctgtgcctagacttagcatgcccttcactgcagtgtcaggcctttagatgggacccagcgaaaatgtggcccttctgagtcacatcaccgacactgagcagtggaaaggggctatatgtgtatgaatagaccacattgaaggagcacaatgccctcctgtgttgatgccacttcccagggtggagacagtggaaaagaaccgaggacaggaaaggattgggtaggtgaaggggtcaggggactggtagtcacccaatcttggagaggtgcaaaaagcactgggggctacccgttagctgcatctgccctggctgtttgcccgttcatgtcacaaactgccactactatgtacctgcagtggggttgcagagatgggggagactcaagtcttactccccaggagctcccagggcccaaggaggagaatgctgcctcctttcagtctggtctacaccactttctggtagctctct

SEQ ID NO: 56294 - DNA, 384 bp, Homo sapiens
catttttcctacataacaagagactaatgcatttaaacgaattgtttatgttttggggcacagcatgaataaagatgtagttttgtgacatcagcaaatgaaaggggtgggaacagatatgtaaaggagcagagtttttctgtgttactgaagttaagctggcataaatttaaattagaatgttattactttaggatgttaaatgtaatccccatggtaaccacaaagaaaatagctatagaacatacacaaaaggaaatgagaaaagaatttaaacattccactataaaaaatcaactaaatataaaagaagacagtagtgcaagaaatgagggacgaaaaaagctataatacatgtagcaaacatagcaaaatgacagaagg

SEQ ID NO: 56295 - DNA, 658 bp, Homo sapiens
ccgggttcggtgctcccgcgggcactggttctcaaagccttctccagcagctcgctggacgcgtcctctgacagctcgcccgtggttctccttccagtcccaaaagaaatttcttcagcagacatcagtctttcaccacaaagacagagaaaggcaagcccagccgagaaattaaaaagcactccatgtctttcacctttgcccctcacaaaaaagtgctgaccaaaaacctcagcgcgggctctgggaaatcgcaagactttaccagggaccacgtcccgaggggtgtcagaaaggaaagccagcttgccggccgaatcgtgcaggaaaatgggtgtgaaacccacaaccaaacagcccgcggcttctgcctgagaccccacgccctctcggtggatgatgtgttccagggagctgactgggagaggcctggaagcccaccctcttatgaagaggccatgcagggcccggcagccagactagtggcctccgagagccagaccgtggggagcatgacggtggggagcatgagggcgaggatgctggaggcgcactgcctcctaccccctcttccacctgctcaccacgtagaggactcaagacacaggggcagcaaagagccactccctggccacggactctctcccctgctgagcga

SEQ ID NO: 56296 - DNA, 424 bp, Homo sapiens
acgcggccttccaggcagagacccaggagctgctcgatgtgattgttgctgatctggatggagggacggtcaccattcctgagtgtgtgcacattccacccttgccagagccactgcagagtcagacgcacagtgtgctgagcatggtcctggacccggagctggagttggctgacctcgccttccctccgcccacgacatccacctcctccctgaagatgcaggacaaggagctgcgcgcggtcttcctgcggctgttcgctcagctgctgcagggctatcgctggtgcctgcacgtcgtgcgcatccacccggagcctgtcatccgcttccataaggcagccttcctgggccagcgtgggctggtagaggacgatttcctgatgaaggtgctggaagggcatggcctttgctggctttgtgg

SEQ ID NO: 56297 - DNA, 538 bp, Homo sapiens
  misc_feature (1)...(538): n = a,t,c or g
anntnanagctatgacatgattacgaatttaatacgactcactatagggaatttggccctcgaggccaagaattcggcacgagccaagattcaaaacacgaagctgaccatgaagcgggacggcattgggtcagtgcggtaccaggtcttggaggtgtctcggcaaccactcttcaccaatatcacagtggacattgggcggcctccgtcgtggccccctcggggctgacactaatggacagaggctctcggtgccgaagattgcctgccagaggactgaccacagcctggctggcagctgctctgtggaggacctccaggactgagactggctctgttttccaagggtcttcactaggccccctagctacaccctgagtttcagaacccactttggggggcctcctgcctgggcaggctcttcaagtgtggccctctttggagtcaaccctccttccgacccctccccctacccagccccagtcactgtagggtcggccagcccctgcactgcctcgcaaatggctggctaggcact

SEQ ID NO: 56298 - DNA, 1389 bp, Homo sapiens
  misc_feature (1)...(1389): n = a,t,c or g
tttttgctccattcacgttttttactaaagcacccacacaagtttctgtgcaatgtacaaacacaagccggccctggggctcctgcctcctctctcagacagggaggcgggaaccagacttactgatccaagccccacctgcctcccatgcaaaggccaaccccaagatcccaggcagcgacacagcatcccctctggtcccctcctggggctgctcctcagcagggggcgcaccaaagcttgccccctacaatgttgaatgaaaaaggtttcccctcccctgggagcaagggggttcccaagagctgagaattccccctggaagagacactgccccctagacatacctcccacccttccaggccctaggggactcaagggggggaaactgaggcacagagaggtggagtgacctagcccaggccactctgcgaggcagtgcaggggctggcccgaccctgacagtgactggggctgggctagggggagggggtcgggaaggagggttgactccaaagagggccacacttgaagagcctgcccaggcaggaggccccccaaagtgggttctgaaacttccaggtgtagctagggggcctagtgaagacccattggaaaacagagcccagtctcagtcctggaggtcctccacagagcagctgccagccaggctgtggtcagtcctctggcaggcaatcttcggcaccgagagcctctgtccattagtgtcagcccccgagggggccacgacggaggccgcccaatgtccactgtgatattggtgaagagtggttgccgagacacctccaagacctggtaccgcactgacccaatgccgtcccgcttcatggtcagcttcgtgttttgaatcttggtaaacctctgagggttaggttcgttatgcttgtcgcggtcgtgcttgatcatgcggtagcggccaattcggatgtctgggcgtgagatcttcatcccagtcagggagatccggttgaagatgtcatcatcctcgccaccccagccccagtactcattggggaagccattgattctcagaaactgagccttactcaggcctgacacacctccaaagtagccagcatagggaagccggaagccaaacttgtccatggcaatggcaaagtggcggggttggtcgccgcagcggtataggttgcggtcatccatggggaccaggtccacatcgctgaagatgaagcagtcataggcggcatcctccttcagcgcctctaggaagcccacgttaagcagcttggcccggttgaaggtgtcctcaccatgctggttgatgacatagagccgtagcgcaagccngccgcctcaagatggggtgtagatagtggagccagtagcgcaggtgcctcgttccga

SEQ ID NO: 56299 - DNA, 2598 bp, Homo sapiens
ggcacacacgaggaggagggttgagctgctgccgccgccgcctctgtcgtcgtcgcgagtgtggagtcgggactggagctgctgccgcggcgacgccggggatctttgtcgctagctcccggcccttctgccccgccgccttccctcagtcagcgttgcccactcctctccggccgggcgcccctgcctccatttctcgctctctgtccaccacacacacggcccccccgatcatggatccgggcagtggcggcggcggcggcggcggcggcggcggcgggagcagcagcggcagcagcagcagcgactcggcgcctgactgctgggaccaggcggacatggaagcccccgggccgggcccttgcggcggcggcggcttccctggcggcggcggccgaggcccagcgggagaacctcagcgcggccttcagccggcaactcaacgtcaacgccaagcccttcgtgcccaacgtccacgccgccgagttcgtgccgtccttcctgcggggcccggcagcgccgccacccccagctggcggcgccgccaataaccacggagccggcagcggcgcgggaggccgtgcggcacctgtggaatcctctcaagaggaacagtcattgtgtgaaggttcaaattcagctgttagcatggaactttcagaacctattgtagaaaatggagagacagaaatgtctccagaagaatcatgggagcacaaagaagaaataagtgaagcagagccagggggtggttccttgggagatggaaggccgccagaggaaagtgcccatgaaatgatggaggaggaagaggaaatcccaaaacctaagtctgtggttgcaccgccaggtgctcctaagaaagagcatgtaaatgtagtattcattgggcacgtagatgctggcaagtcaaccattggaggacaaataatgtatttgactggaatggttgacaaaaggacgcttgaaaagtatgaaagagaagctaaagagaaaaacagagaaacttggtacttgtcttgggccttagacacaaatcaggaagaacgagacaagggtaaaacagtagaagtgggtcgtgcctattttgaaaccgaaaagaagcatttcacaattctagatgcccctggccacaagagttttgtcccaaatatgattggtggtgcctctcaagctgatttggcctgtgctggtaatctcagccaggaaaggagagtttgaaactggatttgaaaaaggaggacagacaagagaacatgcaatgttggcaaagacagcaggtgtaaaacaccctaattgtgctaattaataagatggatgatccaacagtaaattggagcaatgagagatatgaagaatgtaaggagaaactagtgccatttttgaaaaaagttggcttcaatcccaaaaaaggacattcactttatgccctgctcaggacttactggagcaaatctcaaagagcagtcggatttctgtccttggtacattggattaccgtttattccatatctggataatttgccgaacttcaatagatcagttgatggaccaatcaggctgccaattgtggataagtacaaggatatgggcactgtggtcctgggaaagctggaatcaggatctatttgtaaaggccagcagcttgtgatgatgccaaacaagcacaacgtggaagttcttggaatactttccgatgatgtagagactgataccgtagccccaggtgaaaacctcaaaatcagactgaaaggaattgaagaagaggagattcttccagggtttatactttgtgatcctaataatctttgtcattctggacgcacatttgatgcccagatagtgattatagagcacaaatccatcattctgcccaggctataatgcggtgctgcatattcatacctgtattgaggaggtggaaataacagccttaatctgcttggtagacaaaaaatcaggagaaaaaagtaagacccgaccccgttttgtcaaacaagatcaagtatgcattgctcgcttaaggacagcaggaaccatctgccttgagacctttaaagacttccctcagatgggtcgtttcaccttaagagatgagggtaagaccattgcaattggaaaagttctgaaactggttccagagaaagactaagcattttcttgatgaccctgcacaatactgtgaggaaaattgactgcagaagcctacttcacaccgccttctcttattttctgcccattgataaacctctccccatattttgcaaagaggaaattcacagcaaaagtccacattatgtcagctttctcatattgagagctctgctatgccactgttgaatttttcccaagattcctgtccctagccctcacttcaaactctgcttccttggacagatttggcaatagctttgtaagtgatgtggacataattgcctacaataatgaaaacctacaggaatttttttatttttcattttccccttaggcatatttagtatttttcccccaggcagatcattctgagtgtgcgagtgtgtgtgcacatgttacaaaggcaactaccatgttaataaaatattcaatttgaaatcctaa

SEQ ID NO: 56300 - DNA, 475 bp, Homo sapiens
  misc_feature (1)...(475): n = a,t,c or g
cggacgcgtgggcggacgcgtgggtggtcactgtcaacaccgacctcaccaccatcgacctggtggccttcttgggctacaaatatgtcgggtgagtacccccgcccttcacgccagccccagcccttgggccttgtcctcacacagcctcctctccctcccccaggatgattggcggggtcctcatgggcctgctcttcgggaagattggctactacctggtgctgggctggtgctgcgtagccatctttgtgttcatnnnnnnnnnnnnnnnnnnnnnnnnnnnnnnnnnnnnnnnnnnnnnnnnnnnnnnnnnnnnnnnnnnatccggacgctgcggctgaagatcttggcagacgcagcagctgagggggtcccggtgcgtggggcccggaaccagctgcgcatgtaacctgaccatgggcgntggctgcggcgcactattgattcatgttattgggttcacttnccacct

SEQ ID NO: 56301 - DNA, 629 bp, Homo sapiens
ttttcgccatgcccatcagggtttattgtttctgtaacagcggccaccgcctggggcggtggcctgtgcagctggagatctctcagcaccttgggttgggggcggggctgggcgggacatgggatggaggcggtgctgtggccagacagggtggaccttggggcctgcaggcaggagatgagttcggcggccacagtggcccccagcagcagcagcagcagcgggaggttcagcgggcgcgctcaccgcaccaggtggaaggtgagccagtacatgagcataggctgcgccgccgccaccgccatggtcaggtacatgcgcagctggttccgggccccacgcaccgggaccccctcagctgctgcgtctgccaagatcttcagccgcagcgtccggatcatgaacacaaagatggctacgcagcaccagcccagcaccaggtagtagccaatcttcccgaagagcaggcccatgaggaccccgccaatcatcccgacatatttgtagcccaagaaggccaccaggtcgatggtggtgaggtcggtgttgacagtgaccagatagaggctgagcaggatggccagcacctccagggtcagccaggccagggctgagctcgcttgcagccc

SEQ ID NO: 56302 - DNA, 1073 bp, Homo sapiens
  misc_feature (1)...(1073): n = a,t,c or g
tttttttttttcatacataagccttatatttttaataaaaaataaacagtctctgacaagcagttttctgaatcccaaaacaaaggaaaagggagggggagaggtgaaggggtcagctagggtaaaggagtgaagaaggctcagattacccctgccattctgccagggcagaagggatcagagtctgccccaactgaagcaagaagaaaggtggtcagacttcagggaagacttcctgggagtcagcggtgcacgactggtaagggaagcaggagggagcagatccctgcatgaccctgggagaagggagtgttggtgtccaaagcggcagcttcagagtggagtttccaggagtggcatgttagcatatgattgtttagatgtttggtgttcattaccatagggtcctgggacaggcaggttttttagggtctcttgaaacactgtgtttctggagggtccctggaatggccagaactgaaggatcctctccaggttcttcaatatcagtgtaggagcaggtctgggggtagcccccaccctgttagagagctcatgtgcttggtagaagggagtcccataggggaggcagactgctgtgcatcaccctgctgagtgtcatcagtgatgcagagtagcagaagctcctctcaggggagaaaggtggtcttttgtgctgctgtcatcctagtcagggctgtgcttgggcccgccccagccagcatggcccaggtgcctgcaccgcagccccggcctgtgcctagagtttaagctacctcagtgcctaggcagttgttgtcagcgtccacatcactggcagaggtcctgcattccttgggagactggaggtgttgctctctgcttaacggggccttctccccagggcgcagggtctcacagccctgaaccttgccccgagcccggagtgctctcaatggggaggccacgaggatgatgagggctcctgaaagcactaaggcaaagaggacagtgacagtgacaaagtggggccagtaggantgctgggcagccagggcggccccaccactgaccctggtcaacgggaccttcac

SEQ ID NO: 56303 - DNA, 1088 bp, Homo sapiens
  misc_feature (1)...(1088): n = a,t,c or g
ttttttttttttattttatcagaaatattttatttcaagagttaacacttttttcaaaaagtaaaaacaatataattacttccctgagtataaagaaccaattctacaataaaagaccattacaaaattaagcaattagaggtacataattctctgcattcaattatactctatttcaaatttattcttaaaaatgtcatgttttggaactttaatgtttcaaaaaaacctcagaacaactcattttgcacctatggtgttaaggttatcagtctgatctgtctttatcaaattcaagggcaatcttcaaagcggtgctattgaggccaacagattgcatgttacatatgatagaaacaatgattcctcttgggggaaccttgttatttatagtctctgtatccagttcttcaggaaggaccagcaggacactactggcacccactgcccctccagtatgtgaagcataatgccgttgctttctacacgaaccatacgtttgtttcttttccacaacaccccacgccattgcatatttaccctctttatcccaagacatctctgtgttagggactggggtccacatcataaccattgtttctggtttgaggtatccaggtaaaagattttcatttgagttcttaaacagcccaacttggtaaccataaagcattgcattcccaaatttcagaaggtcacccactgtagacagaaatccaccaccagcccatttataggagttatccacgtaaggtgtgttgacaagacgtttctttttattgtaaacataaaatcttgctctattgtaaatcactggctcgttttcntcctgcacagtcgtcagccatatcccaagtcatggaatattttctgcatatagtccaaatatttacatcctgaagctctctctactatggctgccagtagggtatagccaaaagttgaatacaaaaactgactaccttgagacatcattgcgaggagganaaaaataaaatacttgattattattcaaaaacatatnaaatatattcccactgaaaattggcatacttttaaaactggaatattttacttcagcattcaga

SEQ ID NO: 56304 - DNA, 386 bp, Homo sapiens
  misc_feature (1)...(386): n = a,t,c or g
aaaagaatgtatatattggctctcatctttcattggtcagagtttccagggagtcccctctgtgcatttctcaactatattttctagcctctctaaccagcccctggtgtagcaagatcccgagagagcagcaacagcacttatggcataagcagggcacattgaaaaaaaaaaaanncagggnnnnccnccnnnntnttttngnccacnacccngnaanttcgggggcnttnggggggangtnnnnaaactttngcnggttntnncnnttnannngnngngggnaaaccccaaaanngnaaaaaannggggggnagnnncagnnttanngacngngggnaaangcagccaggntgnntcntttcnttggagnacttnaagcaggg

SEQ ID NO: 56305 - DNA, 716 bp, Homo sapiens
  misc_feature (1)...(716): n = a,t,c or g
cttggggcaggactcaccagaaatcaatcccttctggtcctgggagggggatcaagggtaagagttgagtgggtgtgcctgggtcagggtaagagaaattttgaggcttgggaaagggcagtgttgaggtttggggctccctatgaactatggagacttttgggcgctggcctccattctctgagctgcttggtagggagtgcagagtagggtggcccacggctagggtgaggaccaaaaagcaggcttatttgagcctcctagacactatctggagctcagagtcaccctccacccacgtccctgaggcccaggatgttacagattgctggttagggcaaggatgggggttagtggtaggaggatatggtgtttcctaaaagggaaaggcagtacctacaacattcccaggagaggctctcagcagacctaggaccagaacatcttgatgtcacccacctgggggcatttgtatatgcctactaagcccaggagcttagccctcacacttagggttggggacctcttttgcaaagtatttccactctaaactttaggaggacaagaaactactctgagtagcagctcctgggaggacagtcccctcatctaggaagcccacccgactgctcagacattagccctttctcttcctactctttctatnncatacgactcactatagngcnnatgtcnctanacgactcactataggg

SEQ ID NO: 56306 - DNA, 437 bp, Homo sapiens
  misc_feature (1)...(437): n = a,t,c or g
ggacccgggaacatgatggtcgctggagcagaaggcgctgagaagggaccacggcggcgctgggtcgtgcgagccagtagcgggctgaaacgtagaggccagaaccaggtctcagggggcactaaaggcggtcggaggtaatccccacaccgcttcctcctggaagtcaggctggccgggagctcccgtatccaggacggttggtcgcctctggcctggcagggatcctagtgtctcgggacctcccggtgacgcgcctgcctcccctgctgcaccataggcccgggagtacggcgtccccacagcttggaccggcaggggctcgtgaaatgtttgtcaagtggataaatgaccatggccgtggtctccgcgggaggtgaggaaactgaaagccaccgaggaaaaggggggcgctcttaagaantgccgcggtcact

SEQ ID NO: 56307 - DNA, 409 bp, Homo sapiens
cggacgcgtgggaaattttctgtgtgggtataatatagctttctaatttttttctttcacaaaggcaggttcaaaattctgttgaaagaaaaatgctttctgaaactgaggtataacaccagagcttgctgtttaaaggattatatgatgtacatcagttctataaatgtgctcagcagtttaacatgtgaatcctgttttaaagtgctcagatttcaactgtgtaagccattgatataacgctgtaattaaaaatgtttatatgaaataacttaatgttttaaatttatttatgtagatcacatcatttttatcgtatgcagtgcaaatatgtgaaatgtcttttggtttattccaacaattatttattttagaaagtaaagtttaaagactttaaggacattcaaag

SEQ ID NO: 56308 - DNA, 351 bp, Homo sapiens
aaaaaaaagggtccttaaaatttagatttcagacatgttgtacttgttgatgaaaaattaaaggttatgaattttggagtgcatgctgatatattctaggtgtaaggcttagccttaggggaatgtatcattaaagtgaagaaatcaaacaattcaatagtaaggttatttattcagtgattgtgcatgattattgaaataatcatgagagattgttggaatggggtgaagaggaaggcagtcaggagctaaaacagtgggtgaggtagagacaaacagtgggaaggccctatagtgaatggtatagtgagcctccaaggacttgggattttggaggatcaaagatgactg

SEQ ID NO: 56309 - DNA, 429 bp, Homo sapiens
  misc_feature (1)...(429): n = a,t,c or g
aaaggatacagacagtgatagggaagcagggactgaaacggtgggagagaacaatgataaagaagaagaagagaagaaagatgaaacttcgagctcctctggttgtgggctgcacactgcaaaaagatacagctgaaaaaggacggctcctctaaccatgtttacaactatcaaccctgtgatcatccacggcagccttgtgacagttcgtgcccttgtgtgatncacannatttttgtgaaaagctttntctntgtngttcntaagtgtanntnnttctcactctgntnanntcccnnnantnnntcatttgttntnttcntgntntntntaatccactancngnttcccctncctattcttcttnttantctgnnntcctcnnntttntnaactnttnctatctttctnncctnncntnnnnntctc

SEQ ID NO: 56310 - DNA, 181 bp, Homo sapiens
taggatttgctgtgtgatttgtggtgaattaggcatttcttgagaatgtaggtttctagaagtattagaagatggcttgactctgcagtgttgtacatatttccctaaaatttggacatttctccagtaaaacgtgtctgatgggttaggaccatttgtctccaaggaatggcagtggttt

SEQ ID NO: 56311 - DNA, 182 bp, Homo sapiens
ggtcaaagagttacttgttcagggggaaggagggagctacgattgagtcagggcatgtggtggggtttctgaggtggccggcacagttctatttcttgatttgggtggtggttataagggtatttgccttatcataactcctcaaactctagaggaagaagtctgctgtgaagaaaagatta

SEQ ID NO: 56312 - DNA, 392 bp, Homo sapiens
  misc_feature (1)...(392): n = a,t,c or g
gaagggaatcagtcttaaaggcggggccagactgctgcatacaacctcaaatggaactgtaagccctgaagaaaagctgagaatggagactggaacagggattctcacaatttcgtgtgcataagcaccgcctggagaggctgttaagaataaagttacacacccaccacagggattctgtctgattctaccagtctggggtaggccatgatctgtgcgtttaatgagctcttatgccagttctgaggaaggggcccacaggctgctcagggagtcttagggacacctctccaaagggctctctggtgggattctccgctttaactctccccatgggatattcttgctctcatgttatggccttcatgactcaaaatttangtaaaagcatt

SEQ ID NO: 56313 - DNA, 360 bp, Homo sapiens
ggagaataggaatatacattaaggtgagttgcagatgaggtgtgagcatgtgaaagttctcttctgattgcctccatttttcttgaaataagaagtaaagccattaactgataccgataaggttactgagagtgagaagggaggagaactttatactatccccacatagatattttttcattccaatcttatagattgaaagggaaattcattttatgattatcatttggtaacccattctaatacctttcacagccctcatgtgcttcataaaacccttaacaataattgaaaacctacataaactgaaagcaattattaactaacatttgttgaatatttatgtgccacacgtactga

SEQ ID NO: 56314 - DNA, 611 bp, Homo sapiens
agacaggcttcccttggattgatgccatcatgacccaactgaggcaggagggctggatccaccacctggcccggcatgccgtggcctgcttcctgacccgcggggacctctgggtcagctgggagagcggggtccgggtatttgatgagctgctcctggatgcagatttcagcgtgaacgcaggcagctggatgtggctgtcctgcagtgctttcttccagcagttcttccactgctactgccctgtgggctttggccgtcgcacggaccccagtggggactacatcaggcgatacctgcccaaattgaaagcgttcccctctcgatacatctatgagccctggaatgccccagagtcaattcagaaggcagccaagtgcatcattggtgtggactacccacggcccatcgtcaaccatgccgagaccagccggcttaacattgaacgaatgaagcagatttaccagcagctttcgcgctaccggggacttttgtctaatggcatctgtcccttcctgtgtggaagacctcagtcaccctgtggcagagcccagctcgagccaggctggcagcatgagcagtgcaggcccaagaccactacccagtggcct

SEQ ID NO: 56315 - DNA, 1526 bp, Homo sapiens
  misc_feature (1)...(1526): n = a,t,c or g
tagtcagaatccactactctaccactaatgtctcttccatccggctctgcagcacctgagcaaaagacctctgcagctgagtccaaagagcattcccatgtgaaccgagcaaccaagtatcatcggagtggctgagcctgggatttccaacttgggagactacacagtggactctataatgattagtggcagcatccaatgtctcttccaagtctaaaatttgtgagtttcaaagttgactctccccaaacctggcctttgctgcctcagattctgtcactctagcaaggcagagagagcaaaaggggcaagacaaacctcatcaacagcacagaaatcccagaatcacacactctctgggtccagccaagccaagtggtttttttttttggtgtttggtggtttttttaaatcaccctccattactcaacattctcggttcccagatgaattttaaactgggagttgcaccaactgtgagacagcctcaaccccaatgttaaatactaccngnnnnnnnnnnnnnnnnnnnnnnnnnnnnnnngggctgaaaacagttctctctggaaaacgatccaccaacctttttatgggaagaaggtcttctctaacactttaacttaagggaagaagtgatggagaggaagaaggaaagtacactggccaatactctgaaactgactgacttgggtatctgtggtccaaagaggatcccgaaagacagtgactctgtctcaatgattattcccatcccgaattaaaagtcataatgacagcatttacattcacacagggtctctttccaagaagtttgtgagtcacctacatgtcttcaattctcaaggcaacagtgggggcaacaaggaggttgacagccaggtcctgtgagagctgtttgtcaaagcccactctcagtgagtcagtccctggaagttgggttcagtgcacggaggcagggccactgactggcttagcaacgtgtccatcatgctgattttagcatcttgcttctcaatgtcctcatacggagtccaggacaagtcatgctgtagtttgtaggcaccaaggaagtcatgtggacaacttgtcccccattcctttggagaaatgatggaaaaatactgctgaccactctcccgtttatagagatagtaaatgttgccaggttttttcactatattacaagctacatggtgcaggttggcatctctgtgagcatcttccagtaccttcctggcttgttcttgcaaatgttggatttggctcagctatgactgtcagcttgttggtggcatttgctcggatgaattcatcagccttctgcacctgctctgcgagcgccacgaggtctaaggggtccccggcccggtgggtgtggtaggggctcaccagggccaggccgccgggggtcggggtgagctccaccagggctcctccctggcctgcagctggcggcgctccttgcctttcaaggaccccctcggtccgccccggcgcggcgggcgtcctccatgacagcgccttat

SEQ ID NO: 56316 - DNA, 321 bp, Homo sapiens; identical to SEQ ID NO: 42593

SEQ ID NO: 56317 - DNA, 368 bp, Homo sapiens
agctgatacagtactcagtgatgatgatattggtgacagctgtcatgaaggctttcttctcaagtaagaatttttcttttcataaaagctggatgaagcagataccatcttatgctcacctatgacaagatttggaagaaagaaaataacagactgtctacttagattgttctagggacaacattacgtatttgaactgttgcttaaatttgtgttatttttcactcattatatttctatatatatttggtgttattccatttgctatttaaagaaaccgagtttccatcccagacaagaaatcatggccccttgcttgattctggtttcttggtttacttctcattaaaagctaacagaatcctttc

SEQ ID NO: 56318 - DNA, 335 bp, Homo sapiens
tatacctgcacctaaattacattttgggaaattttagctaatcttttcaaattaaaggcacccaacattaatgacagatcttctctaatatgaaaagcatcaaaacattccctttcaagcactttgaatggatgaaaattgccatataattttcccacctacctaaccattccatgtaagttaactgagcagtctaacaatgttgtacagaaggttgacagactatgtgcaccaagaatatttaagttgtgcaggttagcaagaactagccatttcaaatatactcaaatgttttgtaaataaaaattttgactcctaaaaaaaaaaaaaaaaaa

SEQ ID NO: 56319 - DNA, 351 bp, Homo sapiens
gggagaccgaggtgggcagatcatctgacatcgggagttggagaccagcctgaccaacatagagaaagcctgtctctaccaaaaataaaattagccaggcatggtggcacaggcctgtaatcccagctactcaggaggctgaggcaggagaatcgtttgaacccaggaggtagaggttgcggtgagccaagatcgtgccattgtatgccagcctgggcaacaagagcgaaacttcgtctcaataataataataatattgttgtttttaaaaagtagaattttaaaaaatatataaaacgttattatttatgacagtcaacatcctgtacaatagatcactaaagctttttc

SEQ ID NO: 56320 - DNA, 291 bp, Homo sapiens
ctgcgcgggccggacctgctcttctcgggaacttgcgcgggaggaggcccggagctgcgccgctttaccctctgctccccggtgcctaaaacgcacacgcatcaaagtcacaggacgagttagaggagaaaggcagagggagatttgaaacacagaggaggtgatgagaagacacagcagaagatatctgaagactggaaagaatgctgcaaccaacaggagaaggaaaagacagaaatgtgttttccatttggagcatccagagggagcacaaccatatcaacaccttga

SEQ ID NO: 56321 - DNA, 363 bp, Homo sapiens
ctttggcctaaactcctatataccggtgtctcctatttcttttctccgaggttcctgtttcgagtgtctgtagtcctcttgttcctccaagttcatgttttacttttcccacttacagcgtcctgtttccatttgaagtgggcaaagtgagagcttcccactgtgatcctggtgccattttcctggttctggatcaagtgggaccagactacttactaggttttcttttcactaaaatgcgtgagaaactagctcaaaaacattgagataagcaaagttatcctcctaggtggtgcttttgaggatgtgatggtgttgactacatcagctcttactgtaaagttgagcaacaggatcgatatt

SEQ ID NO: 56322 - DNA, 765 bp, Homo sapiens
tttttttgaggcatacacatctctttatttacaaaatgcggtgaagagaaaatatctagatatttgggtgtaattattccaaacatagaaaacacacaatagaatcaagtgaagggaaagctactgtaacagcttagatactttttaaggagaactgatagtaaatctgggaatgggaaaaaaacacagagctagaatttgtttagcactccgtgcaaaaggcaaaagctgataaaactggagtggacggaggctccgaatgtggccctccgctgctctctctcctgcagtctcatccccggccttagccctgacctctcctccgaagcccctggtgaaggccgcgatggcaaccacctgcaggacggcctccaggccgtgaagggccaggagcgtggcgctgagggcccagtccgcccacaacactagggcctgccaaagcaggaagtgggcagagaggagggcggtgccagccgtgagggccaggctggcggccagcggcctctcagcctctgtcaggttgccccctggtgcccaggtataaccgaactgcttctagaatccccatcagaaacagcagagcaagatcgaggaccaggtagcggtgaggatagctgaacacctgacttttatacgtgatcatcaggagcgtggcgaggaaatacagggcgtagtacgttccgctgagataaaacagcatttgaaggggaactgaagcacttggaggatcctctccctcccgggggccgccatcttacccgcccg

SEQ ID NO: 56323 - DNA, 382 bp, Homo sapiens
gttctcagattattcgaggtcctcagtatatagaacctttggacttgtccacctcagtgctaaacattttatcttttattgggtgcttatttcaatgccttatctgaaatttatctgaaattgtctcctagaatctatatggttccaagaaaaaaagtaaccttatttataagatttctcttttctccctaaaagccatagtagaagaataaaaatgtttgtttgaagtgtccttccatagggtatttttccttatcgttatctactggttttattacctttagcactctgggtgtccagccaactcatcttaagttcaaggaatcagtattttgcaggttcttcatttttggtctgatggcttttttaaaaagataatccc

SEQ ID NO: 56324 - DNA, 495 bp, Homo sapiens
  misc_feature (1)...(495): n = a,t,c or g
atacgactcctatagggaatttggccctcgaggccaagaattcggcacgaggacaaggtagggttggggtgggtgatgtttttagatcggtggctggtgtaagaacctgaataaagaatattctagtctaaatgagcttgggataaggctagtatgtctgaagggagcacagctggtggtcaagggcggtggttgttagaaacatattgggaaattccggcaagaaccagattggggtaaggtcttaacggtgcaaggagaggagtttgaatttatttatttatttattttttgagatggagtttcactcttgtagcccaggctggagtgcaatggcgcgatctcggctcacagcaatctccgcccctcgggtcaagccattctcctgcctcagcctcactacttangagccgacgcaggagaatncttgacctggnaagccanattgcccctgncttcagtcttgcgacanagganctctntttcaaaaaaaaa

SEQ ID NO: 56325 - DNA, 381 bp, Homo sapiens
attttaaaatttcacttacagggctgcctcccacccccgtcatatttactggccagtaatgtttctttttctgtgagttgcagttagtcttttctttaaatgttagcaaagtagtacatgcatatagtttagagtcaaaaaaatcctataaagtttacaaaaagggagcccttatctcccttcagtagagacgcaaccttccttttttatttcctgaatattttcaatatgcagttggttgagtccatggatgcaaaacccattgatacggagggaaaactatatataaaacaatagcaatctgaacatcaaatgactaaaggataacattatagctgcctgaagctgcagtgttggcaggggcaatcataagactagctg

SEQ ID NO: 56326 - DNA, 1847 bp, Homo sapiens
atcttttttttttttttttttgagaaccagaatgcttatattttattagtatccaagactggggagagggatggggtgggagagatcaagaattggggagcagatgggaggcgctacctcactcaggagacacgagttcttatccaagttcaaggtgaaagaagtgagggcaggaagagaaatctccctgctagcaacagcgactcagggagaaactctgggcccatagctagctggaggcagggtgacattgctcccaccaatgggccatcttcttagctacacctttgtagctgtggtgccaggcagaagaaccacctggaaactgagctaaggcaggttccttcttccaacagaagacacagctgggcagggactgtgcagactcaacagggccaggccagctagtggccagtcagtgttcatgtctctcaccagtgcctggagggtccccagccaaggaaagaactggtcagttcctgccagcagcttgagctggaatgccctgggagggtcagtagagggtggtcacttgaggagcttcacagagaggcggatgtcaacatcgcagaggaagatgtccatgaggtcatggcctgcctcctgtgctatctgggagatcacggtggcccttcggaccaatcaggagtttcacataagattctttgggcaccagaagcttctgttggataaccagctccccacctggtccttcctcccacactgctgtcttctgctgtacattgtaaggcacctccctggggcaggtgttctaggagcttcctctcggataatgttggcacagatctcttctggtgtctggctagtgaggactgcactgtggtactcccagggccctggctgggcctgtgtcagaaggtattgctttagtgttttcacgtcctcctggcttagggctgacaacatgaagatctccttgaagtggggccagcccaatcctctgaggatttcccacagattgtgtgtttgggtccttaactgctgggctggggcaatgggtgccagggtgtgagtggaaggcctgcctcatcttgagctttttgccattgaccacaccttcagtgagggctgccgtgagctccaggagaactgacttctgcttcaaacaatctaccttgttcatgaccaggacactagggatctgggagtacttggtcaagcacctgagcaactgggggctgagctggttccgtgtccacttgtctgagacatccacaagaaccacaacaagatcagcagattccatgctcttccatggatcttccaacaaagagagctccaggtgatgcctcttctgtttaccaggactgataatgccaggtgtgtcaagtagaatcacctgggtctccttctctgtgatgacccccagagcttggcagcgagtagtatgcaccttcctggaaacagggaacacctttcggcccaataagctggttggagagtgttgacttccctgcattcggggctcccaggaggaccactcgtaggacccgggaattctcaggcatatcagggtgatggaccaagaggacatcctgctcatctctgttcatggacaccgcggggacgcaaggagtcaccgaactgtcggggctgagagaatccgaggaagtggtccaggcagagccctggccattactgcgagaagccgaggccaagcggggaccagagaaagcggaccccgcgacgcaggacacgcacctccgttggaagcctaagagtgaggaaaaagggatcacccgctccctcgcgacatgagggcccacctgccagactcttaacaccgattgaacaagcctagccccgcgccagctgggggcagccat

SEQ ID NO: 56327 - DNA, 383 bp, Homo sapiens; identical to SEQ ID NO: 43945

SEQ ID NO: 56328 - DNA, 382 bp, Homo sapiens
gagcaattgaatggatattgagccattgactgagatgcggaaggatggaaaagaagtaggatttttggggagaagaggatcaggaattctgtcttatatagactccatttggaagatgtctattagacatatccaagtggagatagatgtcagtagatagttatatgtaagggtgtggttgtcagaggatagttggggctagagttataaatttaggaattagcagcatatatattgggtattgaaagtcttcaaacttaatgaaatcatcttaggaggaaatgaacagaatgaggaaaacagagcagaaaacaggcactaagtactttagcatttcaacatatagaggattgagaaacagagacttaaaaaacaaaggtcc

SEQ ID NO: 56329 - DNA, 335 bp, Homo sapiens
ggtgggtggatcacgaagtcaggagttcaagaccagcctgaccaagatggtgaaaccccatctctactaaaaatacaaaaattagccggttgtggtggcgggcttctgtaatcccagctactcgagaggctggggcagataattgcttgaacccaggaggcggaggttacagtgagccgagatcacgccactgcactccagcctgggcgacagagcaagactctgtctcacaaaaaaagaaaatctgatattattaaactgaggaatgactagttgaattaacaggtttgtccaaacagttcctgtaaatattgagttctatccaatgcatagaa

SEQ ID NO: 56330 - DNA, 374 bp, Homo sapiens
atgccctacctcaacaagtacatcctggacaaggtggggcccagcttgtagggagcatctgtaacctctccccacttttccagcctggccagcagcctaataccttgccactccaactcttcgcccctgccataaactcctacttctgcctgctctgtccgtgactgctgtcccatcacgtccctcacatcccagccacctgcccccttcctgtccccctcaattcaccttcaatgtccctcatctctaatgaggtgggccccaccctacccataaccttccaccgaatccctgcccggccctcctccagcttccagggttctccacccttcccagactgtccccctgaactcccccttcaactcttcaatctg

SEQ ID NO: 56331 - DNA, 385 bp, Homo sapiens
gaaaaacctgcatatgcatttaaagtgtgcacatctaccctaagtaagtctttggatctttacagttttaactctgggccatgtacagtgtatttcagcccactacacacggcagacctgcgagacgtcctgacagcccccacaaaactatggactgagcttagtgcaaaagagaaagcccttcttacccttaaagttcactgcacgggccattgtgggattagtcaccccagatgataaaacataatactggttttcctaagtaggggtgattcagctttctcttagattggaatatgaacttaatgtatataatacatacagtcacttcctgaacttgtagttttttgcatgttttatttaatattctaaccaggtttaagtt

SEQ ID NO: 56332 - DNA, 369 bp, Homo sapiens
  misc_feature (1)...(369): n = a,t,c or g
ggacacacccttgttcattctccttgagaagcagctattatcaacagagcattgacagaacctgtgtttggggaaaggactgatggctttgagtctaggttggaaagcacacaggaaccactgtggactcctcttgcaggctctgcgaagcagtggtcttctcttgtcttccctgtggccaatgtccctggagaggagctggaagctttttggaccctgagataaaggctttcctggaggagaacactgaagtcaccagcagtggtagcctcacccctgaaatccagttgcggcttttgacccccagatgcaaattctggtgggagagagctgacctgtggccctacagngatccttactgggcaatct

SEQ ID NO: 56333 - DNA, 836 bp, Homo sapiens
tttttttttgaaacttcagtatgaaatacaaataaaaacaaagtgtagcagcgatggcctcagacagtagatggcagggacaaactaaggctggctctgggccaaagacacgagcctcctggggagcctgtggggccccctccctcctgtgaggctctcgtctggggtgtctgcatttctgatttacatttcatacttgtttggtgccctgtgaaattggcctttcttctttctgcttccagctggtcctgtgtggaggtgaaggacaagggctgcagtgagccaaaagtgaggtgcacagaggtcttgttttcctgaggctgatagagggttccctctagacccggctccaaataagcagggctcacaagccaaaatccagattctcacgggttagggtctggattcctggggaaaccagcccacaaactgctcctgtgaggctgtggggccagcccatttctccatgcaaacaggtgagactccagccccaccagggccttgggaacccgtctcgtctcagagcccaatctcagggagccagaagcccccaggggcttttcctccctctgggaggcaggacaaagaactaggggcacctagaggacgctcccaccccaccaggtgtggtgcaggaagcaacagaggcctggaaaagcattcactgcgtgagaaacggcgcccagggcactcgcagcctcgctcacggcctgcttcttcaggtgctctggcgaggccagggccacatcctgctcccgctccctcctgtgacgtctgagctccctgaaaatggttttctttggtttcctccccgttccctggcctggggtcacagc

SEQ ID NO: 56334 - DNA, 499 bp, Homo sapiens
ctggcaggaactcttgggatttttgagattccccttggaacacagctggggaggcggcggacctagtgaagtcacagagagagagacaccagtagagtgggctggggccacgggacatttatttgtagccatcaagtgcctgcccacctgggggagggttgagactggcctgcaggtggccaacagatggggcagtggaagatactggctaccagccctctgcccatggccctttcctagttgggctgggggctgtcctgggtgggagtgtgcaggggctggaggagagaccctcctggccccagcaacccatccccctcagctcctcaccagggctcagcaccaagcttgggggtgggggctgctgctgcaggactgcagggagagactgggagaggctgaggcgtggctggttgggatttggcacagcagcctggactgggctgggcaaggaggccctgggggaggtcaccggacactcagggagactgaaccatgc

SEQ ID NO: 56335 - DNA, 406 bp, Homo sapiens
agagaaatttcttacaatgatttttagaatgggaaaatgaatgagtttaacttcagtttatccatctttaaaatgaagattattattttttacccacttcacagaggacttatttagaacaaattataagtaatagatggtgaaagtaattcaaagaataaaaatgtcccatacaaatgaatgtagtcttcttaggttatgtctattgtttataaatagtggaattatttatattaaacattgaaatttgtagtgcacaatctaaatccaaacggttttgcataaattttttatggcataaagaggggttgttttaaagtgtggttaattatatcattctgaaatattttgtatcctcatacaagacatattgtgttgatgaaattatagttgttttataacctta

SEQ ID NO: 56336 - DNA, 1097 bp, Homo sapiens
agtaatgatgtagttgtttattttgaatataatcatgaagtggggaaaaattttaatacaagagtagaaagaggattccagagaaaaacattccagtgtatcatggttctttgtgagtgagtagagaggggtagtgaggatgctgtccacaatgtattcatctagttaatgaattgtatggcccacaagctcaaacgagagatacattacagatggttgtattataaacctaatcttaagaaaccttaccaagcaaatgcttaaagactgatttttttgtgatctgataaaaagcctgcaaatcgtgaatcacttttaaactgtacagaatggactacacaccagtatggtaaagttcttgtaaaacaccaaacacaatggctcatagatatatacctctctcactcttaaatggcatttcctaattatagaaaatgtttacaacaaaagaacaagagggatcaaactaacaatcaataaggagaactgatgtgaagtcccatacactgttactccatttttcagcaactctttataactccttcattgacttgactcctttacaacatacagctgaattgtagaactagttcttcaagtgtggttcctatagtagaacagcagcatcactggggaacttaataaaatgcatcttcttatatcccataacaaacttattgaataaacagggtggagcctagcgatgttttaacaagcccttaaggtaactgatgcatgctcaactcagagagccactggagcagagctggctttcattcagcccctgcatcatttttaccagtctcttctattaaaaaaaaaggtctggagcagtaagctctgacagtgttttttcttccaataaaactcttaatactatagttgcataaaactacctaatgcgcccagagtagcaggttctgctaggatttttctcccagtaaaaaagcactcaacactgtagttgcattaaaactacttgatgtccttggtgtattgataacctgttttgctttgccaaagcaatttcagatgccctactggaaaatttatccagagtaggtttgatgtaataccagcaacatttttaatttttt

SEQ ID NO: 56337 - DNA, 361 bp, Homo sapiens
ggatgaatattggagacagggtttagtagtttgttgatgatacaatcatctgcatgtaaatccaagaaaatcccctgaggaaccctgaggaccagccgaggagttcagtccgtgccacatccagtgggtttctctactccacaataacccatcggagcatgagccacaaccctccacctccatatgaaagaatcacaaaagctggaagagaagtgtgtaaggaccgcctgaggaagatgctaaaagagggtgagttggcagacatgccacatcgtgggtgaaggatgtcagctgccccacaaagtaaactgtacattcattgcaatcctagttaaattctgatgagattaaatgacacagg

SEQ ID NO: 56338 - DNA, 635 bp, Homo sapiens
  misc_feature (1)...(635): n = a,t,c or g
cgaaataaaatatttatttcagataaagttaatatttccataattaaggtaaagcaaacatatatgcttgagtccattatttaaggactataaaatgacttccatgaatattagagttcctgaatgtcatttgagtatctgcctacatgcttgttggaagcttctgtagccttttctttgtaggaattccagtttttctgaattcttccctttccttcaggtattccattttgcattcttcataaaaggctggatcattatagtaagcagttagacattctttcaatgcagaattttctttccggcattttactaccataagaactccagagttcttgcaacatttggtaaaatcttgaacttgttcagaacacctctctttggccttttctctcattattttagggatcaaaacatctttttcgacatgtctgagatgctggtctgcggggtcgagcgccatctcggcgggccgagaagaacgtagccgcttggcggctccggggcacgcaggaaggggagtggaggggaggggcttgggctcggacgcacgtgcgacccccgggagcttcccgcaacagaaagnacgggccctttgcaaagcaccgccaggacccgttccctcttccttccca

SEQ ID NO: 56339 - DNA, 416 bp, Homo sapiens
ggggcccaacccggctgggtgggtgggaagtgtggctggtaacctggcagccgcggagagagagaagattataaatggcagagccatttaactgtggttagctgttggattctgatactttcttaaaaatacgttcttgcaccaacatcttcattgggaacagttcagaaaaagcaaagaggagagccaacattcacatttaccatggctataccaataacagtgcttgactgtgacctcttgctatatggccgtggtcaccggacattggaccgttttaagctggatgatgtgactgatgaataccttgatgtccatgtatgggtttccaaccgagttcatttattacttggtggagctcttgggggcgaatctttctaggcctactcagcgatccagggctattacccagagac

SEQ ID NO: 56340 - DNA, 372 bp, Homo sapiens
tctcgaggatccgaattcgcggccgcgtcgacgtcacaatatttgtcacttcctcaattactcttatagagaaaatcattataatagaatctaagattggtttttttgtgttatctttcagaatgaccccacctggactcctgcctcaagacttaacatcctgtggccctatgcagaggcagactcatcacaccaggactgtttttcacactccaatcatttttttttccctgaccaatcaacattccccattccctagtcccccacccatcaaactatccttgaaaaccctaaactccaagcctttggggaaatacatcaatctgaataataactctgctcatgcatggcatggccagcctcctgtcaatt

SEQ ID NO: 56341 - DNA, 1351 bp, Homo sapiens
atttggttaaattgacaagtacccatcttgtttcccaaaaatgaactccttggagggacaaggtttatttaacaggttaaaaattaaattatacactcaaatttacttgtttggataatcacctacagcaaaatcacatttctgtaaaaatcaccttaaataaaggtctccaccacatggcccattttttccaaacgacagcaaagaatttggtaaaacgaaaggctgcacatccctttggagtttgggctgacagcatttcacagaaaatggttggaaaatggttgaagcaagctcctaaatggcccttcttgaggctctgggagaggcactgtgccggcacctggccactttcctcattacacacttgggaccaatccactcagatggtgggcctcgcttccactcagcatggctgtgcttggacttggaggaatggggcagatgctccaggaggtcctctgtaaccagtcccctacagggttacgtttctctgttctcagggacagagaaatgtatatagtagaagtcgtatctttgatgcctactttttacattgaagaaagtggcagagagctcaaccgcacttccagcccggttgtggcctgcgcatgagcagaggccaggatttctcctctccaggatcccactgccagagaccaactgggatccaagcagttaaacagcttaatcctaggactgtatgaaataaaggcttatggacccggattttacatttcattattcacgtaattaagcaaattatatgtttcaattaagaatcatatttctgcagaacctaaattataacagaaatagatctttaaaaaattgcaaaactgcttttacaaagcagacatttattaacaacatttttttgtagaatttctaaggaaacaaattcaagacaaaaatccctccagtaggtaacaaaatgatctattgtttcaattccttctgatcaagtgactttattccataaaacagtacatcagctgggcaggttcggtctcctctggatgtatgacagtcattatttatttgttctgtaaacataactaggatacagtgacactgtcataactaaatttgaagtaaattagtactgtgaccctccaagggcaggtgtgaagcatgttatcagcgcctgaaacaccttgtagtggtttcactaacataagttaaaacataagcacttaggaagaaagtcttccctcattaatttctggcatagtgcagctacatgttcatcctggaacttaaagtaccttcctcttagaaaatcaaagtgttttcacagcaagtttaataaattaaaaatgtagagaaaaaaggaactagtgaacaaaag

SEQ ID NO: 56342 - DNA, 525 bp, Homo sapiens
cggacgcgtgggtgagagtgtcattgttagaaagaaaatcttgaatttttcaaaagtaaactatttgtaaatgtcacaacttgaattgtgggatgtcttgcttgtagacatccaaggcctctgttggatggcattcacgctggagtcttagcgctgagttggaataaataaaacatcctggtgggatgtatgaatgtgatgaggcttctcttagaaaccgcagcaccagagctagttgcgtgccctgctccaaaaccatggagaacagcctgccatggctttttctgcagaggatgttgaattttaatgattttaaataaactcctcataaccatcttcctcattttagttcagtccagcaggcacagactcctctcaatgcaagaaggataaacgcagccccgcagtgtcctcagtgggcctctgtgggaaattctgcactcaggagaatccccagaagagagctcttagggcctcctgagaaattaactccttgaccgcttacaagtgactctcaggtttcca

SEQ ID NO: 56343 - DNA, 431 bp, Homo sapiens
ctcagaccccagcccaggacctgcggagggccgcagcgaggagaggccaacaggcctttccctagagttgaacctgggccgggtgttgcatctggaagaacccccgatttcctggggacccagcagggcaggcggcctggctccgcgctcaggtccggacgcttgtttatgagaagaatttcctctttcttaaaagggcaacgatgcgagtgggtccctcaaggagagaagagatgggaccggtctggtgcgacctgggcaagcgctgcagagggtacctgggcaagagggccgcccgcctcctctgggtttggcactggagaagatgggtccatgccagctgaaggaggagatggatgggggacgtttagcgaagaaaggcatctcccagatcctttagcctcctggaagtgcccccgttgtacccccta

SEQ ID NO: 56344 - DNA, 359 bp, Homo sapiens
tccagccactgagaatgacatctttcgtaatgatcaaatctaagtttggtctactgagacattttacttctctaagaacagaatacgttagatagcattaggtaatattgtgagtgacagagatacaagaaaggcagaataaatattgaacgtttatcttgaaggaatatgtttaaagaatattgatgataggaggtggcaaacattttctatttccctatggtgttaatatagcagacagtactaatgaataattactgatagtgataattatttattaatagcaatagtgttttatgtagtacctaggtactacgtccttacaaattttctcaactggcaggtactatcaactgatc

SEQ ID NO: 56345 - DNA, 487 bp, Homo sapiens
gtgatttaaaaagaaaaaaggaaaaaaatctttggctgaatatgttcattgcttgtatttttaaaacaacagaatttccagtatgaaacaggctgaaagagcaggaagaaatgttctttgtataataatgggaagtttggaatataaaagtttatatattatttatctattggagaactggtgtacaggaggaacattttcttactgtgttgctgttttccatcatgtgttatcctaagagttggggttttttaaaatctgtttcaccaggggaaaataaaagcatccctaatgttcttcctctagtcagtttgctttgctgaaagctccctggaaattagtacagttctacaggaagccagaagactgtactgtctgtccacaccatggtctcctcagtcccctccacgccagcccctcttccccacacctagtaggtgtgcttacaccttccctttgccagtcatcccgccatggatggggagcc

SEQ ID NO: 56346 - DNA, 392 bp, Homo sapiens; identical to SEQ ID NO: 37846

SEQ ID NO: 56347 - DNA, 466 bp, Homo sapiens
ggcggctgtcgcgacgggggttcagggaatatttactgggcctctccgctccctctgctcttggaggtgccatgaggtcagttagctacgtgcagcgcgtggcgctggagttcagcgggagcctcttcccgcacgcaatctgcctcggagacgttgataacgatacgttaaatgaactggtggtgggagacaccagcgggaaggtgtctgtgtataaaaatgatgacagtcggccatggctcacctgttcctgccagggaatgctgacttgcgttggggttggagacgtgtgtaataaaggaaagaacctgttggtggcagtgagtgctgaaggctggtttcatttgtttgacctgacacctgccaaggtgttggatgcttctgggcaccacgagacactaatcggagaggagcagcgtccagtcttcaagcagcacatcctgcaacaccaaggtcatgctgatca

SEQ ID NO: 56348 - DNA, 412 bp, Homo sapiens
gaaatagatttgttacctaccactagtgctttttcatgatatttcaattcctaagtttatttcttttctttatttcttaactggctgaatattattgtcacatagttttgttcaagaagggctcatgggtgctgtattcctggtttttcatgtctgagaaagttcattgcttttttatttaataccattcttgtatggccataatatcctgggtgcactttctttcccttagacattgtgaacactgtcttttggcatgaaatgttgctgtgggagaggctagggcaagcctgatttgaaccccttataatgatgtgcttttcctgactgtatgaatgttcaaagtgccattatttaactaacttgtatgtatctatcttgaactgtctgcattaaattttcctggaacatg

SEQ ID NO: 56349 - DNA, 443 bp, Homo sapiens
cgccaaggcctctggaaccctggcgggagccccagagcactttggagacacgatcttattcacaaccgatgatgacattctcgaggccatattctattctgatgagatgtttgacctggatgtggggagcctggacagcctgcaggatgaagaggcaatgaggaggcccagcacggccgacggcgagggggatgagcggcccttcacccaggctggcttgggggctgatgaacgggccttcagctgaatttcactgcctcctggggagacttgcactacctggggctcactggcctggaagtggtgggcaaggagggccaggcgctgcccatccacctgcaccagatctctgcttcccccagagacttaaatgagctccccgagtactctgacgactcccggaccctggacaagttaattgatgggaccaacatcaccatggg

SEQ ID NO: 56350 - DNA, 437 bp, Homo sapiens
ttggtgcactgcatacagttctagatgttatactgtgctttgctcactttgcctgcattcctgtggttctcatgctagactctagttcttaaatacaaggcagattgtcttttgttgtagctgccttttcctttgaaacagctttccataaagtgtcttaactgtgctagaaatcaccagtttctttgagacagtggagttactgagccctagtgcttagtgtggtggatccagagtgataaggtggatcatagtccctaagcaatctatttgaaagcagtagcatacctctctactcatgtactgaggcctaacagctattgaaattttgttctgtttattcatttattccattttttgagacagagtttcactctgttgcccaggctgggagtgcagtggtgtgtatctcacttagtctcacggcaacctcggcc

SEQ ID NO: 56351 - DNA, 387 bp, Homo sapiens
cacacacacacggtgggagttgtatgccatccttttgaagggtgggaggaccctggaccagaaagcaataatggcataagattctgtgataccaggcatttttggcaagggaagttgccaacaatttttctggctgggatggcatagcacattgtctaggggtggattttcattcataaggcagctgttccctgaatggcttccctgggttatgtagaaacagcctggggaggaggtgatacaacatacttaatggggcctctgggcagaaaacagactgaatcctcaacactgccccttttgagggtctgtgatcctggaacttctctgatggactgggatgcccttaactgaggtctgctgtctggaaaggacaccacaggccct

SEQ ID NO: 56352 - DNA, 212 bp, Homo sapiens
ctcatatattaaaattggtaagacaaaaatatgatttataatacatgtttgccattgtggtatatataagaaaatagtactcatactaaattcaatctacttatcaaaattcttaatataagaatgaaaatattcagatgttataaatagaaagacaggtattaaaaagtttcttttggacaacattctttgtcgacgcggccgcgaattcc

SEQ ID NO: 56353 - DNA, 674 bp, Homo sapiens
ctctgccccaagtattttcagccccagccggccacacagctcggatctcctcctgtggatccccccagctctgcgatgatggcagaagagcacacagatctcgaggcccagatcgtcaaggatatccactgcaaggagattgacctggtgaaccgagaccccaagaacattaatgaggacatagtcaagactggagaaaatggaaaaagagaataccccggagaatctgaagctctcaaacacttctgataacatcctgccggttactgatcatacctgttgatgaattccaaaagagcagttgctatctcaaaggcaagcaaggtcatggagggcaggaaaagcacaaccctgaatgcagaacgagcaccaccagggtcttgaaaccttacaaacaacttcataaatcctgcactgggcttccttcttgaccacacaggcttcctatcaaacatgaatgaagaggaggtggactgtattacaaaattaataatgtaagatggtggctgccaaagccattcataatcgtaattgcttttgcatgtgttttcttgaaagcaacttcatatttgtcagcaactaggaatgaaggcgcttcctttgatacttatatgtacaggcacaaaatagagttgaactttgctgcacacaataaatgtgttgtgaaaataaaa

SEQ ID NO: 56354 - DNA, 786 bp, Homo sapiens
gacttattgacagtgccaaagctcggtactggacacaacgagggacctgggtctacgataacgcgcttttgctcctcctgaagtgtctttggtccaacgttgttccagagtgtaccatggcttccagtaacactgtgttgatgcggttggtagcctccgcatattctattgctcaaaaggcaggaatgatagtcagacgtgttattgctgaaggagacctgggtattgtggagaagacctgtgcaacagacctgcagaccaaagctgaccgattggcacagatgagcatatgttcttcattggcccggaaattccccaaactcacaattataggggaagaggatctgccttctgaggaagtggatcaagagctgattgaagacagtcagtgggaagaaatactgaagcaaccatgcccatcgcagtacagtgctattaaagaagaagatctcgtggtctgggttgatcctctggatggaaccaaggaatataccgaaggtcttcttgacaatgtaacagttcttattggaattgcttatgaaggaaaagccatagcaggagttattaaccagccatattacaactatgaggcaggaccagatgctgtgttggggaggacaatctggggagttttaggtttaggcgcctttgggtttcagctgaaagaagtccctgctgggaaacacattatcacaactactcgatcccatagcaacaagttggttactgactgtgttgctgctatgaaccccgatgctgtgctgcgagtaggaggagcaggaaata

SEQ ID NO: 56355 - DNA, 430 bp, Homo sapiens
gtgacaatgatcgttactggtattaatacaggggcaacgaggagggtcattgctgcttgcatgtcacttactatgcatttggcttcacatccaggcagaatctgtcatttaaagggatcagaatttataagtgattattgaactgaagtatcagttaacttgcggaatcctgaacctttcatttaggattccattgtgtctgaaaaccggtaaaagtagccacctgtctttgacgtaccatcccaccctgtctttgagttctctccagggtctggggttccctgtcctgtttttacatagtgtacatctacaatgagtcattgaaatttcccatttggggttcctcagagtgtaagaaagcttaaagatacttaggaataattggagcatagaaatcctctggactctgccccagctgcccaaccagaaa

SEQ ID NO: 56356 - DNA, 364 bp, Homo sapiens; identical to SEQ ID NO: 43861

SEQ ID NO: 56357 - DNA, 754 bp, Homo sapiens
tctgagatttcagttcttaggttatggcttgtgactccagataaaagatggagaatacctcatgtactgtgacttgaaaatgaattcttaaaattcttaggctctctccatgtatctttcttaaggaaaagtttctgagtgtgatctctcttttgccatagtatcaagtggagggtagttccagaaaagttaaataggaaatcttttgtgacagcagactataatagaagtttgagtaatattttaataaatttatataattcaaatgataaaaatgtatcaatgttatccaatgatttttattaaaaaattaccttattattagaactgtgcctattacataaaaagtgctcatgtatttgaattttaaataatttatttaaatcaagaccaccataagtcattaataatttaataattgttttaaatcagtggttttcaaccctcacttcatattagaatcatctgaggacttttaatatggaatccacctcataacaattaagtctaaatttctggaagatggagccatgcttgtttttccaaaagctctttgagtgattctaatttgtagtcagagttgaagaccactgctctaaattagtgcaggaaaatgcttttatttctcccatgttaacttttaaaactagtaatgtacccagtttaagttttgatggtttaaattccacttaaaggaacatattcttctaattaactaggcatttatttacatggaaattttaagggtttaagt

SEQ ID NO: 56358 - DNA, 447 bp, Homo sapiens
gtgtccatctatgcatccccagacaaacggaatcaaacacattatgctttgcaggcatcactgaagctacttgatttttatgaaaagtactttgatatctactatccactctccaaactggatttaattgctattcctgactttgcacctggagccatggaaaattggggcctcattacatatagggagacgtcactgctttttgaccccaagacctcttctgcttccgataaactgtgggtcaccagagtcatagcccatgaactggcgcaccagtggtttggcaacctggtcacaatggaatggtggaatgatatttggcttaaggagggttttgcaaaatacatggaacttatcgctgttaatgctacatatccagagctgcaatttgatgactattttttgaatgtgtgttttgaagtaattacaaaaagattcattgaattt

SEQ ID NO: 56359 - DNA, 933 bp, Homo sapiens
gttggaagctcagctgatgcaggccggttggagtggacgtcattgccgggaacgagcgagtcgccgctgcagccctagtgactgcggcctgcatcccgattgtcttctcctccaaggtctacatgattacctgaagtttaataagtaagaccatgaattatggcatttcttaaatgaagcgttcaagaagtgagagaatgtcatagaaaataaatgatttttaagttatgtctattaatctgactgtagatatatatatttacctccttagtaatgcaagaagtgtttgtgggaagcagagaagcaagcaactgtatttcttgttctcacctaagcattactggaggataagccacatcagtctacaaagaggttttcatacaaacataataagatgtaaatggaccaaaagtgaagcacattcttgcagtaagcactgttactctccaagcaaccatggtttacatattgggattttgaaacttagcacttctgctcccaagggacttacaaaagtgaacatttgtatgtccccgtattaaaagtactttgaactctgtttcaaaggctgttttttggcaatcaaaatgaaaatgaatttcacggtttagctcaatttaagccaagttcccaaattttaagaaaagtatcggatagtggctggttaaaacagaaaaacatcaaacaagccatcaaatctctgaaaaaatatagtgacaaatcagcagaaaagagtccttttccagaagagaaaagtcacattatagacaaagaagaagatataggtaaacgcagtctttttcattacacaagttctataaccacaaaatttggagactccttctactttttatcaaatcatattaattcatatttcaaacgtaaggaaaaaatgtctcaacaaaagggaaatgaacatttccgggacaaatc

SEQ ID NO: 56360 - DNA, 167 bp, Homo sapiens
gaaatgcaattgattttttaaaatatattcatcatgtatactgagactttgataaattcatttattagtagctttttggatccttaggattttctagatacacaatcatgcttcttgggagtaattatagttgttctaatctttatgcttttagttctttttattgg

SEQ ID NO: 56361 - DNA, 433 bp, Homo sapiens
ctggaattcaagctgtgggtgagaagctctctagcagggactctgaccttatggaggatcgctgtttcccccatttttccttttcacccaaaaaaagtcctgcttctctcacccttcaaacagcctgtgagcctaaatttttgtggccatgggacagacaaggaccccgtcttcagctgaactaaggaaaagtcctgcgacatctttggtacgcactgtggaggctctacaaacagccatcaaactccaaccagtcacccaaccagagcctctgaggatggccccttctgcggggaacccttacatgggcctctgactgatgcttccccaaaacaagtgccccctgtcatcaggaagcagttaacactggtcttcattcttacgcttatccttattctaacagcagttatatgtacttctttagacgggggaa

SEQ ID NO: 56362 - DNA, 336 bp, Homo sapiens
gtccaaatagtgagaagctctcttctccttacctcccccaaccccataatgtgcctataaaacccttgcactcacccaccctatggtgaagataaaatatgaattttttgttacagaatccaaagaagtaccattcttgtattattagcttcaggatgatacacataaacatcaagaagctaagaactaggctaaggacacagatcggttgatacttagaggtgttttggataaagttttgggtttttttgtttgttttttgagacagagtctcgctctgtcaccaagactggagtgcagtggcaccatctcagctcactgcaagctctgcctccc

SEQ ID NO: 56363 - DNA, 325 bp, Homo sapiens; identical to SEQ ID NO: 41644

SEQ ID NO: 56364 - DNA, 254 bp, Homo sapiens
accttgcccagccttccagacgcattttctatacaactctgcacaggcaattttggcctcagagtcctccagcaggtggcagactccagcacaggaacaaaatctgtctaccccagaaatctcttccaagttgacacagccttcataagcaagagccataactgtgatgaatacctgttgtcattttaagcactgcaagttattccacatgaatactgaacttgtggtccaagcatacaggggaatgcatcccc

SEQ ID NO: 56365 - DNA, 407 bp, Homo sapiens
caccacatgattctgatgtactctaaatactgagaaaatctgttctagacaaatacccaagcaacaactccgcaggcagttacccagtacggctggctacaactgctccatccgtgcctctttttaaagttcaaactcacaggtgactctaaggttatctacttttactcataagtaaaagccctagactggtgctaatgtcaaaccactggcctccactcaggcctccatcttctcatgccctcttaccagtatttaacttctgaggaagacaagtgatgctaaaacctgaaattccaatgaagccatatgaacagctgacagttgcacttctaagacttcacttagcagcaaattatagctcatgtgcattattttccagataacttagcttatgagtagcttat

SEQ ID NO: 56366 - DNA, 617 bp, Homo sapiens
tttttttttgatgacaaagattctttattatataagagatcctattatctgatcatattacctaataaattatatatgaatgttcaataataaaaataatgttcaccaatatgtcacatgcatggttagtgttttattctttgaagactgcttctaaaacatcgcactaagtaaagctgaaaggataaagtttaaaatagtttttaaaggataagttataacatatgtaatgactgtccactctacaaaatcttgatcttagagcttatgatacacccagttggcagtagcacccaggttttccaaatagccagtcatcacttttctcttgtctgcatagacttcttctcattagctgccttctgcttttcttgcatgatctcagagtccctctgctttctctgagaggcagtcaagctatcctctttcctctttcccttgctaatttcctgggttttcttcatgtttttctggcgggcaagttctcgttgatttccacgggccatgccgaccaccaacggagcctggaagaagagcaactcggaaaagcaacggttctctggcactctgggataccgtcaccaccgctgaccgggaaggctgagccctcgtgggcc

SEQ ID NO: 56367 - DNA, 132 bp, Homo sapiens
ctaaagaagaagaccacccccattgttctgcatcctgttccctgttaaacttcttagcacttagcactgcctacctcatcatgtttgtttccttgtttatcttatctcccttctcccactagaatgaggact

SEQ ID NO: 56368 - DNA, 181 bp, Homo sapiens
gggtaaatctttgtgactttagattaggcagtggtttcttagatatgatacctaaagtgcaagcaataaaagaaaaaatagataaattgaatattagccaaattaaaaattttagtgcttcaaagggcagtgtcagaaaagtaaaaatgcacagaatgggtgaaaacatttgaaaattaaa

SEQ ID NO: 56369 - DNA, 2046 bp, Homo sapiens
aacagagactgcggtggactgacgccgcaggggcgagctagccggctccgcgcctctccgcgggatccagacgcctcctggggctgctggcggagggtctgaggcggcgcggccatggctcacctccggggatttgccaaccagcactctcgagtggaccctgaggagctcttcaccaagctcgaccgcattggcaagggctcgtttggggaggtctacaagggcatcgataaccacacaaaggaggtggtggccatcaagatcatcgacctggaggaggccgaggatgagatcgaggacatccagcaggagatcactgtcctcagtcagtgcgacagcccctacatcacccgctactttggctcctacctaaagagcaccaagctatggatcatcatggagtacctgggcggcggctcagcactggacttgcttaaaccaggtcccctggaggagacatacattgccacgatcctgcgggagattctgaagggcctggattatctgcactccgaacgcaagatccaccgagacatcaaagcagctgccaacgtgctactctcggagcagggtgacgtgaagctggcggactttggggtagcagggcagctcacagacacgcagattaagaggaacacattcgtgggcacccccttctggatggcacctgaggtcatcaagcagtcggcctacgacttcaaggctgacatctggtccctgggggatcacagccatcgagctggccaagggggagcctccaaactctgacctccaccccatgcgcgtcctgttcctgattcccaagaacagcccacccacactggagggccagcacagcaagcccttcaaggagttcgtgggaggcctgcctcaacaaagacccccgattccggcccacggcaaagggagctcctgaagcacaagtttcattcacacgctacaccaagaagacctccttcctcacggagctcatcgaccgctataagcgctggaagtcagaggggcatggcgaggagtccagctctgaggactctgacattgatggcgaggcggaggacggggagcagggccccatctggacgttcccccctaccatccggccgagtccacacagcaagcttcacaaggggacggccctgcacagttcacagaagcctgcggagcccgtcaagaggcagccgaggtcccagtgcctgtccacgctggtccggcccgtcttcggagagctcaaagagaagcacaagcagagcggcgggagcgtgggtgcgctggaggagctggagaacgccttcagcctggccgaggagtcctgccccggcatctcagacaagctgatggtgcacctggtggagcgagtgcagaggttttcacacaacagaaaccacctgacatccacccgctgaagcgcactgctgttcagataggggacggaaggtcgtttgtttttgttctgagctccataagaactgtgctgacttggaaggtgccctgtgctatgtcgtgcctgcagggacacgtcggatcccgtgggcctcacatgccaggtcaccaggtcaccgtctccttccacccctgcagtgtgctgttgtgcacgtcagggacgctgttctctatgcccactgccctcctccctctcctggcccagcagtattgctcacgggggctccagcagccggcgtggccctcatgaggttacgcctgggtcttctgcagactcatgcagccctatggccgctcagaccaaggcgcagagcaactatcagggcagctctgcctcctcctcccatgaggtggggagaggcaacagggcagcccccagaggagtgtcctggccgctgtcctcccggggcccatgatggccatagatttgccttgtggtgttggatcaggtactgtgtctgctcataagtacttgtgtcatccagaatgttttgttttttaagaaaattgaattacttgtttcctgaaatattctgaggttaatatgttagttttcatagaacattgagaggcccctgccactttcaataaagacctgacttggag

SEQ ID NO: 56370 - DNA, 740 bp, Homo sapiens
  misc_feature (1)...(740): n = a,t,c or g
agcagacgtgagccacagcaccaggccaacaatatttcttaaagctcctggagtgattccaatatgcagccaaggttgaaaactaccctttaaaaggctcggcatccagtgtggaagaccagcactcacacatccggagaccttacccggagccaggatgcccctgatcatctctgataactttaaaaggaaggcctcagaagcagccccagaagcaaaagtttctctctgaccttctcctgccctcttgtttctggcttttcattctcccccaaggctacccataggaaactaggaatccctctttccccaagggcaggtcattcaggaaaccaggaaccggtttttaccccaaagccaggccataaaacctaaaaatagtcctctcactcccccattccccctttctgtgtaaaaactggttggaaagaaatgatctgacctaccgtgtttgactnnnnnnnnnnnnnnnnnnnnnnnnnnnnnnnnnnnnnnnnnnnnnnnnnnnnnnnnnnnnnnnnnnnnnnnnnnnnnnnnnnnnnnnnccttgcctgggtttcccctctcagtctattactattagatcatacccttcttgtccaatcatatttctacacagtccataatctgttgaacctaaacataaaaatggacaattcccctgtatcttggggtcttcattctgagggctcacatacaattatgatcaaataaatttgtttgctttttctcctgttaaa

SEQ ID NO: 56371 - DNA, 326 bp, Homo sapiens
gtgcacatttcacataaaagctcagaaatatagtagttttatcttatttttacagtaattatcaattattagaagaaaatatgggctgggcacagtgactcacacctggaatcccaacactttgggaggccagggcaggtggatcacctgaggtcaggagttcaagaccagcctggccaacctggtgaaaccccatctctactaaaaatacaaaaaaattggctgagtttggtggtgcacacctgtagtctcagctattcgggaggctgaggtgggagaattgcttgaactcgggaggctgaggtgggagaattgcttgaacccgg

SEQ ID NO: 56372 - DNA, 419 bp, Homo sapiens
gtgcgcacgccgcgggagcctctctgccctctcctcgcaccctgctcagggcatctgaagagcctggaaacgtgaacaggcttgaagtatggcatgttgcaaagatggtttctgccaagaaggtacccgcgatcgctctgtccgccggggtcagtttcaccctcctgcgcttcctgtgcctggcggtttgtttaaacgaatccccaggacagaaccaaaaggaggagaaattgtgcacagaaaatttcacccgcatcctggacagtttgctcgatggttatgacaacaggctgcgtcctggatttgggggtcctgttacagaagtgaaaactgacatatatgtcaccagctttggacctgtttctgatgttgaaatggaatacacaatggatgtgttcttcagcagacatggattgaca

SEQ ID NO: 56373 - DNA, 1805 bp, Homo sapiens
  misc_feature (1)...(1805): n = a,t,c or g
gccattgccatcccagtgacagtggcttttgtgatggatcgccgtgggcccggtccttatggagccagcctcttccagcacttcctggattcctaccaggtcatgttcttcacgctcttcgccctgttggctgggacagggntcatgatcatagcctaccacactgtctgcacgccccgggatcttgctgtgcctgcagccctcacgcctcgagccagccctggacacagcccccactatttcgctgcctcatcacccacatctcccaatgcattgcctcctgctcgcaaagccagccctccctcagggctgtgggagcccaggcctatgcctcccactaggccgcgtgaaggttcccggaggatgggtctcagccgagcctcgttgcaacccccaagatggaacatccctgctgcattcacactggaacaagcccctccagatgagtgccccggccccaggccagcttcactgccgtctcttcacacaaaactgtagtttcggctctgcccattagctcattttatgtaggagttttaaatgtgtgtttttttcctttcaagtcttacaaagctaagactttttggctcattcctttttgcatggttgtctagggtttctggacaatgtgctgttgcatttttattttcctagccttgctaaaatctttcccttctcaagactttgagcagttagaagtgctctttagaagttgtctgtgggtgatgttactgtagtggtctcagggaaaggattgtccagttactttagggggtttttggtggggtttttccccctgtgaaaacttactttgcccctagtctggctgctgctaggacttctgaggagcaatgggacatgagtgtccctgtatctgcgccactgccgcaagggaagcctcaggaaccagcacctggaggccaggatagccaagccctgggtgagcgagaggctggagaacacaggagctcacccagggctgctgcccaaccatgggccactgtgaacagacttcagtcctctgtttttgtttcataagccgttgagacatctgatggacttggcttaggccctgctgggacatcccacgtgtgatccctttcactccatcaggacaccaggactgtccttaggaaaatgtccttgagatggcagcaggagtcatattttctgtgtgtgtgtttcggaaagccgctgtgtcctgcctcagcacaaagacccagtgtcatttgctcctcctgttcctgtgccactccagaacctcagcagatctgagccaccgcctgccagtgtgagaggcggccactttcatggcagctcatcaggcgcagggccccagacagcttcccagccggccctagagcccggcctgggccaatgatggagggcggccaccagcccagggcctgcccatccagaagggactccccagggcctgggggaggagacccttggaaaagtcctctcttcccagctcctgattctggatctgagattctcagatcacaggcccctgtgctccaggccgaggctgggctaccctcagggagatccagagactcatgcccatggccatccatgcgtggacgctgtgtggagagtccaggatgacgggatcccgcacaagctcccttcagtccttcagggctgggccatgtggttgatttttctaaagctggagaaaggaagaattgtgccttgcatattacttgagcttaaactgacaacctggatgtaaataggagcctttctactggtttatttaataaagttctatgtgatttttaaaaaaaaaaaaaaaaaaa

SEQ ID NO: 56374 - DNA, 322 bp, Homo sapiens
ttgagctttggatatgttttatttaatgtggtggcaattcatccaaggggtgatgttctcccagcatttggacacacagggctccaaaagtgaaaggccaagagaggactacaaggactgcctgggctggatggggttggactcaggctcctgggagtgagatccaaggtcagccccggaatctgtagcctttcccgctgggctttcatggttgttatatgttagcacactctattgtaaccatgacacacactccctgccagcgtcccggtgatgacagagagccaaaccgaacctctctaaaggactggactaacactct

SEQ ID NO: 56375 - DNA, 68 bp, Homo sapiens
tctcgaggatccgaattcgcggccgcgtcgacaacatgggtttttctggtgtttcttttttttgcagg

SEQ ID NO: 56376 - DNA, 233 bp, Homo sapiens
aggcactgttccaagtgctttatatgggttgttgttttaaccctcccagctacccttaaaagtaggtgcaattattattttccttttataaatgggaaaactaaggctaagctatgcccaaagtcacacaaagtagagaaatcaggaaaagaaaagtatattgacttcagaatatgcccccttaacctctacttttcgtcaaaacatttcatgaaattcttttctaaatcccc

SEQ ID NO: 56377 - DNA, 421 bp, Homo sapiens
aaaattcacagaacagcctctgataaatcttttcacaagactatataatctcaataattattttcaataaattaattaatgaatcctaccatagtgcccaccatatggtaagtgctgaataaaagctgaatggcgtgtccactgaacacattgtaacatccaccatatgcttacagataaccttctagatctttcccaaaatagtagaggctctcttttgtgaagttgagtttggccttaatcacatgatgctggatttttcaactagatttttttgattttttcaactatattttttatgatttttcatcttgatttttcaactagagctttgctgtccccaaatgttcatcaacagatgagtagatttttaaaaatgcaatatacttgtgctagggaacagtattcagccctaaggaga

SEQ ID NO: 56378 - DNA, 82 bp, Homo sapiens
gagagagctttcaataccctgaaataaaaattacaaaagagatgccaagtgggaattagctttcctactacctcttcctcag

SEQ ID NO: 56379 - DNA, 99 bp, Homo sapiens
  misc_feature (1)...(99): n = a,t,c or g
tctcagctcacttcaacctgcacttcccaggctcaagcattccttccatcaccatgcctggctcgtttttttttngttnggngggtttttttttttttt

SEQ ID NO: 56380 - DNA, 659 bp, Homo sapiens
ttgaggctctgagacggtgtttattggctccttagaaatcagagtcagtaacaactgtacagaggcccccatcttccgtgcgcccacccttccccactcccgcccggtggccccggaaaaagcagcttcatgtgggcacagggagagactcctctgggattcacagtaaccagaaacaaaaacggaaataaattaagtgatgtggggtaggggagtaaaagggagtcatgttccccaaatcagtgcatgaagaggggtaccagggcctggagctgggctcccacggctcctcccatcagacggagtgctgggcctccggacatggagctgtgccacttgccacctacatctgagagcctgcctacatgctcctgcgcggctgccaagctccagcacctgcgcatgccacgagtcacgggaatgaggtggaggcagtcgccactcagagtccatgggcccgcggcccgactgtgcttgtagtagtggtgtctcacccctcattccacccgtaccagcagggcacagaggagtgtggcccccttctccttagtgacccactcaagttcggctggactgaagtgagggtcaggaggttctccaagggcagcggaagggggtcccggggtgtaggagccagggcgcacacacacctggaacgc

SEQ ID NO: 56381 - DNA, 400 bp, Homo sapiens
cggctgctcaagggtagctgggactgaagtccctatgacctttccactagacgctagcattctggaggacagttgggacttggtaaggttcttcctgcaatacagtggatacaatttgtcatggctactctgagtgttataggttcaagttcacttattgcctatgctgtattccataatatacagaaatctccagagataagaccacttttttatctgagcttctgtgacctgctcctgggactttgctggctcacggagacacttctctatggagcttcagtagcaaataaggacatcatctgctataacctacaagcagttggacagatattctacatttcctcatttctctacaccgtcaattacatctggtatttgtacacagagctgaggatga

SEQ ID NO: 56382 - DNA, 721 bp, Homo sapiens
  misc_feature (1)...(721): n = a,t,c or g
cccaagtgcgcatggggacgctatagcaattcgtttgctgtccttcctctccttcgaagatgacaaggcctaccatcgtttcttcctgcctttgggccgtcaggntttggttgggacccgctccaaccctcggtacagagcaggattcagtataggaggagcccagctgggataggggtggagccacctgttcactgcttcaggattcagaacctgactaggaaggatcggctgctcaagggtagctgggactgaagtccctatgacctttccactagacgctagcattctggaggacagttgggacttgttttctctcccagggtttcttttttctttaaactcctggccttcaagtgatcgtcttgcctcggcctcttcaaagtgttcggggattaacaggttcttcctgcaatacagtggatacaatttgtcatggctactctgagtgttataggttcaagttcacttattgcctatgctgtattccataatatacagaaatctccagagataagaccacttttttatctgagcttctgtgacctgctcctgggactttgctggctcacggagacacttctctatggagcttcagtagcaaataaggacatcatctgctataacctacaagcagttggacagatattctacatttcctcatttctctacaccgtcaattacatctggtatttgtacacagagctgaggatgaaacaca

SEQ ID NO: 56383 - DNA, 420 bp, Homo sapiens
ggctgagagaagagcttgcggggtttgcggttgatggccccgactgaagggctggaggcggtgtatgccgctgttcttgctgtcgctcccgacacctccgtccgcttctggtcatgagaggagacagaggcctgaagcaaagacatctgggtcagagaaaaagtatttaagggccatgcaagccaatcgtagccaactgcacagtcctccaggaactggaagcagtgaggatgcctcaacccctcagtgtgtccacacaagattgacaggagagggttcttgccctcattctggagatgttcatatccagataaactccatacctaaagaatgtgcagaaaatgcaagctccagaaatataaggtcaggtgtccatagctgtgcccatggatgtgtacacagtcgcttacggggtcactc

SEQ ID NO: 56384 - DNA, 732 bp, Homo sapiens
attttgtaccagtcacctaaatcacctccttgcaacccccaaatgactttggaataactgaattgcatgttaggagagaaaatgaaacatgatggttttgaatggctaaaggtttatagaatttcttacagttttctgctgataaattgtgtttagatagactgtcagtgccaaatattgaaggtgcagcttggcacacatcagaatagactcatacctgagaaaaagtatctgaacatgtgacttgtttcttttttagtaatttatggacattgagatgaacacaattgtgaacttttgtgaagattttatttttaaacgtttgaagtactagttttagttcttagcagagtagttttcaaatatgattcttatgataaatgtagacacaaactatttgagaaacatttagaactcttagcttatacattcaaaatgtaactattaaatgtgaagatttggggacaaaatgtgagtcagacactgaagagttttttgttttggttttaatatttttgatattctctttgcattgaaatggtataaatgaatccatttaaaaagtggttaaggatttgtttagctggtgtgataataatttttaaagttgcacattgcccaaggctttttttgtgtgtttttattgttgtttgtacatttgaaaaatattctttgaataaccttgcagtactatatttcaatttctttataaatttaagtgcattttaactc

SEQ ID NO: 56385 - DNA, 815 bp, Homo sapiens
cttggtggtagaaaaaaatatatacttagaaatccttaaattaaagccatgttttatatataagtcaggtaacattggtgtatagatgagaatgcaattaaacctgatgagaatctacttgagaatatagaaagtctttctctaaaggagatactgactccctggtttattgcattaaaatttatgtttgaggttacctcaacttgttttaaaagattttgttttgtgaatttgtactgtatatttgagtaactgtcaggcttttatttaaaattgtttaacatgtaccatgtacatgtcattactatatttcaatgcatcatgcttgtaacaggcatttcatttataataagaatgagttattcatttgtaagccgttcagtaatttatctactattcctaaattggcataatgttagataatctattttgaatcacctttaattacatgtcagaatgccttaactaccctaacttgacaaaacagaattctttggtagacgcggtgggggcggggtggggggtctggacggagtctctatttaaggagaaatcatcatgctatgcataaaacacagaagcatgagtggcaagtggcggggtatttattttgcacaaactatttgcagtctctgtgtatttaaaaagtaaagaaagttgcatccagaagggttttgttagaatgaatacatttatattaggactgacaacttcagctcttttgtttaggttttcaattatttttggtaagagtatgtagccttatgatctggatatattttgcattcattttccaacggctaccatttaattcc

SEQ ID NO: 56386 - DNA, 371 bp, Homo sapiens
gctgaccagagccatgtatgtattataatctatttttcttattcagcgtggtcaggaaatgggattctagttcattaaatatacttattaatatagggttatactgtatgggaatttttaaaggttagaatataatatgatgcatttaatacctaaacaactagaaaggtctttatcattcttgatgattttgaagacattgtaataatgtaccttgaattagtcattactgagggtattgtaggaatagagaaggaaagtaccagtaatagagctctttagttgatattgtgccagatagacatttttcaattctgtaattcaattcctaaagaaatgtgaatgtccaacagagtcgttataaaggaatt

SEQ ID NO: 56387 - DNA, 1716 bp, Homo sapiens
ttttttttttttttggtagcatccatatataacattttattaagaaaatgaacaaaatacattctttctccatatgtacattacatacaacataattctacaattgccatttttagcagatcactcatttatttattcacaaagtagaattaacacatttaccaaagctgggatctgaaaattatttgtactataagaaaaaaaaaatcctaaaaagtccatacagattggataaaagataagccagagatcatgaggggaatggggaagattgcagaacacgacagagcccaacaatgatttgaaacaattgatgtcagaagagatctgatacccataaagcacttctgtttaaaagctccaaccagctcatgccagctttccagagtcccatgatttccatttaagaccatgtggatactttaggatacggccctgaccccacattgccacagaagagggggtaagagtagaaccaaacaagttagcagttttctccacacattgagtctcatctgaaatactactgaggtgcaaaatgtgtgaatctcagctaatgtgcacagaaatacaattttttttgagagacatttgcttaaacgtggtaaagaactcttgttttatggactccttgcttcatgttcattttgtctgtttttcttttggcttttgacaatagctcatcctttttgagtgtgagtttaattatggccatattaaaaagtccatcataaacaaagactcctcctcatggtatgaatatgctccatatgcccataatggtgcataacggacttagaaattccaatgagtcttagggttgaaatttccaatgacctgagcaaggcagctccctatagcttctggataacattttacacccagagttccaggcttaaacagacctatcaacacaattattttcggattgtctgtctagaaaacggcaatgcctcaaaggaatataaataagggtggggggacatatgcttccagcctggtcctttctccatgtggtaaaaaacaatggaatggctgtgttaatttttttttttaatcttttctggcctttactatgtttggtaatggaaataagtcagggaaaacaaaatgaacaggtctcatcacttaattaatactggtttttcttctttatacttagtaatttcctagttttttaaatgataaacctattttgacaatcactaacatcaatacattttatcgtaagtcccatataagatatttaacattctccaactttcggctcagctggttacagcaccacatttccagtccaggagatgttttcacaaacagaaggagcgattcacagcattaataagcagacttggaaagacagattttattggctatggaggaagttgtatctttcttctcaatctaattttcagtccaattttggttttgagaatctatctctatcagaggggatcttaatttctgactactgagtacttccaatttataaaagagctgacttttaaaaaattctaacatctttcccaaactgtttagaaatatgccatatttgaaagacggaatactgtttgttcccaagaccaacacaagaaaaggaggtcctcatcttcactttcctgtactcttcctctgaggctaataactcaactgtacatagcttttggagtgggagcaagataagaatctctttaaaaagagcattttaaaaatgtc

SEQ ID NO: 56388 - DNA, 1175 bp, Homo sapiens
taccatgccaggcctccttgcagggttttctatgcccttgatatctgtctccctgtcaacctgggaccttgctgtaagtcttgataggacagggagaagagggaggccctaccgaggctcgaggcttcagtgaagggtgacagcagtgggagtgtggtacagcctctggaaggacacagtgttctccccgccccttgtctgggagccaggactgtaccctccgaagccagacatcactgccaacatatcccccttgctggtgccctggcatctcagcacatgacacacacccacacctgcaggctgtggttccggcttggcctgctccccgtccggctgctgccgctgcctctctccagacctcgcttaaggacagtcccaaactcagctgggggcagtgttggccctgaagtcctcccccagcctctgctggccagcttggtgctcacagctgctgggtaagctcttgcctaaggagctgtgggaagccaggctgatgccccagcaacctctcctcccactgtctttgaagaaagtagctttagaccggctaaaagctttaatccagagcctgccctactctgatagtaccagagtggagggcagaataccaaatgtccaggaaccaaaggcagggctgtggggacctgaagagcagcacagtggggcccgtgctgctgtgggggaaactgaggctgggagcctcagcagagaccggtgtcaagagtctctgggaactgcataggcctgaggaacatgcattttcaagttgtccattgatggtttcgtacctgaatttctcaccttgggggaggatcaaagggaataaagagaactcttggctgagtctttgtgcttctgttctgtcctgaaggacacgtgaggagccagaaacatctggcagcctctggtccttagttcagatacaacatccatgaagctgccaggtgtgaggagagttccagtgggcatcaccttcctgcacaaacctagtcctgatggctgcgaagagaagccgaggggacaaggaacagaagccaccaagggctgtggactgttgcttgtgggcacagggcaatgcggacagccactggctgtgggcctgtaggtctctgcacagttgctgaggctggtgctgactgcctgcagggtcctctcaaggcctttacatacgg

SEQ ID NO: 56389 - DNA, 431 bp, Homo sapiens
gatgaatgccgctgagagtattagcaaaaatacatgtgtcattgagtctgaggaagataactgagacatacaggtatttctcataatgcatgtgggcatccatagacatattcttaaatggcttaaggacttggaaactacctctaggaaacctgaaacttgaatgttggtccactagggagaagaaatgttccattagccttccaactaaagaaatacactatcaagaagaacattagctgtgtgtcctataggcttgggagaataacttacttttattttaatacctatgttacttttatggtcagtattttggtaaaatatatgctctattatggcagtaatttgtctgtcttattaaatgctatatctgcagtaccttctgtgcataacacagcaaaggagctcaataaatatcattttgttgctgg

SEQ ID NO: 56390 - DNA, 1047 bp, Homo sapiens
tttttttcagaaatcaaactttatttatatttcatttcataaacttgtaattctaacactattaataaatgctagggcaggtggtggcatggagagcctggagcacaacagctgtctttaaaagctttccttgctgtaccctttggagccacctcctggtcccctcaacccctgcccacctgttaagagcccgttcggggcagcacattaggggcaaacagcctggatgcccagttgcagacacacttccatgcctggaggagaagattgcgtctgagagcaggaggagctgctggaactcttcttcccagccttgttttaatgctcttgagcatcaccttcacagagatataccccaccaggatcaggagaataaacggacctgcagcagcaggactgtggttctagtgaatgagagaagcctctctgcagcgaggtacaggaggccaggccaaatgccctgctctccgcctccatgtttgccaccatgcccaggactaggggcagcatgggatctgctggctggggctgtgctggtcaccccctccctcccacttctctctccagccacgctttcagctccagggttagggctagtggctacagtacgtgccgtgatttcaggcagctcctcattggtctggtccttggctggagctccctccagctccagtgctctctctggaggggcctcttcccatgctggctctggctccgccgctggtgctggcagtgctcttacttctgcacatggaccaggagcacgtgtctgtgcctccatgggctcccgaatctcctcctggacaaggacaatgtgcagaggcagccccgatgggatctctggtgtggcctggccagctagggcctgccccgggctgtcctgtggtacctgggtgcgccttcttacaaagggccacaggcgtctggggtgagggatgagccttcttcggcattgtcggaaaaggctctcactccctccattcctgaagcagcaacctctcgaagtggggaagcaacaggagaacatcttgctctcttgagcgtctc

SEQ ID NO: 56391 - DNA, 530 bp, Homo sapiens
gcgggcggagcgactgtcctcccttctggtgtactgggtgggaggtggaactagtcggacaaagccctcgcgtcggacccttgccagaactcaattaatggatgcctcgaagttgacgtacatatatattcagaaatgttttgccacctgagacctatgaggaggttatgtctagagaagatatttccacactggtttcccttttcaagagctttatcgggagctgaagcagtcaatgccttgaggcctttctattttgcagtacatccagatttctttggacagcaccccgtagaaagggatgatacatggaagagttttcaatgccctagtgatttttccttatgatgcatgctgctggaccactcccctacaacatcagttaatgtgtgctccaggaatacaaactgatatgaaaaatgacttatggtagatgtagttaagacagtcaatatattttaacattagaaaatacagtcagtccttcatatcccatggggttttacatccatggattcaaccaacctcag

SEQ ID NO: 56392 - DNA, 1631 bp, Homo sapiens
aggtactgacttctgatgcataatcacttaagctatgtgagtttaaactggtatcttttcttagtgggtacccattcaatgtaaggctggtccatgggaatggacatgaagaggatttcacagtatgtagagcagaaggcacgtgaatgtgtttgctttggcttggagcttattaagttttgactacggttaaaataagtcaaatagtaagtggtaaaacacatttttgttagtattggaactttctggagaacataagggctatgagaatgcatatatatattttttaacatttcctatatatctaaggtaccaaagcactgagtctaatttacctattaagggagactctttaaaatcaactttataactaattcatactataagacagataatagctaaagttttggaataatttatattaaaagccgcaagtcttaaaaatccctggatatgacataaaaaggattttggcttcttttttgaagtatttaaaattaatcaccttagctctaccatatactagatctgtgaccgctacacaaattgtttaatccatccttgggtcccctattgccttctttataaaataagtgtaagttgttcagcctgcctcacagggctgttgtgaggaaataaaatgaaatggagtatgtgaaattgcttcagcaacagcaaagtgctacgtaaatgtaaagtgttgtttttagctaataatggatttaagtgtttggataattgtagatgcatttactttgataaagcgtgtgcttaaagtggtatcaccagtgatttctaacatgattttaaaaaaataaaaccccaattaaaatgttctttaatattcatttaatttgtgcatgacttgtggcctttttgtattttctcaagcctattactctagagctgtaaaagctcttgcacagcattgttgtgtcagtgtagaatagtggcataaataaatgaattaagctacatttccatgcaggcatttgcactttgaagttagggctgcccagtgccacatgcaaagagtgtatttggtctaaacagttctttccaaacaaccaaatggctgggcagcttgttgtcacggataaatgatataaaatggtaaccactgaacatttgacaactttgttgcattatcatttttaaaaaaggatgaagcatttcaaaatcttgttaacctggttatctcttggtatctctcctgacatatttgttttgctttaaaattggattaaatggtttacagggttatctgaatctacagatttaggtatgtccattatctgggacatgattttgctatgcagttgtgataataaaaattctaattcctcaggtttggccttttaagttatggctgaagacctttaatgatacttatgatgcactcagtgccatacaatagtgttttaagaagcacatggcctcattttccttagaaacaagacaaagcctttttaaaatgtttttttttcactttaaaatagggtattcaaagtggagtaacgtgtattttgaaatgattttgtgttctatatagaatgtcccagttaagattttacagaagcacctggaatatctcattaaaaatttaaaaactcaaaaaaaaaaaaaaaaaa

SEQ ID NO: 56393 - DNA, 862 bp, Homo sapiens
catttcactcccacatttttctcccatcatgaaagtgtgtatcaggttggtttctctataaaaggaattatagctgaactagagctggaggagcataaccaccagcccaagagggaggggaaaagccggaaaggcgttgggcagggaggtggcttgggtacctggtttgaccacagttagaatatcatgattgtgttttgttagtctttaaatgattttgagtctgatagataactaaattctgattttaaaaactatttcagcaagagatttacattaaggctcatgaactaattcagatttttgttcgtgtctcttcaaaaattgctatcttagaaaagttagaattcaatgcccagttgaaaaattgcttggggcttgatagcaaatcaagtttcatcttatatacttttaatttgtaatataccaaagtcatttttgcaatactatattatgtactttcaagtatataattactgcttctttaaatacaaatgatcaagatattcagattattatgagttttttttggttatcatctattgctgctgcacaaattaccagatttcataattggtttaaataagcctccaatttgtttatatttattaacatgtatgattttgtgcatgtagaataagcttggcatagaaatggcctaaatgctcctgtagctcttcattcctttgtcgttctcactctccatgccagtatgtctcatttctagatcccatagaactttcaattgaaagtaataaccaaggcaactcactttccatgagtaatacaccacacttctagaaatcagcctatattactgtcacactggggattaagtaaaaaaaagagaaagaaggatggg

SEQ ID NO: 56394 - DNA, 402 bp, Homo sapiens
  misc_feature (1)...(402): n = a,t,c or g
tgcattgaaaaagtactacctaatttggggctgtatatttcatttttaattcaagtgaatgacttttgaaaccagaactgtttaatgtttaaaataattttatcgaacataattttcatgatgtcctctgaataatttttcttgttttactcaaaaatcacaaaaaataagcaaaattgatagcaaatagcaggttcctccagtgtctgtcacttaattatattttgttaatagaattctggtccctcaggtggttcctagtagcttgtaagaaggagctataacactcattaatggaaaaaatcaaatcacattatttaaaatctgtttttagtcttctaagacagntacacagttttacagaactttttcctgtaagattagtttactctttttaatgag

SEQ ID NO: 56395 - DNA, 1437 bp, Homo sapiens
ttttttttttttacaaataatgaattttattctatctttaagcagattttaatgagacaacataaaatccagtttaaaaggaaagatacatattatcgtgggtttagaccacatcagtgattaaataacaaagagaaatcaaagtcctttcctgaaatgtgacacaaagactttctcataaatgccacaagccacttttaagcatctttggaatactaatacgggaaaagtcagtttacatgtcattttgtcaaatttttggtcaaagtttttaaagctttttaatttgtaactttagtgctttaggaaagcatacaaatctgtaaaaagtctcttaaaaagcacttgcattaacttaagaatttattctaaaatcatgacgaaggcatcaactgtctcagctgaaaagttacaacacactttacatcagtttatattacatagatttccaaataagccaatttgaaatatttagtgtaaacatatgtaatccatggttcaagactgaactgatacatttggagtaggtttatttcaagtatctggctttgtggccgagtggaatggtgatggtataccatcactcattactcgcacaacatccctcccctcttttgactggtggttgaacagttacttgctttaggatacccaatttccaaatccccatgtaacagggaataaacctgtctttcctcactaaataaaatgaggtaatttcacccgaaagaacacagatgggtggaagacagtcaatattcataattgcaatatacaaaattttgtgttctacctggattctttgtagttccatattgagtaggccaataagaacatcctcttttctttagcaatttgcctaacatttgatacaagccatttccaaatacgtttttggtgtgtatcaaacttgagaaactaggagctctggaaattatgcagcagtttgaatttactgcctttaaattgtcttccttactttagaatgaacccgaagcgtaagtaatgaattttttggatgtcagtggctcttaggaattgtcattttatttctgctacaaaatttaccagaaaaaggtactgcaacaatcttgtataaagcaaatctttaacgaaagaacatggtatagactttctaaaaatattcatactttatcacaataactacaaggaaaaattcaatttctatcatcagaaccaagctgcagtttctgaggtagtagagacagatgacagaaaagtttgaaacaaaacccctaaaggaaatagtcaacttgtttaaaatgtaaaaattaatcgaatatctatgaaagggcacaggaagctagatattttaaggaaggaaggtacgctacttacaaagttaacttgtaaccacacaggaggtgtaaagattctagagaagagcactttggttaactctatacgttctgtggc

SEQ ID NO: 56396 - DNA, 438 bp, Homo sapiens
tgaagctgtggtatagttgatgtcctcatgatgtcatcttggataaatgtttaagtctaagattaaatttagtagttcgtcctgtagttgaaagaagaaaaactttaaggccagcagtatcacaagtgtagtactgtaaatgaagaacttttctctatctgctaattgagcacatgcatctaggtgtactgtttgtacctgtaataagcgaatgaaggtggtttttttgtttgtttgccttctccccaggagggggaaaatacacgcatgtatacatgtacacatgtatttaatgaccaccatattaaccttcaaataaaccaatcacattgctattgcattctgtattttatagtcaattcacacacacacaaatctatatttggattatcttaactgagttcagatatttcttttataactggtaaccacagggaa

SEQ ID NO: 56397 - DNA, 409 bp, Homo sapiens
  misc_feature (1)...(409): n = a,t,c or g
aaagaatagaccagaaatggatccaggtatgtaaggatattgagtaaatgatgaaggtgacaccacatatcaacagggaaatgaagaacttagaagttgtgctgggatgataaccgtttggcaaaggtaaaactggatttgtatttcccaccacacatcacaatagagataaattctaaatggatctgagatctaaatataaaaaatccacctatacatgtattagaagaaaacatgaataataattctaacacgtgggaatagggaaacattatctaaccatatgactcaaaatctaaaacccataaaaataataaatctggctacatgaaaataaaatgtattgcttgtcaaaaaaaaaaannnanannaaaaannanannnnnggggggnggcggggtgnnggggc

SEQ ID NO: 56398 - DNA, 388 bp, Homo sapiens
gcgagacttgaagccagcttattctggacccacgcaggcgactgaagacgatgggacccactgccctgcattcgtgacgggctgagcgacagtgaggagcaggctgctgactcccttgccacaccgtgaaggagtcccaaaggtgggacactgagtgagacaagccagaggaaagaccactcatgttgcagttccctttccatggaatgtccagaaaaggcacatttacagagagaagcagatgagtggttgctgggcagaaatgggagccggccacagctgagcacaagaggactttggagggtgatggaaatggttttcgacctgaatctgaacatgggaagcactgcagtttagtagtcctggtccctaagcccttcagcccagg

SEQ ID NO: 56399 - DNA, 508 bp, Homo sapiens
aatttatacctttcatctaactgtatgttcgtacccattaactcaactctcttcatctgtggttccgctcacccagacctttcaatccactagttcctgtcattctactctctgcctttaggaggtgaatttccacagctcccatgagtgaagacgtgcagtttctttctgttcctggtggtttcacctgacacggtcacctcccattccagccacgttgttacaaatgacaggctctcaaaaaaaaaaagggggagggtggcgcaaggagaggacacctctctcctggccctgtcgccatctttccctcatcaatagctaaaaatggcaaagaagaaagagccaggaccccgtgccatcaaatcctccggccttgtgctgccctgtctcggcactgcttgccttaggagatcaggagtgttcctagccactgggagatgggatgcctgccactggcagctctgccgtccatcctcaccatcccaccgtcccccaagacagttttcat

SEQ ID NO: 56400 - DNA, 403 bp, Homo sapiens
ctcggaggacagcataagcagtactataatggatgtagacagcacaatttccagtgggcgttcaactccagcaatgatgaatggacaaggaagcactacttcttcaagcaaaaatattgcctataattgttgttgggaccagtgccaggcttgcttcaactctagcccagatctggcagatcacatccgttccatacatgtagatggtcagcgaggaggggtatttgtttgcttatggaaaggctgtaaagtatataacactccatctaccagtcaaagttggttacaaaggcatatgctgacacacagtggagacaaacctttcaagtgtgttgttggtggctgcaatgccagctttgcttctcagggagggctagctcgtcatgtacccacacacttcagt

SEQ ID NO: 56401 - DNA, 440 bp, Homo sapiens
tttgaacaccttgacatgatttcgaattcaatacgactcactatagggaatttggccctcgaggccaagaattcggcacgagccgagagtttatcctccagaagatttattccttcaggaaacccatgaccaactatcagatcccccagacggccctgctgaagtacaggttcttctatcagtttctgttgggcaatgaacgagcaacagcaaaggagatcagggatgaatatgtggagacgctgagcaagatttacctgtcttactaccgctcttacctggggcggctcatgaaggtgcagtatgaggaagtcgctgagaaagatgatctaatgggtgtggaagatacagcaaagaaaggattcttctcaaagccatcgctccgcagcaggaacaccattttcaccctaggaacccgcggctctgtcatctcccccact

SEQ ID NO: 56402 - DNA, 598 bp, Homo sapiens
gaaaaaaaagcatcaataaaacctatcccaagcattcaaaatagtcctttccaaatgttatttattttaaagtcaatcagctcttttagaaacagattctggtctggctgaaaactcccacaacaaatttactcatccagtggctaatatttaatgcccaccatgggcagagcacacaaatcttcagataaacaatactgaattgattcagcacagattgttcagatttgaatgaccagggagttgtatttgcacatgcaagaacactaagaatctcccagtcctcaaactagaaacctttcagctatgatgaaaaaaaaaaaggggtcttcatttttccaagagtgggtggaggtggggatcactttttagctaaaagctatctctcacttcaaaattcttgtctttttctttgtggacaaacaccagtagtctatcacttggagatcttttaatatctcccatcatttaaaacatccacgagagtttgaagatttgtgttgattgccagatacagaagccccttgaaaataaggaaagggtggaggaagcatttttgtgtcctatccctacttatcgtagcagctctatagacaaa

SEQ ID NO: 56403 - DNA, 378 bp, Homo sapiens
cggacgcgtgggcggacgcgtgggctggtacctatgttgttcagaatccacacagctctgaattaccaacgctgaatttccaagatactgtaaacaccctgaccaacagtccagccatcccattggaaacatctgcatgtcaggacatacccacttctgccaatgtacaaaatgcagagggtaccaaatggggagaggaggcattgaaaatggatcttgacaataacttttattcaactgaggtgtcagtttcttccactgaaaatgctgtcagttctgacctccgggcaggggatgtacctgttttatctttgagtaatagcagtgagaatgccgcctctgtgatcagctacagtggctctgcaccctcggtcattg

SEQ ID NO: 56404 - DNA, 306 bp, Homo sapiens
gagacatggagggtagaatgagagagcatctaaccaaaatgtaatcagagtatcaagaggagagcgtttataaaaggattataggcaatatttgaagaactgatggctgaaaatatcttaaaactgatgaaagataccaatactagttttgcaaaaatgttgtagcacatacgtgacaaaaaaggaatagaatttgttcttcataattgataatagcacatattgatttccttgcttccaggtttctaaatgaagtcatatgtaactttgccaatcaaatgttattttaaaactcttctaagaaaa

SEQ ID NO: 56405 - DNA, 360 bp, Homo sapiens; identical to SEQ ID NO: 36292

SEQ ID NO: 56406 - DNA, 382 bp, Homo sapiens
tattgttccaggatcaccttcttttgcagaattttccacacccatcaccaaaatatttgctgcatttggccccaggttcaagaagaagtacctctaggcaagcttgttacttcaacatatccgtgggaggccagatcttgagacagatttcccagatgatactcatctgccgttgcaaatgctgtgcagtgcattaggtcctcgttcacagacagaactggaaggttggtcctggatggctgtctggtcctggatgcttttagtggtctcttcacctgtgggaagtcttgttttggaacaaatgtttccgttgatacagatgagaaatgcctctttaatatttttataaaccatttagaacccaacagatttggtttgtggg

SEQ ID NO: 56407 - DNA, 942 bp, Homo sapiens
gtatactatgagacttacctgtagtcccttgaagtatggtagactttttagtcaatctacaaccatctactccccttttaagaaaatcttctaaacccaaggcattttcttccaaaaagatgttgactggtagtatcttgaatactttaaaaaaacagacacaccaaaaaactcccaagaaatggccttttacaaaatgtcaaaggttcttcataccaactgctggtcattggctggggttttgaacactgtatgacaatacttaaactacaaaattttttttacaaatacagtttcatcaaaacttgggacatacatcaacttcatttcttttcagtaccttaaaaaaaaaacatcagttctgggacataacaaagaaatactaggagaaatggtatctggacaggaacagaaatgtccacaactgcgagggattttcttttacactggccacagagcgtttattgacaccaccactcctgaaaattgggatttcttattaggttcccctaaaagttcccatgttgattacatgtaaatagtcacatatatacaatgaaggcagtttcttcagaggcaaccagggtttatagtgctaggtaaatgtcatctcttttgtgctactgactcattgtcaaacgtctctgcactgttttcagcctctccacgttgcctctgtcctgcttcttagttccttctttgtgacaaaccaaaagaataagaggatttagaacaggactgcttttcccctatgatttaaaaattccaatgactttcgcccttgggagaaatttccaaggaaatctctctcgctcgctctctccgttttcctttgtgagcttctgggggagggttagtggtgactttttgatacgaaaaaatgcattttgtgcagctggtgaggtataatccaaagcaaaagcaggggcaaaaatggacttc

SEQ ID NO: 56408 - DNA, 411 bp, Homo sapiens
ggcaaccaaccatagttaacaagcagtgctcttaccaaaaggtaactctttctagaatctggcacaccatttaatatcagtatgagcatatggtgggtttaataattgttttccatgtttataagttttctttagttttataagcagttaaaatgaatccctttcactgaaatacaatctgtggtgggacttctagcttttctcgatcttacgctgctagatttatgtcactgccatagctatgcaatgggtgatatttacactatgctcaaacaaagcaaccagaaaaacacatcattgaataatacagatattctgaagtcaagcaagccaactttcattaacagatcaatttccttagaaaagttgatgaaactaaagactgaagttcaaagaaaaagccctctcaag

SEQ ID NO: 56409 - DNA, 467 bp, Homo sapiens
ggcggatcatattccttcatctaccatggctcagccgggaactctgaacctcaataacgaggttgtgaagatgagaaaagaagtgaagagaattcgagttttagttatccgaaaacttgtcaggagtgttggccgactgaagtcaaaaaagggtactgaagatgcactgttaaaaaaccaaagacggccgcaaagattgcttgaagaaatccatgccatgaaggaattgaaacctgacatagtaactaaatctgctcttggtgatgatatcaactttgaaaaaatcttcaaaaagccagattctactgcaactgaaagagcaattgccagactagcagtacatcctcttctgaagaaaaagatagatgtgctaaaagctgctgtacaagcctttaaagaagcaagacaaaatgttgctgaagttgagtcatcaaagaatgctttcagagggacaatcattcttgagg

SEQ ID NO: 56410 - DNA, 1037 bp, Homo sapiens
  misc_feature (1)...(1037): n = a,t,c or g
tttttttttcctttttgttacaacatgaagagaaaaaatagacaagatgaacgcaaatgcattttcacattcaaaaataactgcaggcctcctagtggctctctacatgatcataaatgaaacaagttttaaaagaaagattaatgctgacttgtgaaggtgtcaaacaagaagcggtgagatggagatggaatgttagaaagattgcacgtcgatgacaaagaagcacttacggcttccatcacttttttttccttnttttttntttttnttntnttaaatcttaaggatgctattgaagggttttttgataaagtagccaacagcaccaaaaaataacagaatggatttcctaatgaaatcaggcacaggtctccctcatgtgacccctccaaggcaggcagtcttttccgtcttcctcgctcgcttttcttctttcctggaacagatgcatagtgatgtgctggtggagagcccactcgctcccgtctcctcgttccacctatggttaggaaacaacgtccgccttcagctgccacaaccgcccagagaaacaaaacgggggtgccccggcttcccagatcacaagctcatctggcacacggcagaagacgacagccaaaggcaaagccatttcaagtttcgtgtgtgtgtgtgtgtgtgcgcgtgtgtctcctatcccttctaaaaaatctggctcacatgactgatggtttttaaatttgttctccaaacttcaccctcttcaaaaatgggttaaaaagcctttttccccccaacagttacaaaaaaaaaatcaaaacaaaaaaaaaaggcttttgtcagccatggggcaatacaaattaatacagcccctccggggtttttaaaacagtgactatacggcagtttccaaaatctgactgcagtatctaggttttctaagtacaaaaaaaagttcaacagtttaatgctaaaacaaaattagttctctaaaaccagaagaaaatcttctttagagctagtgcaaagacagcttgaatcctacagcaagtacc

SEQ ID NO: 56411 - DNA, 373 bp, Homo sapiens
atcagcagcaccagctgagattgcagtttctcccgaatcccaggaaatgcccatgggacggacaatcctcaaagtcaccccagaaaaacagactgttccaactccagtacggaaatacaactccaatgccaatatcataaccacagaggacaataaaattcacattcacttagggtctcagtttaaacggtcccctgggacttcaggtgaaggagtcagtccagttattactgtccgaccagtaaacgtgacagccgaaaaggaggtttccaccggcactgtccttcgctctcccaggaatcacctctcctcacggcctggtgcaagcaaagtgacgagcactatcaccataacaccggtcacaacgtcatct

SEQ ID NO: 56412 - DNA, 355 bp, Homo sapiens
aaaaataatcaattttaagatttacttcaaagatccatgcatagttgcttattatttttttaaaacaaatttccaagccagtgttagtaaatctcccaaattggcttccatactgagaaaagtactgcctctccaacttctcattggtaagttgtggatatactctgcttctggatagagaaaaagtggtatgggtaacaaagttcttaaatttgaatgtaatataacaaaggcctacttttatagcaaattggattaaacagcaaggctaccaggttatttttggattatccttaacttcatattctctgcaatgtctcctttgagttagcacattataattgtatctggtgcc

SEQ ID NO: 56413 - DNA, 358 bp, Homo sapiens
gaacatatggccactttacaaagttaagaatcacaaacagcagacaagaatgaatgattaatgctggagttcctggagtatgggccaaagaagttcccccaaaccttacaaacagaaacacatgcctctgccagtccccacatgggatcccagatgagaaacctctcaaggagaataacaaaatgcagttggaatcaaagtgtatgaagcctcccagacacacccagcaggagtcaccaggaagcagctgggaagaggctgacagcccaccagcaatgagaccacaggagctgctgctcccgggagggagtctgctgtcatcctccacttgctagagttctccctcctctctgcttgt

SEQ ID NO: 56414 - DNA, 424 bp, Homo sapiens
cggacgcgtgggggacacttagcaatgactggagacatctttggttgcataactgagggagttaaggatatgttgccaacatctgataggtagaggctacagatgcctctgaacagtctgcaatgcacagagtaatccctcccaacagagaattattcaacctaaaatgtcaaaagtaccagagttgagaaaccctgcttagatgtacggcatttttatttttcacttaatgatcatttatgggtcttctaaagagaattacaaattacttcaagaaagctattggtcttcagttaatatagccttgaaagttcttggtttgcctttacatttttatttcttctgtatttcagccaaaattgccttggaaaagagcatgtttgcctttaaaatttttgttttttctgtatttcagccaaaattg

SEQ ID NO: 56415 - DNA, 409 bp, Homo sapiens
  misc_feature (1)...(409): n = a,t,c or g
cggacgcgtgggggggccattggccacattgtctctactgagaagaccattctggctgtagagaggaacaaagtgctgctgcctcctctctggaacaggaccttgatctggggctttgatgacttcaactgctgcttggggagctacggttccgacaaggtcctgatgacatttgagaacctggctgcctggggccgctggctgagcgccgtgtgcccatccccaacaacaatggtaacctctgggaccattcactgtggagtgtgantgtnacacncancatgacccatgganntccnaggggcntntgcntgcgnttngncntgtatggacacacactggctgttcantgccangnagaagnntnagctnangtntnntggngagcccataccagnattgtttttgt

SEQ ID NO: 56416 - DNA, 696 bp, Homo sapiens
  misc_feature (1)...(696): n = a,t,c or g
gttttttaacttttgaactgtataaatattttacaaattcagaaaaaatcctgaaattgaatatcaataaaaacaaacctaactgtatattaaatgataatataacccacacagaaaaaagaattagaatatctttttgaacacagtacttgctatatgcccatcacaggatatattctaaggactaaaagaattgctaagaaatcttgaacttttacctttagtagttgttaatgatattcatgtagcaattctgaagaaattttgtgtttattgtaggataaggcaaatgaatagattgatgatgttagaaaccagggttctcactgttgtggaagggagctgcaaatatggaatcaaggaaggaggaagaacctggtggtgttggcttgcagtaagaaataacagtattaacttatgatttaaaaatatatagatatatacacactcatatttaattatatatatttacattaaatacatgtacatatttctctcctagctgtgtccactgaaaggacatagaacagtnnnnnnnnnnnnnnnnnnnnnnnnnnnnnnnnnnnnnnnnnnnnnnnnnnnnnnnnnnnnnnnnnnnnnnnnnnnnnnntacatttaaagaaatggcagattccaagctgatttcctggagaaatggggtagggaaaggtacggggtgattctggagcttctttt

SEQ ID NO: 56417 - DNA, 394 bp, Homo sapiens
cggacgcgtgggcttcaccaagtttgccccatctaatgccaggtacctgccctgtaaagacctggaggccacctccagcacccagagacacagtcacagcagagctctgcttcacggttactgaggccttaccattgctctcaatgtgcccattggcctgagggccaccctcggtcctgaccacggtttcttgtcggtcagaaagggtcccctgagaagagaggtagcttggaacatctggtggcacgacggtttcatctgcaaggagacagaacaaatagaacaccagggtctcagtgacaagaaatgcagacacacgttcactgtcaagctcagaaaggggatcctcccagtgacgaccatcagcgctgtgcagagagatgacatggagtcc

SEQ ID NO: 56418 - DNA, 40 bp, Homo sapiens
agttctcaggctcattcaactctacggagccaagttaaaa

SEQ ID NO: 56419 - DNA, 411 bp, Homo sapiens
ataagggataaagaagcactatctgtgattgtcacctttctggagacagacaaaaatggatctctgttgcctgagcagtcagcagttgtatctgctcactcaacgggaagtgctcctcaaagtgaagtgctcctcccaaagtgaagtgctcacacgggctagttgtgtagaacggacaacagtggtgggtagacatttgtgggtcatgcctcactagccaactgatactgaaacaactcccttgcctttcctgagaaagaaatgtgaaatcaagtagatgggcacttctcttataaaaaccctcacaaatctcaaataggtgacatgattatatgttactgttttatgaattgacttacttggaatgccaagtaatcttcagtttttagttgcaagtacttacaagtggtt

SEQ ID NO: 56420 - DNA, 1253 bp, Homo sapiens
gtgatggtatatatttctttctaggtggtgtataatcaagactccctatcaattcccatctcatacttcccagttaattggaattaatgaaatttggctgctcccagacctttttccatgtcttcctttttccttttaacaggatttaagttgagcattcttgagagagagagagagagagagattggaagagagatggggagagactgactcagatccctctcctgtctgcttctttttctggttctctcagttttttttcttgaagttataaagccaaacctggagaatttgtaagttgttaggtttccccaggtaacttggcactcatatgaaccccattttaataagtactcagcccatctcctctcctgggctcagatggctctctctcctccctcaccttacctcaagtgttctcctgaggacccttaggtcagacagagaagctttctctttctgatgggaagggtcaaagtggaaatctcttatctctagtgtgaaatgattttctgctttttcatactccctgccctctttcttttccttaataaatcttccatgtttaagatgttggcctgaagatctgtcccattcataccatgcaccagctgggactgtccctatctgatcagaggggagattaaagaatcaatgttcccaggggaaaagggccttaaattgtttggtcttttcaatggctgacactgtctccaactctccccttcctccttcttcctcaagcttcctatgcaccctactttcccaggccaggatggttggcactgatcccaaacctctgggggcaggtggaaattggctgtggtgagccatttcttcatgtccattcagctctgaggccttcctggccctagctgagatcatcatctcctcctttgcttttaccccaggagtgaggttgggttagaggtggattctgattccgtagcagctaaattccattctccctgtcctgaccatcctgcctttacccataaagcacccgttcctactgaccaaatctctttactttgttggagaaaaaaagtattttgtttttaaatctattttctaatttaaatgcaatttaatatgtaaatctctgcacttttgtgtgagcctacaaatgtgtatgtgttgggggtttttcactctctggtatttcttaataaagaaatctttcttttggggggaagccaattaatgaaggagccttgaatggttttagaaatacagggctgtctgtttcaaaa

SEQ ID NO: 56421 - DNA, 294 bp, Homo sapiens
cagacttctactatgacatttgctccttttgaggatacattgagttggatgctatttggctggcagcagccgttttcatcatgtgagaagaaaagtgaagcaaagtcaccttccaatggcgttgggtcattggcctcaaagccggtagatgttgcctcagataatgttaaaaagaaacatactaagaagaatgaataaatttacgtgatgagctctacaaggccaaaaattttttttcttatctacctgttatattgtgctaatttttctatgtatgtgatgtgaaatgaagac

SEQ ID NO: 56422 - DNA, 361 bp, Homo sapiens
gttgtcaaagagatgagggaaaagttatttatgagaaaaattaccaaaacttaaaaacagagaataatatttcataatcttatgcctaaacctgtatgtatttttgattaatatatcattttggtctttccttctgcttttacccttactccctaagacaacaaaacagtcatgagtttttatacattttaggggctgtaatttcagaaatagttattccttcaaaatctttttattacagaaaatttcagacttgtaaatgaaatctcatgtgcacatcacaccccctcgacaattgccaaattatggcaatgttatttcctctacgttattttcagaccccagtggattattttgaagc

SEQ ID NO: 56423 - DNA, 433 bp, Homo sapiens
ctgaatttgttcaaggttctacaagcatttttgcttctggttcagagcttcatagttctctaacatcagaaattcatttcttgaggaagcagaaccaggccctcaatgcaatgctcattaaaggatccagagataaacagaaggagaatgacaaattacgagagtccctctccaggaagaccgtgagcctggagcaccttcagcgggagtatgccagccgtgaaggaagaaaatgaaaggctgcagaaagaaggcagcgagaaggagagacacaaccagcagctgatccaggaggtccgctgcagcggccaggagctgagcagggtgcaggaggagctgaagttgagcagcaactgtctccaaaatgacaactattgcagtctctccgatggactgaagcgtatgagaactggatgaagacccaggaactgaa

SEQ ID NO: 56424 - DNA, 417 bp, Homo sapiens
  misc_feature (1)...(417): n = a,t,c or g
gttcgtatttcagataaagtagtgggcattctcatgcgtgccaggaaacatggactggtagactttgaaggagagatgctatggcaaggccgagatgaccatgttgtgattacgctactcaagtgaaccttcaaaaacaaaagccaaatttggcccactatggtcttaatgctaaatgctcatgtaggtaaaatgaaaatgcaaactctttgtaataagttagtaaatattaaacaatttttacataaacgactttctggcattctatttctatctagaatgaggaattttggagattttgagaaggcacaaagcatttcagaaagcacatagaatgttaatgtataataatagtattaatagttgaaattccacagggtgnttttgtttttgtttgagacagattctctttatgtc

SEQ ID NO: 56425 - DNA, 1332 bp, Homo sapiens
tgcttggagataggaagtaacacaccgtcatggcaagagtaatttatctgaaggcaaaaagtctgctgaactcaattccccgttacgggaaagattaagtccagagaacagaaccactgatttaaagtgtgacagttccagcggatcagagggagaaatactgacacgggaacatattgaagttgaggaaaaaagagccagcccgccagtctctccgataccagtttcagaatactgtgaatctgaaaataagtggtctcaagagaagcattctccttgggaaggtgtttcagatcatcttgctcacagggaaccaaagtcacaaaagcccttcagaaaaatgcaggaagaggaggaggaaagttggagcaccagcagtgaccttaccatttcaataagtgaagatgatctgattttagagagcccagaaccacagccaaatccaggtggcaagatggagggagaagatggaatagaggccttaaaattaatccatgctgagcaagaaagagttgccctatccactgaaaaaaattgtattttgcaaaccctaagctctcctgattcagaaaaggaatcctccactaacgcaccaacaagagaacctggacaaacaccagactcagacgtaccgagggcacaggtgggtcagcatgttgccaccttgaaagaacatgataattctgtcaaagaagaggcaacagcattattgagaaaagcccttacagaagagtgtggccgtaggtcagctattcacagtagtgaatcatcttgcagcttgccatctattctgaatgacaatagtggaataaaggaagccaaacctgctgtatggctcaacagtgttcctacaagggaacaagaagtttcaagtggctgtggagacaagagcaagaaagaaaatgtggctgcagatatcccaatcacagaaacagaagcctatcagttgctgaagaaggccacccttcaggataatacaaatcaaactgaaaacaggtttcaaaagacagatgcttctgtgtcacacttgtcaggtttgaatattggcagcggtgcattcgagacaaagacagctaacaaaattgcttcggaagctagtttttcatctagtgaaggaagtcctttgtcaaggcatgaaaacaaaaagaaacccgtgatcaatttaaaatctaatgccctctgggatgagtctgatgacagtaactcagaaattgaggctgctttacgccccagaaaccataacaccgatgattctgatgatttttatgactaacgtgctgtgacattggtttcaaataaagtctttaaacaaactaaaaaaaaaaaaaaaaa

SEQ ID NO: 56426 - DNA, 382 bp, Homo sapiens
  misc_feature (1)...(382): n = a,t,c or g
gcattttactgtctgctttttttggctgcttatagtttttaaaaaagtaatttccttaaatccagaaggctaaaaatgaagctgaaacttaaagtggcggtgtttgtccaaaataacggggctcctgctctgccagtcagtaccctcaagtcactcctgatcctcaacctccatgcctaaggctggttcaagagaccacataatatctgccttttattacatacatgatgggtgcatgggattctgcgtgccctttgcttgatatagactgctaaggtgagatggggaatatcagagtcagctgctgcttgaggaagcagatcacacagctggaggcttggaacatgtgggtccctatgagtgtanagcccatatccccata

SEQ ID NO: 56427 - DNA, 1583 bp, Homo sapiens
aattcggcactaggggcagcccccatacctcaagggttctcttgtttatcgaggtttttgggctggtggtctcggcagccagttctggtgactcagtccgcagctatagttccagtaagaactaaaaaacgtttcacacctcctatttatcaacctaaatttaaaacagaaaaggagtttatgcaacatgcccggaaagcaggattggttattcctccagaaaaatcggaccgttccatacatctggcctgtacagctggtatatttgatgcctatgttcctcctgagggtgatgcacgcatatcatctctttcaaaggagggactgatagagagaactgatagagagaactgaacgaatgaagaagactatggcatcacaagtgtcaatccggagtaaaaagactatgatgccaactttaaaataaaggacttcccctgaaaaagctaaggatatctttattgaagctcacctctgtctaaataacttcaggaccatggaccgactttcattaccttgggtaactggaacactgttttccagacatgacttgggacatcaaatataagaccgtccgctggagctttgtggatctttagagcctctcatgttgttcaagttcgctgttcaagtatgatgaaccagggcaacgtgtacggccagatcaccgtacgcatgcacacccggcagactctggccatctatgaccggtttggccggttgatgtatggacaggaagatgtacccaaggatgtcctggagtatgttgtattcgaaaagcagttgacaaacccctatggaagctggagaatgcataccaagatcgttcccccatgggcaccccctaagcagcccatccttaagacggtgatgatccctggccctcagctgaaaccagaagaagaatatgaagaggcacaaggagaggcccagaagcctcagctagcctgatgacaaaaatgacttctagggtgaagcctgggtgatgaggctgctggaagctttgaagtctcccattcccctcatgctataaaaagaactacctttgttctctcccatcctgctcaggtcttttcagcagtctcatcatcagcaaccatgactgatgactgggccctagcaggtggcaggtataacatggccatggacactcttcttttttaaattttatgtctagcttctgagtctagatgaaagacagtatgtttcagagaacattggatatcagtttttcccacagcagggactgtgagagacaaccagcagcatcctctttgtaatcacagggcagggatcagagtttgaaatgaaatgttgtcagggtgttggaaaaattttggtgagttctgcacatttcccctggttcaggctgggcatggaccagccttcagatggcagaagtggaagatgagcctacttgtgagcgatgtgactttaaggaaatgaagactggggaagaataattagtgtttataagacatttaagaggccctttttcatatactgactcactgatgaatcagcatttgcattttatggaaaaatataaatccaaagaaataatttatcccttaaaaaaaaaa

SEQ ID NO: 56428 - DNA, 1833 bp, Homo sapiens
ggaatcttggaatttttatagacagcacctcagtttctgactccagccgcacacctcctgcctctaccagcaggggttgccgccagaccagagccagggccaggtccctgcgtccatcccccccggtaggatggacgtgagccatccttctaggggacttttttcagtgtgcgaactcgtctctgttaggtggtaggagccagtttgtgtggcctgtgcacgctccacagtgcgtggctgggctcatgtgtgtggcctgtgtcccctgtccctgcaggacccagcaggcatcgtggcgtgacagctgtgtccaagccactgcccgggcatcccatcacccaccagggtgcacggtctctcctgctgggggctttctgtcgcatgtgtgtctcctgtcgactctgcagtttgttctcagagcagaatgtttcctgttctcagtgcacaaagacactggttttcaatcggcgtctaaaaccacgttcctgcctttcattgcaacacggtgtgttcatttgtttaaaacagtttaatgagtaagtttagatgactggtcaatatcttaaaaatgtatattagtaagaagttcttcctggaatttttctttcgattctggcagaataaacaggtgtttttagttttcccactgtctgagccaagcaggaccctgtcccagagcaagagatgtccccttccatctctgacccttgcctgggacaagctttgatggggggccccagcttcaaggctgtggtgggaacagcacccccaaatgccagcctctcctttcttcccatccaccagtatactgcggggccatttctggtctttgtccaacaggaaacccatttctggtgggatatgccttccagtgccacagggccactcaccccatgcatctctgtcctgcccgtcagtgctgggacggacagcaagggcaagcccagtgtctggcagataggtgggtgggaacagagaggggagaatgccgtcctaagcttctgcttggggatcccccacacgacctgggtactgcctgggaaacctgtcctaagtaaaactatggacctcgcctcgcccaccggcctgcgaagccagcatctccgtgaaggtggatggaagcgcctttgtcctcattttgagctgcaagctgggtcagcggctctgaagccctcgagtgactttctaacccaagacccagcccctggcaggaggagggtgggtgcagggctggtgggacaaaaagaggcctcagcaggcctggaagacccttccagtacatcccacagcgtgtcgagcagctgggagaacctgtgtcaagctcgagccgtcataggtccccatgaggtgtctgaagccccttcttggtgatgggaggcagaggtgctgacgttctggagcatggacgtgagtcctcagctggctccgcgtgggcccttggagggtgccaggtgtgtggtgaccttctggatgcctttaacttcatggctgcgtcattcctgatttagaactttaaccggagcttcatctagtgattgcaaaactggaccaatgggaggacggcggcgcagcccgctccctccgtggaatggagctcagctcttcggaggcatcaaagcacctgtcgcctccgtggtccccctgccgagggagtgcggcctctgcaaggttcgggggtggcttcgtttgcctggagtggccggccctgcttgtgccatgtggatgtttgtgagcctcggtcctacagcactgtgtaggctgcatctgtttcgtgctggtcctgttgacttgtatgatatccacaaataaatattttcatggcggtaaaaaaaa

SEQ ID NO: 56429 - DNA, 406 bp, Homo sapiens
aaagaagcatatcttattttcatcttaaaacagtaagttaagaagagcttttatagtggcaatcaggaagctatagcactgcagttggtaaaaaggcagtcaagactgtgtggctaaatgggcctgtagaaaataagggagagaaacttgtactctacagctgattttaaaagaaattcttatcatccttatatttagaagagaaacaggaagaaatatatgataaagttttgtcatttgtaaagtttatggctataataaatgacggcatccaaaatcctcaataatagtcctttatacatggattgctgatctaatattttgtttatggaacatgtacaatacaacactcacttcctactgtatctcctttataaattcagtacatttctactgaggcataaag

SEQ ID NO: 56430 - DNA, 417 bp, Homo sapiens
gcaaatgctggataagctgttcttagaatctgtttcaactaccatttctttggtttttgcctttgtactctgctatctgtggaaaaataacataggcttaataacagactctgtacataactttttagatgagaagaagcaaaaacatttccacatattctggtatagctatagaaattgtttttgttttttttcttcctttccagttagagtctgagcaatgagtggactgacttaatttagttgctagaaccaaattgcttcttggtcttgtagttagtctatagctgtgtaccatcttcatgaaatctgattatgactaatgtagacttttataggcatcaagcagaattagtctgtttttcttcaaacagaactttaaaaattactggttatcattctgtactgataattggc

SEQ ID NO: 56431 - DNA, 68 bp, Homo sapiens
gagggtctaaattctccattgtaaggtaaggattctccagggtggtggtgaggtgggttgagaatgct

SEQ ID NO: 56432 - DNA, 335 bp, Homo sapiens; identical to SEQ ID NO: 41209

SEQ ID NO: 56433 - DNA, 684 bp, Homo sapiens
  misc_feature (1)...(684): n = a,t,c or g
ccacgcgtccgagaacatctctcctggttatacagcattccaggtgggctttcatgtggttgaggataatatcattagcaccaaaggtgaaaatccgtggaagctcatcttatttcagcagaagagtaggatgggccttgtggcacgagttaagccaaacaagggaaaggcattcaccatcaattgactcctcatctgtttttaagagggaaatctgagttttcaaggaaagccgaatacagttgccaagttgccagtcaaagaaacaatgtcaacacctgctcatagagatggaattcctaacccggaatattgcccttgaattacaacgagaaaaagaacacttcttattccctgtagcacctcttcaagtgagatggcagaccacctcaggatggaaatgtatttcttcatccctctctctacttccctgtgacctcctgcaaataagggagagacaaagagaagagcagaagaacagaagaatggagtggcaaagagaagagaaggagtgactgaacattgacaagactttggttggggatggtcagagaggagattagctgctagacggccacactgcggagaaagatcattttcccactccatcccccttccagctccccatccatctcaccaagagccagctccaccactcaataaaaccttaccgncgncngcttc

SEQ ID NO: 56434 - DNA, 473 bp, Homo sapiens
  misc_feature (1)...(473): n = a,t,c or g
gtgntnnnnnnntttgnaaancggttaaccgtgtatgacatgattacgaatttaatacgactcactatagggaatttggccctcgaggccaagaattcggcacgagactggaggaatcacattacctgacttcaaattatactgcagagctatagtaaccaaatagcatagtactagcctagaaatggacacatagaccaatggaacagaatagagaacccagaaacaaatccatacacctacaatgaactcattttcaacaaatgtgccaagaacatacactggggtaaggacagtctcttcaattaatggtgctgggaaaactggatatctgtatgtagaagaatgaaacttgatccctgtcccttgtcatcatacacaaaaatcaaatcaaaatggataaacaccttaaactatgaaactactacaagaaaacaccagaaatactttccaagacactagtctaggaaaaa

SEQ ID NO: 56435 - DNA, 387 bp, Homo sapiens
ctaaaaaatgcatttagttacactgagatgctctcttgtttcagacaatacgaagaaaaataaactatttctctttcaagggtcatcatatctataatgggtggtttatagtaagtagctttcttgtttccttgggcaaaagaagcttcagaattttccttagccctctcagttttctggggaaagtgtggctaaacaaatttccaggttttctcgggctttacctcctcattaaataacagtgatagagttctgagaaggaccaaggtaggaaaaagtgggtacaggtggaaactgaggatctttcatttgtaatctgtgtgtaaaatatggaagtaaagagtaaaaaaaattaggagatgagggcctcagtttgaagatcaattg

SEQ ID NO: 56436 - DNA, 646 bp, Homo sapiens
  misc_feature (1)...(646): n = a,t,c or g
gggttaaggagggaatcctgttgcccaaagtagcaaaatgaggaaagacttgactttctctggagttgatttaagtatattttgatagttctccctgatcctttgatttctgcttcactggtagatcgtgagaaagctaagcagctctccacttaagccccacttccccgtgagagcccatccattctgaccaacagtgtgctggaatgaggagggtgggtgcggatgcacagccgatttgatcagacattccctttgccagccgcttggtggcattgttgccctggcacagctactgcaggctctgcagcctgggctttgggtaggagactttgtcctctgaattttctggcatgctngtgtttagtaagctgcagacttgttctgaaagattgngatgaggcagccaggttttgnttttcacacagcatatatgctcataaactttccnagaccgtacacnccttgaggtcanangctgcattctnttctaccttggtgtccncnggaangcttactgctcgggcaggcnctcnnnaatanttcngaaacangannctncctaatnaacnttnttgcantttnnncatannnccgncccattttngcctttacnnnggttccnggcctggnnnccnaatttctg

SEQ ID NO: 56437 - DNA, 695 bp, Homo sapiens
gtgaaaacagctccccggattaaacggataggtttacacatactgatccacccagctattcatcttctgtttgctgctttaattgggtgcggttaaaaggccacgtccctaggcgttcaccggctttcttgccatctgctgcatgaaaactgactttgccgaaaaaattaacaaagaagagcgaaaatgacagaccgcaaccgggataagaaaagtacttcaccttcaaattcagacacagaaatgaaatctgaacaactgcctccttgtgtgaaccctggcaatcctgtgttttcatgtatgttggatccaaagacactccagacagccacctcactatcaaaacctcaaatgattatgtataaaaccaattcaagtcattatggtgaatttctacctattccacagtttttcccctgcaattatactccaaaggagcaagtattttcaagccatatcagagcaactggattttatcaaaataacactctaaatactgcacctgacagaaccagaactcttgattttcctaatattcaacacactctatgaaaatatattcctttgtatattgaagagaaaatatactcgggaaaaatgagtgttaaatctaagggtagaatacctaataaagaagataaaaagttttgaatcaatttttaaaataagttaaataaagtatttcaactgataaa

SEQ ID NO: 56438 - DNA, 381 bp, Homo sapiens
agccagtaatttcaatattcaaatcttcctcattggctagtagtcaacactgctactctgcaccacagaattcagtcaagaaacttcccaaattttatgagttcttcctcttcatgacagttcccagttgagaggatgcaattcttagattatatcaaaacatctgttttgctattttggttctgtttgttatccctacatagaaacgtcccaaaccacaggcaagcccatttctcagagagaaaattttaaagaagttttcaaagactttgcttataaattatagtactaatcatcaaatactcactgagcacctattatgccccaaaccggagattgttgtttctcaaaaaccgctcctctgcatggttcctaacttcc

SEQ ID NO: 56439 - DNA, 273 bp, Homo sapiens
gtttctggcttatgtcacttaatatagtgacccccagtttccatccatgactccttaactgcccctgaatttttgacactattatttttaagtattttggaaaactcacatctgttctcatttttaaaccttaataataacaatttcctactaagctaataaaacttccccttatattatttgtaatgtgtgcataacatagtacacttttgttacagttacatatatgaatagttagcagaggagaaactcctccgttgttcctacaccaag

SEQ ID NO: 56440 - DNA, 260 bp, Homo sapiens
atttgagtaaattttgtatagctggaaattaaatgtgaattattacagaagaaatttcaaatatagaaggctagtaaattagctcttaatttattaaataaaaacaaaaatcaccagtgattcaacacttatggaattactatcaaaatacaaattatacacattttaaaaatgctttaatatcaatcatgagcttgatttttttcaagtttgaagcaaggtatatgagtaggggtaattattttatttcattttttaaa

SEQ ID NO: 56441 - DNA, 254 bp, Homo sapiens
gcaaaaaggaaggaaatagctgttcaaggaaaggggagaagaaatagagccaccaggctctcagttgtccttggtgcttctgttattgcctgaaattctgaatagtggtttggctgggtagagaactcttgagctgcttccggtctgtgtggccctggagttggagaagcatctgtggcaaggaggcacttagaaaagctctgactgccttcagacccctttaactgctaaagtcacccttgtgcaagagaata

SEQ ID NO: 56442 - DNA, 324 bp, Homo sapiens
gctggaatttctaaactgtgtgagagaagtaaaataattttacagttaaaattatatgaaagaagtagatttgtgatttagatttagagggaaaacctaacagtaatacatgtacgcatgttggctgttgctgttttgaatttatttctcccttatgatctaatttaaatttgtatttttttacttagtaaattattggtctgggacaactcggggatgaaggattttacttaatttttctaaattagcacttctgctattgtctttgcatttattattcatcctagaatagaacaaatatccagttaaaaatctttattatga

SEQ ID NO: 56443 - DNA, 561 bp, Homo sapiens
  misc_feature (1)...(561): n = a,t,c or g
aaagcgccttagttagccacaggaccctggcatgtaatagcctacaagaaactaacaatttattgggcactttctgtgcccaagaactgtgttcaaagcatgctacctgctctctacattttcactttaatccttaccacaccttcgtgaggtaggtattattttatcgccattttatagataaaataactgaggtttaaaaagattaagcaacttgcccaaagtctaatgcttaatgttaagttaatgcttaacaaatgctaagtggggaagcccatgcactcatccattatattacactataattataaataaaacccataataagtattagagtacaaggagaataattcctacagtttacctaagctctatgaaaaggtattccacgagttgtctttatcttcttatttcctgtttatattctaggcaactgcaatctggcattctattgtccatccactggcactggaacttaacttctttacttaaaattcacttagggngggctggggtgttggntgggnttacggtggggnattccccggcanttgggggggg

SEQ ID NO: 56444 - DNA, 425 bp, Homo sapiens
tctcgaggatccgaattcgcggccgcgtcgaccggcctcccaaagtgatgattttatttttatttttaattgtattaatctgcatctagataatgactttgtgaagggtgtgtgttgtgtgcaaaacttaaggtattggttgagagttaaatacattatttttataatatgttgggtatagtctagttactaatgattttttttaagtacttttataaaaagttcatttttaaaattgtttgtttttaaaagccaatatacgttgcagaattaggaacagtatttatatttatttacacaagacattgtgccatagcatcctagtaaaacaccttcatgaatgagtaatgttatctcccagaattacattaaaattatttctaaaaagtagcaaagtcattaccttttgcttttaatgacccaca

SEQ ID NO: 56445 - DNA, 152 bp, Homo sapiens; identical to SEQ ID NO: 43820
  misc_feature (1)...(152): n = a,t,c or g

SEQ ID NO: 56446 - DNA, 334 bp, Homo sapiens
ggtctctaaaaaacattcatttctcaatttcttatatttctcaattttccagtttttggtattatctactgacttcccactctagaaaatgactgctcccaccatatatgtgccttctttcctcttcacgccctcacaatacagtcatattatgtttgcgtttgatatcaagcaatatatttacattaatataactatgcacaaactgttcacagctgagccatgtaggaaactatgataaatttttctttcctgagcagctttttgcttgccctggagctaattatcttgttttaccatttgcttagttttctatgtacttatcactaattta

SEQ ID NO: 56447 - DNA, 669 bp, Homo sapiens
gcaaaatgcccagggatttaatgcacaggtgtactttaatgtttagggtcagtttgtagtattcttgagaaaaagataaagggttataatttgaatgtgaactgatccagaaataagtgctgtacctttccactgcacttgaagttcaacttaatggtgtatgtgaaaaacaaaaactactttggttgtgtatgtccaaagtcctatggttttattcatttatggttttacaggctttgaagtactcagatttgatttttgctttcttggaaagactcactttaccaagcatataaaggaaaaatgatttcaaacattgacaagatagatgagtgttaacaaagctttcttttttcgtgtcctccttatttaaaaaggtatacttacaatgtgaagtaacttatgaataaaaggaaaagtttatcccatattcaaataattcctaaggtcagcctccctttttgtaagtggccaaatatctgattaaatcatttctcagtttattaatccttgggaaacaatgatataggcagttactcacaggcttgttaaattacaacaggaaaggttcctttcaaataggtaggagctggcacctaaagaggaaattgggtttataagaaaatggaggcaaagaacttaagttttaagaaaaagcacttcaaaaca

SEQ ID NO: 56448 - DNA, 343 bp, Homo sapiens
gagatagatttctcactgctatattagaagctggaagaagagggcatactatcttcaatgtgataacctggaatgatcaacctggaattttatgtccagagaaactatctttcaaggatgatggtgaaatacaaagacatttcagataagcaaaatagaaactgcctccaacagactttcacttaaggaaattctactttaggaagaagaaaaatggtgccagaaaggaagtctgagatacaggaaggaacggtgagcaaagaaattcgtaagcacctgtgtaaatctaaacaagtgctacctgtataaagataataatgatgatgatgatatctaatttatg

SEQ ID NO: 56449 - DNA, 323 bp, Homo sapiens
ctaagggaaaaatggaggatctaatttaaaacaatcccagtcttcaaaaatgttctagaaggaaaatacatgtaaggagagtgggagttttagaatcaggtttccattattactcatatgggagttactaagtggacaacagatactttcagttgtctgtgtaactttttctggtaaagttgccaattgtgaggcttagaagtttctatgctttgtgtcctgtattctatatagtattaagtgattcacctttggtaaataaactaatgtatgctgttcttatgaaaccattgtttttaaaagtaaaggcacagtacattatt

SEQ ID NO: 56450 - DNA, 469 bp, Homo sapiens
gtcacttgaaaagtacctgtagaagcccggataacttgaggggaatgtctgtttgtacttttggaaattatttaactgcttggtttatcctaggatcagaggctaaacaactccatagtcaacacttttccacctgacattagaaccctgtaatgatttcattatggataggggaagtctaacaagacaatcgattttaaacagggttttaatcaaataagttcttcccacttttaagctgatgaaagaagtcattatttcttgtgaatattttttcctggagagccttatcatgtattttatatgcttatgtggtgttggatgacatcatggaccatatagcttttatagagaatttttctcaccataggactgaggtctcaccaggtgatctactatgcaaattcctacagttttctattcttaagaaataagggccgggcacggcggatcatgaggtcaggaaatt

SEQ ID NO: 56451 - DNA, 331 bp, Homo sapiens
tcatcttttggcctatctctttccttataaaatatctacaagaaaactcaatctttagagagaaaactttgtgaaattatttttctcctttttttttctgttgccactttgttctctagtgtttaaaatttaaagattttattgaggagagtgatttacaatcagaccttaagcagttagggagctcagcctgcggtgtttgaggggaaagctaatatagggtaaatgcagaagcagcgcaaagaaattatttgatttcttaatgtttgagcagttgccttatttggactaagtgggaagttcaagacattgtaactaatacctatttggc

SEQ ID NO: 56452 - DNA, 2617 bp, Homo sapiens
  misc_feature (1)...(2617): n = a,t,c or g
ttgaatccatggtccacctgggttttaattattagatcttggtcgcccaaacaaaaatttatatatatatatataaatttgaccccaaggaagaacaagtcaaaacaaaatgccacgctctgtttgctctagaaaaagaaccatcaagtccacagagtgcaggtatgacttactctccagagtcagtcattaatgtctgtcacctagccacgtataatcatctttgaaaaaggactatattctatcttgggacaataattatggctgttttaatagttcaagagcataatatagcattgatttaccaaaatttttggcctttaacagccagtctatgaaaaccatttagagccccattcctgtctgtagcctaggaaatggaaccatctttaattctttcccacagggaagaatgctgcacctatcacactatgtggtcagggtcactgattgataataaataaataaataatagagcgctcaggggaaacaacactcaccagaccacaacacacagtagaagctaagtgctgagcgtgtactctctggacaacgctggctgcaatgcagactgcaatggctacatgcttttccctctaacaattctctttggctttttcaattgggagggcagattttgcttcacaggcaactagaacaggatctctgcccactaaaaaattatccctatacatagagaaattactacagatgctaagtagtcagaatgctaacattttctacaaacttgattacttattggccaaaatgaaagcaaacagccaatttttaacaacacattcaccacttgaaacaaacagcagcatttacattatatcaaagattcatttctacagaatcgtactaaaaaatcatttttcctgcaagatttagcatgcagcaaaaaatgatcttttcatcctgggaacacctttttactgagttttcggggggaaagaactaaagacatgacagttttgtgggtatttttctatttttagtattctggcagcaaatttgaggttgtacacatttcattatcaactaaacaaaacaagaagcaagcaaatactttaaggttttcacagcctttttcatcacagggaaggaaaaaactgtgtgtgtgtgtgtgcgtgcgtgtgtcgtctttccaaattcctggccacatcaatagtctagaaagtgcttatcaggacaccaaatatttctgtgttcctgagataggtctgaaatttttacccagtattgaatgtatacctgaagtggtcaaataatacttcttataaaaaagtttttctacctaagattatagttttaactttaaattaaagaatggccacaattaaccaacatgcaaaaattctcagactaaacactgagaaattcttcatacaatgcatttgccaccttattgcatttttaaaatctttattctgtagtgaattggtattcccaatctgcctaagcaaaggcatgcccttctaacaagatttgcttagagcagaggtgatggaagaatccgaagaccctctggcatggcaatctgggagcagcacattgttgatggagtccaagtgagcacatttcacacaattcatttagtgacaagtgggcttgctcccttttcatccaggaaaaaaactactcacagaccactgcccagaatctggaataagaaccctcattttaaggtattcttcccaacaaataaatatctaaatattgaaagggggcatatcagaaaacttaaaagacacaataaccaaaaccaaaaccctcttcaaaacaagtaagcaatgtctgtatttagttcactctaaaacattcttagcttttcttgcagtttgttcctaaaagatttgattgggcacaagaggaacgaaattattaataaaataaaagcttatttttgttttgctgtggataatcggtacaaaacgtttccagatctgagacttagatggatcttttaaggtgaaaggagaatgccaggttctactgaaataatatctgaaaggaacaaagagccatttgccatgtgctttttctaagtgcccatgctggaaaaaattttctcaataatatgaagatgctggtacaacttttcctattaaacaatgtcttacacaaccacatgcgttacatttatagacagatttacaatttggaaggaaaaaaagttctgtcttaataaaattagttttttttacaaactgtagtccaactaaagttctctgtctcctcacgcagcagaggcattatctccataaggtgtgtgtggtccaggaaaacacttccccgagcagatcctgccagatttggttcattccatgatgtcgactctgcttggagcaccacactaactttagggtcattacagatctgatgccttggtcttctgctgtttgattttttttttcattcatcttcatcatcctcatcttcctctccatcagacagggatgtacacggccggatctgtcggtagcggtcaagccatttttctaccatctgagtgaccagggggtgatttcgccgccgagaactcttctgcatggcaaccagaactcccccctccgtcacacagcagtccagcnactccctgagcagtttttct

SEQ ID NO: 56453 - DNA, 1316 bp, Homo sapiens
  misc_feature (1)...(1316): n = a,t,c or g
ttttttttttttttataaaaggaaacagaccaacatcatagtgttttattgacaaaaccataggaaaaggcagttttaggatgtaaagtaaaaatggttctctgaaatatctacacaaacgtgaattctgaaaagttttcattaaaatcgtatttcatacaattataaactaatgaggaacaaaacaattttcaacttctccataacccagactgagcttgatttatgcttgccatacagaagcaggaactcttcccagagagggtggtggctcccacacagctgacagccaggtttggctgttacctaagccccatcttcccagtcggtgttcaaaacaagggcacaaggtctggcttttcaaaaaaaaaacaaaaaaaaacgtataggttccaagaaannnnnnnnnnnnnnnnnnnnnnnnnnnnnnnnnnnnnnnnnnnnnnnnnnnnnnaactccgtctccagaaaaaagaaagtgaagtctttaattttcttaaataatcctcatatgtactatccacattgtggaaaaactgaaatacgcagtctggacactgcactgagattccggcatactggcacagacacagctatgtcgcatcttacagactacaacagacaacaggcttaactgcaagaggtttacagacaaaactttacatagatgtgctagaagaattccaaactgctgtcaaagagagtataggaatcggtctgaagagaactccgcccagtcccttctgtttggtcactgcagctgcactctgtatgcacctattagcaacttaaccttggcagagggtgcttctgtcaaccttatgaagagtttattgggacctgcaacagggctgaatgagtaaacaaaatgactgtccagaaaaacaggaagctgaaatttatcattcagaactacagcttgtacactacacggtccacagagccgagcaataacttctttacccaaaaagtttgcatggaagataaacagcaggatgccagagccttctggtatgttctgtgggggtttgtaattgaaatctgttgaaaaatctggaccctcacagagtcgatgacatgcgattggaaaaactggttctagcagagcaaggcgagcttcaaagtaatcctttattgtctcttctgctactcttgaaagtgtctctaaatggttcttcagcaagtcgtacacaagcacattgttagactgcttcgcaaagtgcagggcactaatctggtgctttgacaaaatattgcagtcagctccacattcaattacgagtcgtacgatgtctgaatttcctcttgtacaggcc

SEQ ID NO: 56454 - DNA, 769 bp, Homo sapiens
cggacgcgtgggcggacgcgtgggattttgaggagtagcaagtggaatggtataatgactacagagaaaattatcttgaaatatagcaaggaagagaaacaagttttctttctccactttattgttggactaattgggtcaatttgctgtgacatatcaaagatctctttgtgccaggccaagactggctactgagttctcaaagcgttttaatatatagattacgtatgagtgcctattttttcctcctcctttcattttttatcttaatacccattttacttctgaaataattcatctgttttgctttatgaccagctttaatttcaattgaggaataataacaaccctagagattcataggaaagagcattgaaatacattttttgcataaagatacctaaaaccatctacccagcttagggttgaactgaatttctgtgaaataaatttgttttaaatactaattattttaaaactgcttaattcttaaaaacaatgtcatcagtttcaaaagtttcactttgggaggatattccttaaaaggcatacatagatggtaaagtataaaatatttctgacagaattattcagtattattcaacatttactttcatgtttgttattgtaccacaaagatagtgtcattgttgggttaaaatgttggctgtttttgttaatatacttaaaactgtaaccagtgaataacacctgtagtattttttattatagattatattttatttcaataaactttgatatttagacc

SEQ ID NO: 56455 - DNA, 986 bp, Homo sapiens
  misc_feature (1)...(986): n = a,t,c or g
tttttttttgtgcttaacaagcagttttattcctaacagacaaaaataagaagcaataacatatccataagcagatgaattcgtatacagtgatttccatagcatgtcatattctaagataaaaagaatgaactactcatatatcatgattgatgaatgtcaaaatatgcatccctgctatgtgaaataaaaataataataaagaaaaaagaagaacatctaaataaatagggctcaggagagtactcaggtatgaaaagaggaaacatgttatatcagtcatataaaattccagaaaattgacattaatctactgttaagcaaatattgtaattcagtgattgtctggaggatggagaggccagagagaaagatagtatttattttttaagagacaggggtctaactatggggacccaggcctagtctccaacttccttaccctccaagcnatactcccaaccctggactccccaaagtgttgggattaaccaggccatgagtcacccatgccccagtcttatnaccagctttaaaaaatttaaatttgaaangaactatctggatttaacattatttttgacaaataggttatgtgattttacattgactctcctaactctcatcacgccctaaggggggcaattagcctgtgtgataccaaatacttatgagccaggaagatcatttccacctgattaaattggaatgctggctggttgcaaaggccacatcactggactaagagatttcctttctccctatcctcttcctcctactaattcagggatggctttttggtatgcagcccagataggctacagaaatccacaaaacctttagatttagtctgacaatgacctaagctacactagattcataattatggaggtcctgaaaatttctgtacctgcttgtccatcacagacatagtgactgaatcattgtggatgcctttttaaaaaaagtatatcccaactattctg

SEQ ID NO: 56456 - DNA, 2630 bp, Homo sapiens
cgacagctgacgttccgggagaagtcacggatcatccaggaggtggaggagaatccggacctgcgcaagggcgagatcgcgcggcgcttcaacatcccgccgtccacgctgagcacgatcctgaagaacaagcgcgccatcctggcgtcggagcgcaagtacggggtggcctccacctgccgcaagaccaacaagctgtctccctacgacaagctcgagggcttgctcatcgcctggttccagcagatccgcgccgccggcctgccggtcaagggcatcatcctcaaggagaaggcgctgcgcatagccgaggagctgggcatggacgacttcaccgcctccaacggctggctggaccgcttccgccggcgccacggcgtggtgtcctgcagcggcgtggcccgcgcccgcgcgcgaaacgctgccccccgcaccccggcggcgcctgccagtccggccgcggtgccctcggagggcagtggcgggagcactactggttggcgcgctcgggaggagcagccgccgtcggtggccgagggctacgcctcgcaggacgtgttcagcgccaccgagaccagtctatggtacgacttcctgcccgaccaggccgcggggctgtgcggaggcgacggacggccgcgtcaagccacccagcgcctgagcgtcctgctatgcgccaatgccgacggcagcgagaagctgcccccgctggtggccggcaagtcggccaagccccgcgcaggccaagccggcctgccctgcgactacaccgccaactccaagggtggtgtcaccacccaggccctggccaagtacttgaaggccttggacacccgaatggctgcagagtctcgccgggtcctgctgttggccggccgcttggctgcccagtccttggacacctcgggcctgcggcatgtgcagctggccttcttccctcccggcaccgtgcatccgctggagaggggagtggtccagcaggtgaagggccactaccgccaggccatgctgctcaaggccatggccgcgctagagggccaggatccctcaggcctgcagctgggtctcacggaggccctgcactttgtggctgccgcctggcaggcagtggagccttcggacatagccgcctgctttcgtgaggctggctttgggggtggccctaatgccaccatcaccacttccctcaagagtgagggagaggaagaggaggaggaggaggaagaagaggaggaggaagagggtgaaggagaggaagaggaggaggaaggggaggaggaggaggaggaagggggggaaggagaggaattgggggaggaagaggaggtggaggaggagggtgatgttgatagtgatgaagaagaggaggaagatgaggagagctcctcggagggcttggaggctgaggactgggcccagggagtagtggaggccggtggcagcttcggggcttatggtgcccaggaggaagcccagtgccctactctgcatttcctggaaggtggggaggactctgattcagacagtgaggaagaggacgatgaggaagaggatgatgaagatgaagacgacgatgatgatgaggaggatggtgatgaggtgcctgtacccagctttggggaggccatggcttactttgccatggtcaagaggtacctgacctccttccccattgatgaccgcgtgcagagccacatcctccacttggaacacgatctggttcatgtgaccaggaagaaccacgccaggcaggcggaagttcgaggtcttggacatcaaagctgagtcactggacctagctgtgcccccaacctagattggcagcaccaccccagggcagaggactctctgggcacccgctgtgcatggagccagagtgcagagccccagatcctttagtaatgcttcccctggtcctgcaacaggcccggtcacctcggccgggcccggggcttgaggtcagccttcactgcctgcttattgcctctttctcagaatcctctttcctccccatttgggccctggggttcaggggaccaggtggggcgggtggggagctgtccggtgctaccacaccgtgccctcagtggactaaccacagcagcagccagggatgggccctgggaggttcccggccggagagtgcctctcccctctgccatccacgtcaggtctttggtgggggggaccccaaagccattctgggaagggctccagaagaaggtccagcctaggccccctgcaaggctggcagcccccacccccaccccccaggccgccttgagaagcacagtttaactcactgcgggctcctgagcctgcttctgcctgctttccacctccccagtccctttctctggccctgtccatgtgactttggcccttggttttctttccagattggaggtttccaagaggccccccaccgtggaagtaaccaagggcgcttccttgtgggcagctgcaggccccatgcctctcctccctctctggcagggccccatcctgggcagaggggcctggggctgggcccagagtccagccgtccagctgctcctttcccagtttgatttcaataaatctgtccactccccttttgtgggggtgaacgttttaacagccaaaaaaaa

SEQ ID NO: 56457 - DNA, 314 bp, Homo sapiens
ttttgttttgttttgttctgaagagaagagtggtaccatatgttgcaggaagtcaaactggactttttgtggctactaaatttgcctttaatcttattgttctcaattttggaatcaagtatgaaaatctgcacaaatgcaatgtttacaagaactggttgattctgggaggcatctgctacagtctctttttatatggatatgtacatgtcctattctacaaaaatgattaaagataaaaacatacttgtatcccactgctactttagctgtcaaatttggtgtttcatcacattaaaagcaataaatcagta

SEQ ID NO: 56458 - DNA, 584 bp, Homo sapiens
ttttttttttttttacccaagagagcctttattcagccacactgacggctctgagccagagccacctcctggccccactggtacccaggaaacatgcccaggttaaagctgccccccaggggctaggggctgaggtatggtcagtgggctgaggcttgtagactgtcggggcagtctattgaaccagaaagacagttccttgccctggatggcctcagatgtctttttccatccagaatatggggcgccccctcacattttgatattgtgtctccagcaggctttttgaagggggccctgatggaactgggggtgagatggtcaggcactcaggtaggggagggggtggtggcaatggaggtcccttgggaccccttggggcagcttgggcagtcaggtttggggccttcctgggtggccggggagagggggctgtggggaaggcattaagcagggtggcaggcagccgtctgctggttgaagaccaggccctgcacaggctcacccagctggtagcccaggtgggtatagaagtgcacctggtcatgggtggtgagatgcagcttgcggaagccccgggcccg

SEQ ID NO: 56459 - DNA, 9641 bp, Homo sapiens
ttttagaatgaaataatcagtttaatattatttatagacttgagaaagaacttgaattaaaattcagtctggagtctgaattagcaccatctgaatacagaaagaattctatgtacatgcacaaattagtttaattaacatatataggtaaaatatatttgtttgttttacttgatatacttgttttgacagactcttcctggggttacacttatttttattagttggctgggcatgatacaggttgaacgcccctcagttccagggccttggcaaaattaacctccagtggcttgcctgtgcctttggtgagcttcagggatctgatgcaacctcggaacggaatactggttgttaggccaaactgcttgaggtcatctgggaagcctccaacaaacacagggtcatttgtgtcagctgatgtagatgctgggtttgggctttgggcttccacctggttcccatcgactgtgagctcaatgcggtgtttgatcttgttggcagtgactttatgccattgtccatcacacaaatgccctggaaccccaggcatcatagacagcagtgaatctgcccggcaccattgttccacatgaaacatcaacttttcatcaatcatttcaatacccattccatccattttttgactactgatccccagaagaactccagtcgttgtagttgtgcggaattcaaattctacaagaaggtccaatcccactttgaatccaccaactgctttggcaaaaccggttccgtcaaaatatgttcccctctgagcatttgcaaaacatgtcccaacatggaagctggaggtgggttgttccagatcggcaggggcctctgccatgtggagattcctgacgcagccatcaatgctataggtcactggaccaattcttcgggtagtgtagttgatgggtaacccaccaacatacagcattcccacgacatccaggatgtcggcttttttgggactgatggttctgttggaagccccatctacataaagaattccttcttgcttacttctcattatcttaatcttgtgccactggccatcattgattttggtggggatcatggtgtgggtgtccccactccccaagtcatagctgaagtagggcaatccatttctcagctgaactgttgcaaaatcagcatgattgatgcgagccatgtaaaaaagcaagccggattcagcttcggttcttacttccaactcaattgtgagacggtttttaactttggtgtcatcaaatgcaattgcaatgtgactgtttcttgaaagcccgaactgcttgctccctatcaaaagagctggttctgattctgcagcacaaggaccatgtgtcagaactggggtgggcgtaggaaaggctggggtgggaactggctcaggctggataactatttcagctggagctgctccatcttcatcttcacggagtttctgatgggcacagcgaccaatgtcagcatttttgaaggacacaggccttgcaaagtccatggggacagagttaataacaagattccatatgcagccttcaaaaggaggaatatttctgagtggggaaggttgaaattcaggtggagcacccccaacgaaaagctttttaacttcgataggctgttcaactgtcaggttttgcatgtatcttctgttttcatccacttgaactgtaaagatgcctctagttcgctctacatgaacggaacgttctcttccatcatgaaacagattcggctctggtctgatgacaattttcctcattgttcgtgcccctgtggagagatgcacttccagacggcccctgttgaggagtattacataataggcctgtccagtctgccttcgttttctcctaggtggtgctggtgtccctccacttcccaaaagaatgatgccggactcattcttggtgctgaatgacaggttgatttctgttcctacatcaattggcacaggggagagctccacaaaaccaggcttaggaaagctaactgtgtaaacattctccagggaacatcctttggtaacaccaacataatcgggactactgagtatattgtacggagttcttgaaatttcaatatctttgaggcagccggaatatttcttcagatttacttctggccttgctttcatactcaagtttctcagcgttggcaggccaccaaaatatattttgtcatctgctttcaagtcaagaccaaagttgtttccagaagacgaagttgctatattctcctcctgattagtatctatatctacaattgatatattggcttgtttttgaattcttgacagagtgaatgatttccatttcccatcattatggttttgattgctgacaacggaagccattcctgagcccagatcgtaactgacttttatgtgcccatcagtgagctccacactcatgaaatctctcaggtctcgtgtggcaagatacatcagaagagcactcgaagaaaatgttctgaacttgaacatgacagtggagatgttggggtaccagcgaatgggacggctgaccaatgcataaccttctccatcaaattgaatagtcccctcactatcttccacctgaggactgacagtgcatcctttgcagtcaccttctttttctcggaaattccacaaacctataggtttgttgtcaaagtatgtttctcccatgcagccagtgaatgtaatcacacgtacagcatcagccttctttaatttcccagtcaggccaccaacaaacagcattgcatttgcatccacatctagaatcgtgtaccctggaggagacgtcgaatggtgtgtgctgggcacaatgctggctttgggtccatccagggctctcacagaaatagttccatttctcccagttcttgatgctacgatacggtaccaatatgagtcatcaatagtcaaatctgggtactctacacgtccaactccagatccaacatcccagaggaagctgactttgcctttacgcatttctatagccagaaagtcaataaatttggcacttccaagataaaagaggaggttatcagcaacagctgtctttacgttgacaacaatattattgtaacttcctttcttgatttctggtttgtatgttcgaatgcagtcacctcctgaagacacagatactttgatagaattggcttgtttccgagcttggtttatcaattcctttatctcagagatgtttttctttaggttatcctcaagttccttgatgggtttgagtttatctattagccggtcagcttcctgttctaaatttttgacagtggcatctgcatcggcaatgattttgttcttggaaggatctttaaccacagcattcgttttggcgacgctgtctgctagtttattgtaattcttcttcaggccatcgaggttctggtggagctctgtaatctgtgccagtacatctttagctgtgtcgttggcttgtctggctttgtccttaacagcttgcagtttagcagctgtatcatttggaatagctgataactttcccaaagtgtcattcaaagttctcaagagatccccatttctagcatcagcattttctatcctggtttttaagccatttagatggtcttcattttcttttacatcatttgctaacttcttggcttcgttaagaatcctgaagcttttctgaagacagcctttggcatcttcctttaataaaccccgaggacctgttgccagttttgtagcttcatgtgcaagatctttggcttctttggcaactttctcagcttcatcaatatagtccttaatattgctgtaagctttgaaggctgcagtggcattgaaggagatgtttttagcctcatcaaggattccatcaaggacagcagatgagtcattcaactgagctgcgtggctctcagcctgggacaccttctcagcaagcttcctgtcctttatttcttgggagaggtcatctattttatcattaagctcctcagacataggtggcaatttagtttggatgtcttcaacatagtctatgatggagttgatttcatctgcaagacggttggcttcatcgagtatgtcattgccttcttttaaagtgttctcaatttgtcgtttgccgctctcaacagcctccttctttttctccaatgcagtcatgtttttctgatttactgcaaataggcgattagcttctctgattttatctgtggcttctctcaaaaggtcccaagcatcatcaactttgtttttgtagtcagccagtttttcccggagatccttctccatttcttcattttccccccgggactctccaaacagcttcttcacttttttcagaagggcttctgcagctaccaactcatcttcagcaatttccttttgtgtctctagatttttcctcctcagttctttaatcatctggtcaatctctttctgaagcccttccaaatttctctcaaaggcctcgtctcgagttcctagagtttcatttagttttatagctttttcatttacagcttctgcatcccgggcaagctccttaatgaattctcccagggactttgctcttgtgttggtcctctcagcatcctgtccggtctgctcgccatctgctgtcactttggtagccctggtcagcagctcgttcatttcggtcacgagtgtattcagattgccctctgccagctgaataagcctctctggggcccgctgaggtgacagcaagtgctttagctcctgagtcatattttcaagaccatacagcattttatatggcgcaggcagcggaccagtgaggttgatgctcatgaccatctgctccaggcgagccaagtcaccgagaagaaggccagtgcactcatctccacaaaaaacacactcccagccctcgcgtgcatgccagtgcttgcagccgtcacacttccttcccgtggctccaggtcggcacgtgcagaatcctgtgacagggtcacagggcacaggcagtgagccatagggatcacactcacattcttggcaggagcctccagggttgcctggactgccagtatagccaggggcacacctttcacagtactggccttcatatccccgtggacaagccgtgcagcggtagtcgtcaagtccttctgcgacacaagaggggctgaaattgttactggaagaaatcagagggcaggcacattgctgacagtcatttggcaatcccttgacaattccatagtatccaagagcacatcgttcacagaagtcaccagcagtgtgatgttgacaattctggcatatcgatgtttcagggtcacacaggctgctgtgtccattacattgacatggaacacaggtgcccagggttggtccaggggtgcggccacctggttgagaacgcagtcgataaaatcccggcaagcatgcctcacaggacaggccagaatagcccaggggacaatcacatttttcaatcaagtcagctggaggagtcattgttgttccacgtccttgttcagctacctccattgagatttcagaaatcctgctttgtcgcatgaaatttccataagtagctttgataagaatgtaatgaatatcatatagtatatccaagaagtcttctcgggtcacagttctatggactcgaggatcatccccataatatttccattctttctctgtcatttcaatttcatgccttgtcaattggccaatcagaggagcagccatatgcctgacgataattctagcatgagtaggtgtcccacctcgaatgatcacttgaggattatatgtagagaaacctgtttcttcccgagcctcgaaatagattgcatacttgagtttgcccccataggccatcaacttctttccttcaaattgttctggaagtttccaataaaaaggttccaaatggagatcttctctcatcaggtccatgtgggcaacaatctctggatgttgaaaaacaatgcccttggtggtcgtgtgctgcagagcctcatctaccaggggtagaatggtctgctcagccttcagagtcacccacgtccggatcagtccttttgcttcagagcactgggtagtagtgccgaagcaatagcagctgctgcagccaagtggattcttggcatcgagtccgaatttgccaggccggcatctgtcacagtggatgccttccacattcaccttacaagtgcactgcccagtttgatcactacaggagcattttttagtctctgaatcacaggttgtggcatctgtcccagggaggaagcagtcacagagattgcagcgagggtagttccagtgacctcgactgcactctgtacattttgcaccagagaattttggatgacagttgcattggcctgtatttacattgcattggaaatccaaggatcccactgtgctgcagttacaagccttacaaccagtggtaatgctgtggccccaggtattgggtgcacatttagaacatttctctccaatggtattgggtgggcaaatgcatcgcccagtctttgggtcacaattattacccagatgagaacattcacaagctgtgcagcctccttcttggaagttgaaatagccgtgggcacagcggtcacatttcttccctgtgactccaggttggcaccaacattgtccactctcttcacagtcgaatgacttagacccaaaagaattgcagttgcagggaacacagccccttgctgattgtaggccaaaggtcccagccttgcatttgtcacatctctgaccctgaacgttggctctgcactcacactgtccagtttgactgtggcaaacctcagagaaagagccaccggcattacagcgacagggctgacagttcttcgcatcaactgcatctccaaaatatccatcagcacagagctcacagtaccggcctgttgtacctggtttacatatcagacaggagccagacaagctgtcacagctgccagggatggagaagtcaaggttgtcattgcattggcatggctgacatgatcctccaggtacagagggttgtccaaaatagccttctgcacacctctcacagcgtggtcctgtgtacccgacagggcatccatcacagatcaatccaagactccggtctaaatggcacgttgggctaaagttattggatgggatattgagtggacaggcacagggttgacagtcttcagaggttcctttagtaggctcgccatagaaaccaggaagacatttatcacaatatgggccacctgtgtgatccttacagttcaggcattctccagtgacgtcatcacaggactccgcatgaccaaagcactgacatggctcacagatgccaccaaaaatagtgccgttaactcgcctgtgcctaggccaacaagattcacaagaggagccagtataccctggtgggcactgacacacttctacagctgctgcaatgcttccatcagtaggataggagacagcggattcaaggttaacagagctcaacctgaagatggcatccatcccaaagctgtatgtgatttgtaggaggactctcttcaaattcgcaagcactgtcataaattcctttctacggactggaaaatgtgtgccatgtatggtaaatgattcttctttaagtaacaatacattagtatgttcttcagatgggtgcaggtacacctcatcttgggctgtgctgatgctcaagtcattaccctctaagataatcataagctggagaacacgttctgtatcttcttcctcttcttcaaggtcatatgatatggtaaatgtcaactgtcctcctactgctgggagtttgtttcccagatagggagccggcgcgctccagtagtagctgtgcggcagggcttgccgggcctccgcgttactgatgctgatctgctgaggtgagtccaagtcgtcctgctggggagccactcgaatgcggccaggaaggtcagtcagataccagccactcatatcttgtattttgccataggtccagtaggaactctgacatctgtttgaaacccctgaacagaaacactcatcgcagcctttccaattatcctcttgcaaattgaagaagccggatttgcaacgactacagtctcctccttcaacattttccttgcagatacaggggccaaaacaaggatcctcatttttgctccctaacccactgcagttacaggctttgcagtccgggtagccagtgtagcccctggcacaccgatcacagctcacacctccaaaaccagttttgcaatgacaggatccaggtgccaaacctcgtcgagcatgtttctcatccttgacacagacttcatttaaggaaccaattggatcgcaatgacatggctggcatggccttggataatttggagatacccctttgggtctgaagaagccatctgtacatgtctcgcagtttataccagcagtgttttgggtacaattaatgcagacaccccctccaatgtactttccacgtatattcaaactcagatttcttctggcaacattttcatcataatagcattcttcagcttttccatgacaattgcatgcttcacattcagttttagttagaaaagttccagctctccagggtttctgatggaatcctggacagcactgatcacagctatcgccacatgtgttatgctcacactcacagcgagatttatttgtcgctggatcaagtggacaagccctggcatgaccatagcagatgcacatccctccaactgaaatatccttgaccgagtagtaatatcttctggtgacaatggggtcaatttctcttgggtctttgtgagcaaacatcatcaagtcagcattcagtgtgcggatcctctgaaatctcaggcgaatatagcgagcggaggtaaattctagcagttctggagaaggatcatcggcacttggtctcccattgattaaagagatgtgaatctctccattttctaaggggtgtatcttggagtaaaatgaagtgcagatgacctcatcatctttggcatatgacggtggcccagtgcggggataaatattgtaaagcgttaggcactccgtgtctgtcacagcatgatactgccagggcttgtattcaacatcatcaagagagcgttccaaaatccagtttccaggccggggggagttagctgccttcacaatcacatacgcgatctggaacacctgctgtaaatccagtgtaattgtcacataatggtattcgattccattcttaatactgggactctgccaccaagtgttctttccatcaatagcatttgtaatcgggtgtctctggtttggattgctgctgttttgattgcagattcgacactgcgggttcctcacaggctgcccagggacatgttctaccaatttgcagtacatttcaggtcctttttctccacatgttgcattggtcgtgataagagcattagaagcaagattcaggacagcagggaataaacctctttgctgatgtgcctgtgactgccgctgctgctgcggccgctgcgcctgtacgcccccgaggcctccggagagcagcagaaggaggaggaccccggcggctcccggcatcgtagtggccgcgaccggatccacttctcgggagccagaggagtcgctg

SEQ ID NO: 56460 - DNA, 204 bp, Homo sapiens
gcggcagcggctggagcgcaagggcacgtgcccatctaccctgggagaggagcgctcctacaacccgttcctgagaacccactgcctggcgctacaggaggctctggggccggggccgggccccactggggatgatgactactcccgggcccagctcctggaagagctccgccggctgaaggatatacacaggagctagtgatt

SEQ ID NO: 56461 - DNA, 415 bp, Homo sapiens
gtgcttctgtacatcctgcttggcaccatcgggaccctggtggccgtgctggcgcccaatgccctcctctacaggcactggattgaaatagtgctgctgtaccggacctaccagagcaaggatcagacgcttggggataaaaaggattttgatgctttcgtatcctatgcaaaatggagctcttttccaagtgaggccacttcatctctgagtgaagaacacttggccctgagcctatttcctgatgttttagaaaacaaatatggatatagcctgtgtttgcttgaaagagatgtggctccaggaggagtgtatgcagaagacattgtgagcattattaagagaagcagaagaggaatatttatcttgagccccaactatgtcaatggacccagtatctttgaactacaagcag

SEQ ID NO: 56462 - DNA, 539 bp, Homo sapiens
ttttttttttttttccctgtttgctatcctttattaaagggcccacatcctcatgggactccagccaaaccagtcaggtcccccaaatatagcaggaggcctggaaggggaggggaatgacttatgatcctaccatgcctcccaagaaacagaaaccaccacagacagacagacagacggacaggggctggggagaacttgcctcactctcagtcctctcccactttcccccacttgaaaagaaagtcaaacactggctacgcagcaccccagccccccaccccacccatagcagcgtttgtgggacacaccccctttgcaaggggtggccccgaggcagcttcctatctctctcttcactttggtttgctcctggcaactccgtgccctcttcctttcctcaggctccggggcggttctcacccttgttcttctatcacctactcggaccttctctctcatctcctggggcctccctgccccagcaatttctggggaagcagcgtctgcggggttcttccttctcctagcaagggggc

SEQ ID NO: 56463 - DNA, 421 bp, Homo sapiens
acagtccctgcccccgcactcagaccccgccatggaaagcgagcaggccatgctctccgaaagagaatacgagagacccaagcccagcaacggggtcctgaggcaccccctggagccagacagcagtgcctcctgtttccagcagctgaaaagtgatcccgaaggtcaccaagcacctgctctcaaaccctgtgttcacctgcatcatcctggccgcctgcatggagattgcagtgggggctggcttcgctgcctttttggggaagtacctggagcagcaatttaacctcaccacctcttctgccaaccagctgcttgggatgactgcgatcccgtgtgcttgtctgggtatcttcctgggaggtcttttggtgaagaactcacctgtctgccctgggggccattcggatggccatgctcg

SEQ ID NO: 56464 - DNA, 705 bp, Homo sapiens
gctccgagaggctttgacgcatgtgtacctttttagtggcggtatctcggccggggattttcgggctccagtggaggtggctatgctcaccccatctcccttgagaggcacagaaggttagagatgtgtgcgaggaacggccaggtccagcgtctcctcgttgctgccccttgagcccgggaccggcgccaatgcgcgcccgggttcttgggttctttcgtcccgcagacctgccttggtgtggcgtccctgggccgtagcttccgaaggctgcagccgacctggtcggggtcctctagcccgccttacccttcccccattgacagatggagaaactgaggcccaggccaaaaaatatctcactagagggctcaccgccatttcctggaaaaattggggctgggactcaacggacgctcgtccagcagcagcgcggagctccgaagtaaaggcgcccgtgaccgagtgctttgtccttacaagcgtggtgttcttgaatgcttccaggcgccttatgaggcccccgatgtacaatctgtgcttaactaaaccccactgtcttccagggtcaggttggccatccgcaggcgtagttgctaggaaggtttgacagatgtccgcctgttgattcagacgttcccaggatttggagcaagaagagcaaggaaggccaggcgcggtggctcacgtttgtaatcccagcaa

SEQ ID NO: 56465 - DNA, 854 bp, Homo sapiens
ttttttcatatttctcttttccatcatttagcatcaagttcacctcagtatttttccagtgaagtctgaagagcactaggtcattatgttccactgtaaatgtatcatagttcaataatgtttcatgaaaagatttaaatttattaatttgttttttttcaacaaggatatactttagattacattttttcataaaatgagttgataatgacggtggtgaatctggctcgataggtacataagcagccgggacttggagaattcctaaaatccaagagggtaagtctatcccaggttggcagtagagaccaatttcccgaattccttgaaagtcacagtgtaacagcagaaaatttgataattcagaagcagcattaaccacagtcttgtaggtgtagtaaactggaagctggttgttgcattcatcaaaacatacagctactctgtccatataacaggaggcagccttatgcaccaattcctgaagagtcatttcactgaagtttatctaaacatcaatttgtagcacagaaccttagcaagtctcgcggattaggtttgatcgtaggattgaaaggagagcgtggcccccctggaggagttggattcccaggcagtcgtggtgacaccggcccccctgggcctccaggatatggtcctgctggtcccattggtgacaaaggacaagcaggctttcctggaggccctggatccccgggtcttcctggccccaagggctcgccgggttctgtaggaaaaattgttcctttaccaggcccccctggagcaaaaggactgccggggtccccaggctttccagggtccccaaggagaccgaggcttttccggaaccc

SEQ ID NO: 56466 - DNA, 337 bp, Homo sapiens; identical to SEQ ID NO: 44947

SEQ ID NO: 56467 - DNA, 710 bp, Homo sapiens
agtggcagctccgagagcagaggctctatttgacttcactggaaacagcaaactggagctgaatttcaaagctggagatgtgatcttcctcctcagtcggatcaacaaagactggctggagggcactgtccggggagccacgggcatcttccctctctccttcgtgaagatcctcaaagacttccctgaggaggacgaccccaccaactggctgcgttgctactactacgaagacaccatcagcaccatcaaggacatcgcggtggaggaagatctcagcagcactcccctattgaaagacctgctggagctcacaaggcgggagttccagagagaggacatagctctgaattaccgggacgctgagggggatctggttcggctgctgtcggatgaggacgtagcgctcatggtgcggcaggctcgtggcctcccctcccagaagcgcctcttcccctggaagctgcacatcacgcagaaggacaactacagggtctacaacacgatgccatgagctgacggtgtccctggagcagtgaggggacaccagcaaaaaccttcagctctcagaggagattgggaccaggaaaacctgggaggatgggcagacttcctgtctttgaggctaatggacccgtggggcttgtaatctgtctctttctactatttacatctgatttaaataaaccattccatctgaaaggggcaaa

SEQ ID NO: 56468 - DNA, 624 bp, Homo sapiens
ttttttttttcttcaagaccagattagtattttatttttcccttcctaacactcaaattcatggcaggtgaaaagataatagaacataatcaaactaacatataaacacaattcaaaaacgtttaaccatctattatagctctttgttgtaaaacacacaaagttaaacagaaacatctttatataaattatccttaataatctgtatacactgtaaaacaattgaaaattcacaccaagatcctagtgcaagcagtggtgtacaaaagtgcaaacaaggttagtgattaacaacttaccatcaatataccacttcaacatactttacattcagccaaatactgaaggtttcaccatggaaaaacacttttatcacttttaaagtaacttgactatgttcaccctgagtgctcttgcctcagtatggcaactgattatgagttcaggttaagagcaacaccagggaatacagaaacccacgttaagttggccattctgacatgaatctatacttgaaaatgaaaacaatcccaaagaaaacctgtatgtcaaaaacagaactgttcctgcctttcaccccaaaatatttaaaactaaatctaagccacttttaaaatgcatgct

SEQ ID NO: 56469 - DNA, 82 bp, Homo sapiens
  misc_feature (1)...(82): n = a,t,c or g
acgagggtcagctgctcttacttttaaccagngaaattgcctgccgtgaagaggcggacatgacncagcaagacgaaaaaac

SEQ ID NO: 56470 - DNA, 394 bp, Homo sapiens
ccgaaggatatacttcacaaagtaaatacatttggtataactgtggctttttaaaaaatctaacacaatgtagtaagtttctaactggcttcttttgtcttcgttaaaaaggaagtgaagcttcttttcgcttgtgatttgttagctgagaaaactaatatttaaattctgttcaactatttgagaaatcaatgctggatttcaaataggaatgataaagattgcctttttattagccacatagttgctcaatctcataacttgtatcatttctggcttctgtccctaaaaagtatagataatccctaacttactttcgacttaatgatttttcaccctttacagtgggtgtattgagaggtaaccccatcaaaagtttaggagcgccttaggc

SEQ ID NO: 56471 - DNA, 467 bp, Homo sapiens
gcagagttggaaggcagagaatgaagccttcaccctggctgacctgaagcaactgccggagctgaacccaccagtgctgatgcccagagggaatgtggggactcccctgcgggtctttttggagttgatccgggcctgccgcctaccccctcggatcatcacccagctgcagctccagttccccaagacaggttcctcccggcgctacggcaatgtgccttttgagtatgaggactcagagactgtggagcaggaagagcttgtgtatacagcagagggtgaagaaataccccaaggaacctacctggcagatataccagccagcccctgtggagagcctgaggaagaagtggggaaggaagaggaagaagagtctcactcagatgaggacgatgaccggggtgaggaatgggaacggcatgaagcgctgcatgaggacgtgaccgggcaggagcggccactgagct

SEQ ID NO: 56472 - DNA, 343 bp, Homo sapiens
gctggaagaagttgcttccaaccctcatggatgactttaggggtataagactttggtggaggaactaattccagacgtggtagaaattgcaagagaagtagaattagaaaatggaacatgaagatgtgactgaattgctgcaacctcatgataaaacttggacagatgaggagttgcttcttacggatgagcaaagagtggtttttcttgaggtggggtctgttcctgttgaagatgctgtgaacatagttgaaatgaagacaaaggatttagaatattacataagcctgttaataaagtagtagcagggttggcaaggattgacaacaattttgaaagaaat

SEQ ID NO: 56473 - DNA, 626 bp, Homo sapiens
  misc_feature (1)...(626): n = a,t,c or g
ttttagtcaaaagaattctttcttgaaactagctggtttgtggattcagatactctgatccttacagaatccaagaggaagctttcataaaaacaattcagcaaatatttccaatataatttgaatggctaattttcagttgctaattaattagcagctttgtaatacttgatttgggagcatttacttggaaatcctaaggactataataaaagttttcaacatatttctaaattgtgtgagtttccagctgtagcttttgtctttgtcacattttaaaaaataataagcaagacacattggggacactggcagcagttgccaggttttagctgccaccgcttcagtatgagatatagctgtcccatcttcccccattcagggtaggagatatagtgacccagacttcatgcaaatgggaaaaaaagttttaactgaaatatttatttagatttcagggtctagatggatgggaaagtagaaaaacatatggcaaatcttcagtgttcttcactatggaccactctggagccggaggtttgggttttgtttccntttgttaacaagtggaaaacgggtgaggaccatgtggcccccaaaccaagggggcggaggagcacccttct

SEQ ID NO: 56474 - DNA, 410 bp, Homo sapiens
ggaggagacacttacatgcatgaaggatttgaaagggccagtgagcagatttattatgaaaacagacaagggtacaggacagccagcgtcatcattgctttgactgatggagaactccatgaagatctctttttctattcagagagggaggctaataggtctcgagatcttggtgcaattgtttactgtgttggtgtgaaagatttcaatgagacacagctggcccggattgcggacagtaaggatcatgtgtttcccgtgaatgacggctttcaggctctgcaaggcatcatccactcaattttgaagaagtcctgcatcgaaattctagcagctgaaccatccaccatatgtgcaggagagtcatttcaagttgtcgtgagaggaaacggcttccgacatgcccgcaa

SEQ ID NO: 56475 - DNA, 5411 bp, Homo sapiens
gccggttcccaggccgggtggagaccaactctggggtctcttggtgggagagtggggagcccgtcttctgctgagtgctgccgccccttcccaggacagcggaggtggaacttcgtcgcgctgcaacccccggctcgggatcctggggcgtcctttggcagttgattgcaccctgcactagagagaagtccaggaatgatatattcttgggctgtatttctctaccctggagttcatccagttcatcccagaaacactgacctgattactgtgacaaagtctgatggatagaccctttctgttgaccttgtggcgtttttctttcatgtggaagttggaagacaaggtgaaaggggccaaaagttacctgctttggtgaataggagtgctctacttggttctcagaacatgggccctcgtttaaagctgcagctgtgatcctcggctgtctgttggcattgacgggacctgatgttttacgttattggtggaatcacagtgtctgtggttgcattcttcttcacaattaagttcctctttgagcttgccgcacgtgtagtcagcttcctccagaatgaggaccgcgagcgccgaggggaccggactatttatgactacgtgcggggaaattacctggatccccggtcttgcaaagtctcctgggattggaaggacccctatgaggtgggccacagcatggccttccgagtgcatttattctataagaacgggcagcctttccctgcacatcggcctgtgggactaagagttcacatctctcatgtcgagctagcagtggaaattccagtgacccaggaagtccttcaggagcccaattccaacgtagtaaaagtggccttcactgtgcgcaaggctgggcgttatgaaatcacagtgaagcttggtggattaaatgtggcatatagtccctactacaaaatttttcaacctggaatggtggttccttctaagaccaaaattgtgtgccacttttctactcttgtattgacctgtgggcagccgcacacccttcaaatagtaccccgagatgagtatgataatcccaccaacaattccatgtccttgagagatgagcacaattacaccttgtccattcatgagctcggccctcaagaagaagagagtactggtgtctcatttgagaaatcagtaacatccaacaggcagactttccaggtgttcttgcgactcaccctgcattctcgaggctgcttccatgcttgcatttcataccaaaatcagccaatcaataatggtgaatttgacattattgtcctaagtgaggatgagaagaatatcgtcgaacgcaatgtgtccacttcaggcgtgagcatttactttgaggcttatctttataatgctaccaactgtagcagcactccatggcacctgccacccatgcacatgacctcttcccagcgccggccatccactgctgttgacgaggaagatgaagactcgccctctgagtgccacacccctgagaaggtgaagaaaccgaagaaggtgtactgctatgtgtcaccaaagcaattctcagtgaaggagttctacctgaagatcatcccctggcgcctttacaccttccgagtgtgtccaggaacaaaattttcataccttggtcctgaccctgtccataagctgctcacactggtggtggatgatggcattcaacctcctgtggagctcagctgtaaggagaggaacattctagcagccacttttatccgctccctgcataagaacataggaggctctgagacctttcaggacaaggtgaactttttccagcgagagcttcggcaggtacatatgaaaagaccacattccaaagtcaccctgaaggtcagcagacatgccttgttggaatcgtctctgaaagccactcggaatttctccatctcagattggagcaagaactttgaggttgttttccaggatgaagaagctctggactggggagggcctcgccgggaatggtttgagctaatctgcaaagcactatttgataccaccaatcagctcttcacccggttcagtgacaacaaccaagcattagtgcatcccaaccctaatcgccccgctcatctgcgcctgaaaatgtatgagtttgcgggacggctcgtgggcaagtgtctctatgagtcctctctaggaggagcctacaagcagttggtccgagctcgcttcacccgctctttcctggcccaaatcataggactgcgtatgcattacaagtactttgaaacagatgacccagaattctacaaatctaaagtttgttttatcctcaacaatgacatgagtgagatggagctggtctttgcagaagagaaatataataaatcaggtcaattggataaggttgtagaactcatgacaggtggagctcaaactccagtcaccaatgcgaataaaatcttctatttaaatttgctggcccaatatcggctggccagtcaagtgaaagaggaggtggaacatttcctaaaaggcctgaatgaattggtccctgagaaccttttggctatttttgatgagaatgagcttgagctgctgatgtgtgggactggagacatcagtgtgtctgacttcaaagcccatgcagtagttgttggtggctcatggcatttcagagaaaaggtcatgaggtggttttggactgtggtttccagtctgacccaggaggagttggctcggctacttcagttcacaacaggctcctctcagctaccacctggaggctttgccgccctctgtccctcatttcagattattgccgctccgacccatagcacgctgcctactgcacacacatgttttaaccagctgtgcctccctacatatgactcctatgaagaggtgcacaggatgctgcagctggccatcagcgagggttgcgagggctttggcatgctctgaccactctcctgtcatccagttggctcccatgctctctggagcttctgggcgcaagttacagacatcataaccactgatcctaacacacataaccatcagccagaagatgccgcatgctcccctgtgtctggaggattttgtcacctacaagccttgtctttacctcacctgctccctgcccatatctaccacaggccactttggcatggtatgtaagctgagctcttcattctgtcatgagaagaggaccatgctgctatcatttatttggtcctttgaagatctcagtagctgagggagatggcacacggggctcagccctgttgggaaactggtgtggagacccttaaatccacactgtgctccaaaactccctctgctgatactccttggagacaccctctttggccctcactacttgaccagactggtacttgagtccttctcatgggtggggtgattgcctcttctcatcaggagccaggagagagggggacagataggaggtggcccataggagcagtcccgctgcacaatggtaggcataggccatggcactggactgcctctaaggactgctaaaaagaatatttttttgtggtgtcagaactggaaaaagcactttcccttcgggcatttctggaaatgattattaatccacaaagaagaactctgtaagctttttcttgaattgtagccagtgagaaaagcagatagactgaagaatatgaaggatagctgagctgtagcctccagagtggggcatgcctaggcatatggctggcttggagactactgatgcttttccctgagtttgttattggcactgaagtatggccggcttgggccactgacttccccattatgtagtctgctaaaagctggggatcctttagcattctactgaagaaaattttgtagcaaaagattagaacagtaagaatagtatgccagcaatccctgattctctctctgcttggtgttctctggcagcactaagacaaaggaacagggactaggagtttacgtgcttatcacaggtccttggcgtcaggacactagggatgaacatggaggtgatatgttacacagtaaacacctgccaacccctgtactcccctttgctccatcagttatcaggaaggagaactaaggagggaggaagcttattaggttcactgttgaatgatgattgaagagtacctgctgctgtatcttggaagatgacaacatcctttttcattactgtttgattgaaaataatttcaagattcaaaatctcattgacttcccaaatttgtgtttttaagaaggctttgctgcaagctaccattcccaatggggcagtcaactctgagaatattacaagccatctttattgccaaaaccagcaagtacacagagtcctgaaacaaggcaggactttgggcaatgccttggcctcctggaagcatgtctgagccctcctgttcgcagggatcatgaggaacaagccctcctgagctgctacagttcctgcctgacctcagtctttcgcagtcatcatttgtcctttcttggcacatgggtgctgacctcactcatccttggggtccgggatccagcatcagggtctctataccccaggatcctccatgccacatggtcactgctctcctcagggaccaggacaaggtgctgctgcttgcccaaatgttttcccatgggatatgtaccggaaggtttatcaccaccctgggaaacataatgctgccccttgggcccagaaaggggtttccagctgggggcacgtggactggttctgctgtttttgggcagtcgcttttctgaattctcccctccggcagccttccagagactgatcctggagattgagttgattgtcttggctagacctgtcattttaagctctagtcatagcactttttcagagcatcttaggcaccattgcaacccaaccagggaagctgcatccctgtggtggtccttaggcaccagtctttgttaaacaaaaccctttggcactattgtggttttctattctctgtctgaactctattcaaaagtatctttgctctcttgggccttttcttttactgttttgttttgtttttttctaatcctgctttcatactagccagtgtggggaaaaggtacaatatgtcaaagagatgagagagtgttatttcttgggcaattttctattagtgtttcttattttggccagttcttttatttatgtccttgtgacccaggtacttggggggccagctacccttctggccttttagcgtctttgaaggagaccagacatgagtgaatacctaggagagtgtcagcatgtttctggaaaattggcagagaccaagccctgctgcagattcgtcaggccaggtgaaagggccaggcagttgcagctgatgatgtaaatattttgtacagtagataaataaatgtttaaaagaact

SEQ ID NO: 56476 - DNA, 400 bp, Homo sapiens
gttctgtggcatagaacttcctttgatatgctgcatatttagttctaggcataggtacgtagtgtgacacttgtgacttcactgaaattatggaagaaagacacccagaggaggcctctttgggtggttcttttttcataggaaattccttcataaaacatgtaacactgatcttcagatagaaaaagcaatctgtttatttacctgtaagggcaaagtcaatgagtaaaacttgcatatgtcatcccatataactaagacatatgcatttatgggaagacaaaacaagaatgaaacacttatactgactttcatctggtagtaaatgatttccttaatttttattaggtacgtaactatttccaaatcctctaattgcatactactctcaagtcccatt

SEQ ID NO: 56477 - DNA, 430 bp, Homo sapiens
cccgggtagcgttgggcgggggccccggagtccggtgtcatggccggcgagccgagttcccacatcccactcaaatttccttgtgtttggcggaaacgtgccaacgccacccttatgccatgcgcattcctcatatttggcagtgggaaaatccgcccagagctgccccatatctgttgtcacttggatgggccaattccttttctcttgggccgccgaatgtgggacccgggcttgcaccctttctcagggtacttcagtcaagtgacacacttttagagacgacgtgaggaatcgggtaagagaggaggaaactggccagtgccctaccacaaaggcacaggggcctcttcttgggtatcaggactagccttgggtatcaggactctgggttattaatgaaagggttgggatacttatagaggattgg

SEQ ID NO: 56478 - DNA, 1047 bp, Homo sapiens
ctccttgcctccacaccagcctccccttgcttctccttacagactatccaagaagtgaagcttatgtctttagggagccttgggcagagtccacataaatgcaggaagaacttagacaatgcctgaaatgcaaaggcgacactggagtcttctttctctaacgtgtagcgttgaatgaatatctgcctggaaccaagagggctgctctgatgtttgggagtcggttttttgtgagccacatctgatatttctgatatccccaggaaggagtggcctggaggtcactggttcaggctccctttgggcgaaatcctgggagtgatgctctaaaaatccacctttcccatcatccctactcatcagaaagacaaatataaaatcccagagaggtggaggagctaaaaaagcaattgctccaccttacaaatttggatagaaaggagatgtagtttatttcatatgggcaaagtagtcctcttccaaagtcctgtacagttgttctctgcaattgacgcacatctgccctaagcgaaatctgtcagaaggaatcaacaaggctccttgcctcccctcccaatcccccttttggaggacttgtggcttcagtgtcgtcctaagtgagagtggcgtgtgcttttttcctgtcccctcctccctccgtgtcctagacgctggctgccttctgtgcactcccaggcagatcactacggaagagtcggagcctgtggggttggactggccacactcagtcctgagaaggcgagttgccatggaaagctgggggcagaggtgtttttggagaggaggcggcaggcaaacattgcctttgacttgctctccgcgtacccggggttgtagagctgctcaggaaggggcaggatgtaaggccagaggtgcctggtgggtgagaagcccaggcagagctgggcgccctctccgaagaggtggcagcagggtgaccctgaactcccaaatggggagtgatgccactggggaaactgagtggatcaaagagatgaaaccaaaaaaaaaaaaaaaaatgagcgg

SEQ ID NO: 56479 - DNA, 587 bp, Homo sapiens
atttcatctaagttatcaaaacaatttacataaatcattcacagtatcctctgtgcagggatgtccattctcattcctgctctgggccatttgtgttttcttttccccctgatcagactagctaagagtttatcatttttacagatattttccccaaagaaacctacttttgggtccattgattttttttttctctatcgttttctttttcattgacttttgctcttttcttatgaatttcctttcttctacctattttgtgttcaatttgctgtccttgttttaggttcttttgatagaggcttagatcattgatgaagaatatgaaagaatgggataatacagttaaaaacttggtctacttatgcccattagagaaaacattcttaagcacgcatggaatcttttaaaaatggacgaggtactaggacccaaagcaaatgtcagtaattcgcagatgataatgtaatgtataaatatatgatatgtaggtaaataatacaaatcacattctttggccagagtgcaactgaggaggaaatcagtaacaaaaagacaattaaatccatttgattctttaaaaaaaa

SEQ ID NO: 56480 - DNA, 355 bp, Homo sapiens
gcccctggccacggcgctacaggctcagcaggcttccacttcgtaaaccattgcttaaaccactctgtgtcccccacatgcccaacacgcttgttcttctttcttcatcgcccctttcctgccactctgccagggaaacaaaaggattgtgatttcccggggcccaaagtgagtgtgtacggtgcccctgacggattccaaggtctcactcagcccccactgagagacaaggagaggcgggcaaaacatgaacccctcaagaggagtccggaagagtccccgaacccagatggccccagagctgcagctccgcctgaagagctggactgtggtcgggtgtggtggctcgcacctg

SEQ ID NO: 56481 - DNA, 313 bp, Homo sapiens
ggaggttattttaaagaaagaaagtaaatgctcttatgattggcagatttttatttgtgggatacaagcaagatgagggagcagtatatgcctgcagtattcatctgtcattaatttgtgtcaaataatgtgattctgtattcctcaaatgttgtaaaataggtaaacattttgtctttcacagaaagatacaaaatcagatctccaagcagcttactgctatgatcttagcttccttttcaaatcccttaggcattttaaacctaagtctttatatttacaatggccctcttgtagacagtatatatttggg

SEQ ID NO: 56482 - DNA, 328 bp, Homo sapiens
tgcaaccctaatcagagcccaaatggcgcagtgggaaatgctgcagaatcttgacagcccctttcaggatcagctgcaccagctttactcgcacagcctcctgcctgtggacattcgacagtacttggctgtctggattgaagaccagaactggtgaggccttcaggaagttgagggaatgaaaaaggcaggaagctgcacttgggagtgatgattccaaggctaccatgctattcttccacttcttggatcagctgaactatgagtgtggccgttgcagccaggacccagagtccttgttgctgcagcacaatttgcggaaattctt

SEQ ID NO: 56483 - DNA, 337 bp, Homo sapiens
tgcaaccctaatcagagcccaaatggcgcagtgggaaatgctgcagaatcttgacagcccctttcaggatcagctgcaccagctttactcgcacagcctcctgcctgtggacattcgacagtacttggctgtctggattgaagaccagaactggtgaggccttcaggaagttgagggaatgaaaaaggcaggaagctgcacttgggagtgatgattccaaggctaccatgctattcttccacttcttggatcagctgaactatgagtgtggccgttgcagccaggacccagagtccttgttgctgcagcacaatttgcggaaattctgccgggacat

SEQ ID NO: 56484 - DNA, 104 bp, Homo sapiens
  misc_feature (1)...(104): n = a,t,c or g
ttgtctgccaaattaaatatgctggttatccacagttgtgcaggtaatgggaatgttgaatacttttttttttttnnaaacanagtttcgttttgtcncccagg

SEQ ID NO: 56485 - DNA, 418 bp, Homo sapiens
gcttttcatcatgaagagttaatggtaaaaatggatattcatttttctagtgttagattagatttagcctattttattatccctgaccaatattttattgagcagctaggcactgagtgatacaaaaagtataaaatattgctcccttaaaagatcttttaacttctgtggagagacagcaagcatgacactttaagaatttgaggtatatttagggaagtacatactgatttaaaagttagtagaaaggaatttagctaaaggaagtgttacttggattacatactgatttaaaagttagtagaaagttatttagctaaaggaaagtattacttggaagtagcatacaattgggataatgaagggggaaaaagacatttagggaagttaatgacagtgtggactgaaagcacaggta

SEQ ID NO: 56486 - DNA, 396 bp, Homo sapiens
cggacgcgtgggcgggcagaagctatggtacggatccaagactgtctccttggctggccaggccccacaggcccttgactctcctgaggtctgctcgggaggtgtggcctgaaggagatgtgtttggctctcaagacatttctccagaggaagagatccagttgctgaaacaaatcctctctgctccacttccccggcagcagggcccagaggaacgtggggcagaggaagaagaagaggaggaggaggaggaagaggaggagttgcaagtggtccaggtgtcggagaaagaatttaattttctggactacctgaaacgctttgcatgttcaactgtcgttcgagcctatgtgctgctactaaggagctaccagcagaatagtgcccacactaacc

SEQ ID NO: 56487 - DNA, 5218 bp, Homo sapiens
tttttagaaaaaaaaaatatatttccctcctgctccttctgcgttcacaagctaagttgtttatctcggctgcggcgggaactgcggacggtggcgggcgagcggctcctctgccagagttgatattcactgatggactccaaagaatcattaactcctggtagagaagaaaaccccagcagtgtgcttgctcaggagaggggagatgtgatggacttctataaaaccctaagaggaggagctactgtgaaggtttctgcgtcttcaccctcactggctgtcgcttctcaatcagactccaagcagcgaagacttttggttgattttccaaaaggctcagtaagcaatgcgcagcagccagatctgtccaaagcagtttcactctcaatgggactgtatatgggagagacagaaacaaaagtgatgggaaatgacctgggattcccacagcagggccaaatcagcctttcctcgggggaaacagacttaaagcttttggaagaaagcattgcaaacctcaataggtcgaccagtgttccagagaaccccaagagttcagcatccactgctgtgtctgctgcccccacagagaaggagtttccaaaaactcactctgatgtatcttcagaacagcaacatttgaagggccagactggcaccaacggtggcaatgtgaaattgtataccacagaccaaagcacctttgacattttgcaggatttggagttttcttctgggtccccaggtaaagagacgaatgagagtccttggagatcagacctgttgatagatgaaaactgtttgctttctcctctggcgggagaagacgattcattccttttggaaggaaactcgaatgaggactgcaagcctctcattttaccggacactaaacccaaaattaaggataatggagatctggttttgtcaagccccagtaatgtaacactgccccaagtgaaaacagaaaaagaagatttcatcgaactctgcacccctggggtaattaagcaagagaaactgggcacagtttactgtcaggcaagctttcctggagcaaatataattggtaataaaatgtctgccatttctgttcatggtgtgagtacctctggaggacagatgtaccactatgacatgaatacagcatccctttctcaacagcaggatcagaagcctatttttaatgtcattccaccaattcccgttggttccgaaaattggaataggtgccaaggatctggagatgacaacttgacttctctggggactctgaacttccctggtcgaacagttttttctaatggctattcaagccccagcatgagaccagatgtaagctctcctccatccagctcctcaacagcaacaacaggaccacctcccaaactctgcctggtgtgctctgatgaagcttcaggatgtcattatggagtcttaacttgtggaagctgtaaagttttcttcaaaagagcagtggaaggacagcacaattacctatgtgctggaaggaatgattgcatcatcgataaaattcgaagaaaaaactgcccagcatgccgctatcgaaaatgtcttcaggctggaatgaacctggaagctcgaaaaacaaagaaaaaaataaaaggaattcagcaggccactacaggagtctcacaagaaacctctgaaaatcctggtaacaaaacaatagttcctgcaacgttaccacaactcacccctaccctggtgtcactgttggaggttattgaacctgaagtgttatatgcaggatatgatagctctgttccagactcaacttggaggatcatgactacgctcaacatgttaggagggcggcaagtgattgcagcagtgaaatgggcaaaggcaataccaggtttcaggaacttacacctggatgaccaaatgaccctactgcagtactcctggatgtttcttatggcatttgctctggggtggagatcatatagacaatcaagtgcaaacctgctgtgttttgctcctgatctgattattaatgagcagagaatgactctaccctgcatgtacgaccaatgtaaacacatgctgtatgtttcctctgagttacacaggcttcaggtatcttatgaagagtatctctgtatgaaaaccttactgcttctctcttcagttcctaaggacggtctgaagagccaagagctatttgatgaaattagaatgacctacatcaaagagctaggaaaagccattgtcaagagggaaggaaactccagccagaactggcagcggttttatcaactgacaaaactcttggattctatgcatgaagtggttgaaaatctccttaactattgcttccaaacatttttggataagaccatgagtattgaattccccgagatgttagctgaaatcatcaccaatcagataccaaaatattcaaatggaaatatcaaaaaacttctgtttcatcaaaagtgactgccttaataagaatggttgccttaaagaaagtcgaattaatagcttttattgtataaactatcagtttgtcctgtagaggttttgttgttttattttttattgttttcatctgttgttttgttttaaatacgcactacatgtggtttatagagggccaagacttggcaacagaagcagttgagtcgtcatcacttttcagtgatgggagagtagatggtgaaatttattagttaatatatcccagaaattagaaaccttaatatgtggacgtaatctccacagtcaaagaaggatggcacctaaaccaccagtgcccaaagtctgtgtgatgaactttctcttcatactttttttcacagttggctggatgaaattttctagactttctgttggtgtatcccccccctgtatagttaggatagcatttttgatttatgcatggaaacctgaaaaaaagtttacaagtgtatatcagaaaagggaagttgtgccttttatagctattactgtctggttttaacaatttcctttatatttagtgaactacgcttgctcattttttcttacataattttttattcaagttattgtacagctgtttaagatgggcagctagttcgtagctttcccaaataaactctaaacattaatcaatcatctgtgtgaaaatgggttggtgcttctaacctgatggcacttagctatcagaagaccacaaaaattgactcaaatctccagtattcttgtcaaaaaaaaaaaaaaaaaagctcatattttgtatatatctgcttcagtggagaattatataggttgtgcaaattaacagtcctaactggtatagagcacctagtccagtgacctgctgggtaaactgtggatgatggttgcaaaagactaatttaaaaaataactaccaagaggccctgtctgtacctaacgccctatttttgcaatggctatatggcaagaaagctggtaaactatttgtctttcaggaccttttgaagtagtttgtataacttcttaaaagttgtgattccagataaccagctgtaacacagctgagagacttttaatcagacaaagtaattcctctcactaaactttacccaaaaactaaatctctaatatggcaaaaatggctagacacccattttcacattcccatctgtcaccaattggttaatctttcctgatggtacaggaaagctcagctactgatttttgtgatttagaactgtatgtcagacatccatgtttgtaaaactacacatccctaatgtgtgccatagagtttaacacaagtcctgtgaatttcttcactgttgaaaattattttaaacaaaatagaagctgtagtagccctttctgtgtgcaccttaccaactttctgtaaactcaaaacttaacatatttactaagccacaagaaatttgatttctattcaaggtggccaaattatttgtgtaatagaaaactgaaaatctaatattaaaaatatggaacttctaatatatttttatatttagttatagtttcagatatatatcatattggtattcactaatctgggaagggaagggctactgcagctttacatgcaatttattaaaatgattgtaaaatagcttgtatagtgtaaaataagaatgatttttagatgagattgttttatcatgacatgttatatattttttgtaggggtcaaagaaatgctgatggataacctatatgatttatagtttgtacatgcattcatacaggcagcgatggtctcagaaaccaaacagtttgctctaggggaagagggagatggagactggtcctgtgtgcagtgaaggttgctgaggctctgacccagtgagattacagaggaagttatcctctgcctcccattctgaccacccttctcattccaacagtgagtctgtcagcgcaggtttagtttactcaatctccccttgcactaaagtatgtaaagtatgtaaacaggagacaggaaggtggtgcttacatccttaaaggcaccatctaatagcgggttactttcacatacagccctcccccagcagttgaatgacaacagaagcttcagaagtttggcaatagtttgcatagaggtaccagcaatatgtaaatagtgcagaatctcataggttgccaataatacactaattcctttctatcctacaacaagagtttatttccaaataaaatgaggacatgtttttgttttctttgaatgctttttgaatgttatttgttattttcagtattttggagaaattatttaataaaaaaacaatcatttgctttttgaatgctctctaaaagggaatgtaatattttaagatggtgtgtaacccggctggataaatttttggtgcctaagaaaactgcttgaatattcttatcaatgacagtgttaagtttcaaaaagagcttctaaaacgtagattatcattcctttatagaatgttatgtggttaaaaccagaaagcacatctcacacattaatctgattttcatcccaacaatcttggcgctcaaaaaatagaactcaatgagaaaaagaagattatgtgcacttcgttgtcaataataagtcaactgatgctcatcgacaactataggaggcttttcattaaatggggaaaagaagctgtgcccttttaggatacgtggggggaaaaggaaagtcatcttaattatggtttaattgtgggttttaagtgctatatggtggtgc

SEQ ID NO: 56488 - DNA, 403 bp, Homo sapiens
gagtctgttcaactctctgctgtattgcctcttaaagtaggttttcttaaaacataaatctttcataactttatatatttatagtaacttaatccaaagaaccccaaaagtactagcaatgattgtttctgcaatttaaataaatccatttaattatacaactttgcattatatactgttattcagaccttggaacagtctataattgtttgtcaaaagattttatgtactactttttcttaatttcagatattatccagagtttttcttggcagatggatgtattaaaaaaatagctttccagtgttagttctcaacagtgctgtttcaaaagttgttttaaaagttctaacggttggtcttcaaaacgtaattaagaccttatcataaagagccttttgcc

SEQ ID NO: 56489 - DNA, 569 bp, Homo sapiens
  misc_feature (1)...(569): n = a,t,c or g
cattatcatagaggagctggagaattttgaaaaagattcacagtctttaaaagatttggaaaaggaatttgtggacttttgggaaaagatatttcagaagttcagtgcatatcaaaaaagcgaacaacagaggcttcatcttttgaaaacttcattggctaaaagtgtcttctgtaatactgatagtgaagaaactgtttttacatccgagatgtgtttgatgaaagaagatatgaaagtgctgcaagacaggcttcttaaggacatgctagaagaggagcttcttaatgtacgcagagaactgatgtcagtattcatgtctcatgaaagaaatgctaatgtgtgaaaccctagtttttatcaccatactttatctaattattattctctgtatataactgagggaaataggaatagtccctacaaaggggaaaaatatacatgtcaccgaaggcaagtgtacccttttatagggaaccctcaaatttaaaaaaaaatgtcttttaatgggtgnggaggggaccccttttaacctgggtcccagcccngaggantttgtcttatacata

SEQ ID NO: 56490 - DNA, 412 bp, Homo sapiens
acttgctcggcttgtcatggaaaagacacctcattgctttctgactgaccaaggcgcagcgcagtttgcagcagctatgggggttccagagattcctggagaaaaactggtgacagagagaaacaaaaagcgcctggaaaaagagaagcatgaaaaaggtgctcagaaaacagattgtcaaaaaaacttgggaaccgtgggtgctgttgccttggactgcaaagggaatgtagcctacgcaacctccacaggcggtatcgttaataaaatggtcggccgcgttggggactcaccgtgtctaggagctggaggttatgccgacaatgacatcggagccgtctcaaccacagggcatggggaaagcatcctgaaggtgaacctggctagactcaccctgttccacatagaacaa

SEQ ID NO: 56491 - DNA, 1241 bp, Homo sapiens
ttttttttagagaaagtctggaggtttactcaacaacgttcacaatcacaattgtacatggtaaatcagtctttcacaaaggcttatttttccaggcaggaggagaggctggtggtcttgagcttttggcctggaattccagtctgaattttcaaatattccctgcctccaacccctttgggatcctagtcttcaagccaataacagagcaggagtctgaccctgttctgttgcctggcacggctgaatcaaagccattctggaagcagatgttaaggtgaacttgtcacttggtatgtaggtccgactcccatcccagaggtggcagtgggccttggctcaagatcaagtttgaactaaaatattacttggatttttcacaaagagtgtccgttgaaagcaataaggaattccagaacagaactgcacttcttgtccctctctcacacttacaaagcttcagaaaacattaaaaatgcattacctcctaggaattacaaaagatcacccaactgtacaaactagatatcgctgaagcagagactctgattcctcagttactactgtaaagtgctttgccactctttttgagactccagagactaggaaaatggagatgcacagagagacataaggagctgttttccaagacatcacctgtttcttaaggaaaaaaagaaattcaactggtgggaagtttgaaaagtgaatgtcatgtagactttggaaatccatttgttacatctttaacagaaactgctctttctctcctggaccgaatgtcacatcctctcgtccgattcctcctgtggatgtaccccgttctgcctgagcattttttcctaaagggaagaatcaatagtttctgactgttttaacagctgaaagctccaactggaggcagaagatgggatggcttttcacacacgtgcgtgcaagtttagccacctccaaaaggccttgttcttaaagcaacagtgctgtttgcattatgaaatgtctctggagttcccctttggaaaggctgctggtgggccacatggtcacgatactttcaagtcacaccctactttgtgaccttatcctcagagtaaaggctttagaggaaaagggaccccacagtctcacccattacctggctgtcagcatctccatatgctcctggctgagttttattgagcatcagctggggatgtgagcagaaacctgaatccttgagacaggtggttttcaaaaaggaa

SEQ ID NO: 56492 - DNA, 367 bp, Homo sapiens
cttttttctttgctctctgctgataccaaaagtttttatgctttctaaagggtcacagactgtatctgatagagtgtatttggctggaggcaataggaaacctgaccctctgtggcttaaacaaatagaggtgtaacaaacagtcccctaacatgaagtccagagagggcagagccaggctagtgctgtggcttgtggagagcctcaaggattggcactctgtgtctccctgctcggcatctttaccatgctggctcatgtctcacttgccttgagatggagctgtgctgcctggtgagtggcagttggggacagagaagaggggaaagttggaagcctctgagcacctttcccttcctatggagaa

SEQ ID NO: 56493 - DNA, 332 bp, Homo sapiens; identical to SEQ ID NO: 40928

SEQ ID NO: 56494 - DNA, 257 bp, Homo sapiens
  misc_feature (1)...(257): n = a,t,c or g
aggagattggttccaaggacctcctgcagatacccagatccgctacnnnnnnnnnnnnnnnnnnnnnnnnnnnnnnnnnnnnnnnnnnnnnnnnnnnnnnnnnnnnnnnnnnnnnnnnnnnnnnnnnnnnnnnnnnnnnnnnnnnnnnnnnnnnnnnnnnnnnnnnnnnnnnnnnnnnnnnnnnnnnnnnnnnnnnnnnnnnnnttttttaaaaactttgtatatgttcaatacagttgcagggttttttttttttt

SEQ ID NO: 56495 - DNA, 408 bp, Homo sapiens
tatatatgcagtaaatgtgttatgtgtattaagtctatcgtatctgtcatttctaggtctaatcttttgcattataggtcatattttctatttctttgcatgctttgtgatttttgaggagatgctcggagttttaaattttactttactgaatatttttgtattctaataaatattcttgagctttgttttgaaatgcagtgaagttacctggaaccaactttctaggtggaatcagagcagccttttctctagggctcattttccccactgcggaagcagtgcccttctgagcactgtccctgctatcctgtgtgtttaggagagttttccactgtggccggtgggaaaacaaaccattcctctcttggtgagccttccctggcttggtccctctcatccctcaag

SEQ ID NO: 56496 - DNA, 445 bp, Homo sapiens
  misc_feature (1)...(445): n = a,t,c or g
tnnnnttntngnntcctngaatncgttatcacatgantacgaatttaatacgactcactatagggaatttggccctcgaggccaagaattcggcacgaggaaatggataaagttaaagaagaagccatggaaatcctgactgctcgtcagaagaaagcagaagaactaaagagactcactgaccttgccagtcagatggcagagatgcagctggccgaactcagggcagaaattaagcactttgtcagcgagcgtaaatatgacgaggagctcgggaaagctgcccggttttcctgtgacatcgaacagctgaaggcccaaatcatgctctgcggagaaattacacatccaaagaacaactattcctcaagaactccctgcagctccctgctgcctctgctgaatgcgcacgcagcaacctctgggaaacagagtaacttttccc

SEQ ID NO: 56497 - DNA, 2359 bp, Homo sapiens
gtgagcagcgctgtgtttgccagcgggagcgaggggcgccggctggggtgtgtgctcctgagctcttcagaaaccaggctgctttcaggaacattgctgtggattcccagggcctattccgctagaagcaagatggctgaactcaatactcatgtgaatgtcaaggaaaagatctatgcagttagatcagttgttcccaacaaaagcaataatgaaatagtcctggtgctccaacagtttgattttaatgtggataaagccgtgcaagcctttgtggatggcagtgcaattcaagttctaaaagaatggaatatgacaggaaaaaagaagaacaataaaagaaaaagaagcaagtccaagcagcatcaaggcaacaaagatgctaaagacaaggtggagaggcctgaggcagggcccctgcagccgcagccaccacagattcaaaacggccccatgaatggctgcgagaaggacagctcgtccacagattctgctaacgaaaaaccagcccttatccctcgtgagaaaaagatctcgatacttgaggaaccttcaaaggcacttcgtgggggtcacagaaggcaacagactactgcaacagaaactatccttagatggggaaccccaaacctatacatggaacaacagagaggtcagatggcctacagtggtcagctgagcagccttgtaacccaagcaagcctaaggcaaaaacatctcctgttaagtccaatacccctgcagctcatcttgaaataaagccagatgagttggcaaagaaaagaggcccaaatattgagaaatcagtgaaggatttgcaacgctggcaccgtttctctaactagatatcgcgtcatgattaaggaagaagtggatagttccgtgaagaagatcaaagctgcctttgctgaattacacaactgcattcattggacaaagaagttttcattaatgggcaggaaatgggattaaagtttaaaggaaggaagccatgggaaattcctgactgctcgtcagaagaaagcagaagaactaaagagactcactgaccttgccagtcagatggcagagatgcagcctggccgaactcagggcagaaattaagcactttgtcagcgagcgtaaatatgacgaggagctcgggaaagctgcccggttttcctgtgacatcgaacagctgaaggcccaaatcatgctctgcggagaaattacacatccaaagaacaactattcctcaagaactccctgcagctccctgctgcctctgctgaatgcgcacgcagcaacctctgggaaacagagtaacttttcccgaaaatcatccactcacaataagccctctgaaggcaaagcggcaaacgcccaaaatggtgagcagtctccccagcaccgccgacccctctcaccagaccatgccggccaacaagcagaatggatcttctaaccaaagacggagatttaatccacagtatcataacaacaggctaaattgggcctgccaagtcgcagggcagtgggaatgaagccgagccactggggaaagggcaacagccgccacgaacacagaagacagccgcacaacggctttccggcccaaaaacaaagggcggtgccaaaaaattcaagaggcttccttggggatgaagacccccgagggccccggcccattctgaaaaggccccggcgataggcaggcacgctgcaggacaccttcggagggccaggccttccggggtagtgtcggtagggtttcacagtgcaatctctgccccacgagaatagaagtttccacagatgcagcagttctctcagtcccggctgtgacgttggtggcctgagctaggaggaaaaagagcagttttcactcagttttggttccctgcccgaggtgctgacccaattcgctgccaaaagagtgtcaatcagaatatacaaatcccgtatggttgtgtcatcctctcttaatcatttttactaattctaataatcagctctagcttgcttcataattttcatggctttgcttgatctgttgatgctttctctcatcaagactttgcagcattttagccaggcagtatttactcattattaggaaaatcaagatgtggctgaagatcagaggctcagttagcaacctgtgttgtagcagtgatgtcagtccattgattgtctttagagagttaatgttacaaaaaagaattcttaataatcagacaaacatgatctgctgaggacacatgcgcttttgtagaatttaacatctggtgtttttctgaaaaaatatatatacatatattgctttatttgaaacaaattaaaatatgctgcatttgaaaaaataaaaaaaaaaaaaaaa

SEQ ID NO: 56498 - DNA, 48 bp, Homo sapiens
tctctggcattactggagttatctggggtccagactggattttggcag

SEQ ID NO: 56499 - DNA, 396 bp, Homo sapiens
aaggaaggtcccgtttcttctctaaggtctgggacttgagaggtgagagggcggaggaaaggatctccccccacccccaaccggtaagaaggaggaggaggagggaggctgaggcgcggacccaggccccgagtgattagtcacacaatttaaaggcaaaggagggattaagcccggagtctattgttccagttgtttaggcacgtgtgacctctgagttcccaaacaaatcgtctggggaaatccttcctgcgccctaatcagattgtccagggacagagggccggacggcaggcagctcgggataccgagagcagtgacagagctagggcagagggaatgagggaggaaggagacacgctgagagccaggggtggacacaaacacatacacaca

SEQ ID NO: 56500 - DNA, 380 bp, Homo sapiens
ggagcataggtatattcatcatactaaagcacattttaatattttaatacctaatgaaaagaaagagtatttgtaaatgaaattccagttaagtattttgggatgttaagacaaaatatagttatcctccatccattgtttgacaaggtatcagttgactaacacttgactttgcccctgttaattatgataaggtgaagatttcttttcttgcattaattgtggtaactttgatttgcaggcatgaactaatcacatttgtggttaatattttttcttcatatagataagatatttttgttgagataaatattttaaatgccaccacaccttggtggatatttttttcatatcctcagactgatgaagtatttctggaa

SEQ ID NO: 56501 - DNA, 362 bp, Homo sapiens
  misc_feature (1)...(362): n = a,t,c or g
ggagaattcttctgtcctagctgtgtctctgtgatctgtggatgagggtgggaaagcaccactccagtcaattggggtgtacaaaatgggagtttgagaaaggtctcacatccaggttgttttgaagcaaagtccaagcattgtatcacttcatctgcaaatatttcaataagtacccaaaaggtccagattgactgcatgaacaaatcaacaatcctgagaggacccacaggccctctgaaggaagcagactactcctgcaggacctgggagataccccgaatacttggttggactgantcccatgaagccnnatnacttctgactgcaaggagcttggaaaaccntgtatctggatcttt

SEQ ID NO: 56502 - DNA, 385 bp, Homo sapiens
  misc_feature (1)...(385): n = a,t,c or g
aaagagtgaaggttttttattaccatttcctgacattttaattcagcaatagtgtgtaatttaaaatgtcaggaaatggtagtaaatgagtgaaggttttaaattacacactattgctgaattagannaaanannatgaacctgnnnnnaagggctnatccannccttgaannanngnntaattaataaatcgngtttaaggtaancncggntgtttntcttnggncntnannntngnggntaaannnttacaatancntanagtancccgnnnananntnttttnnaanttggangttaaaaaacnaanttccnccatntgttgangaaaacnangnttttgcantannngntntcntttttgaanaacnttntntaatttctt

SEQ ID NO: 56503 - DNA, 1031 bp, Homo sapiens
cccataccagtttggtttcgctaccttataagctatggggagtttggtaacgtaactagatggagtcttgggatactgctggctttactctacctcatattaaaacttttggaattttttgggcatctgagaactttcagacaggttttacgaatattttttacacaaccaagttatggagtggctgccagcaagagacagtgttcagatgtggatgatatttgttcaatatgtcaagctgaatttcagaagccaattcttctcatctgtcagcatatattttgtgaagagtgcatgaccttatggtttaacagagagaaaacatgtccactctgcagaactgtgatttcagaccatataaacaaatggaaggatggagccacttcatcacaccttcaaatatattaagttgtataaactatcaaggccacaaaatactaatgtcatttggtcataatgactactgataaggcatcagaatggattttcagggctaccagaaaaatgtttccagatggttttagaatgtaggacttatgatccaattcaccaaaagattaaatgaaaccaccctgtgttttaaaatatatataatgttcaacctaatgtatatgcaacatttattctattctaattatttgacaggtaactgcagtgttaaattgtaaatgtgttttctttatgttaccaaaacagcaatttgaaattagaactagtggttttagagaactcaggtattctttcctgacattgttttcagaataaagaatatttttcataatattttaagatacatactatctaaaagtagaattttgttcagcattgacttttataattcccatcctaaaaattcttaatattttcataaaatttgtatttttaaatgaaaattctaaatgttgtattttatcagtaacattttctaagtgaagattaatttactgaggatgatacattatagtattgtattattctctgtagtaagattagtaataagtgaaaataaatgatttaaattcaaaaaaaaa

SEQ ID NO: 56504 - DNA, 1593 bp, Homo sapiens
  misc_feature (1)...(1593): n = a,t,c or g
tttttttttttttttactattttaaaagattttattagaggaaataatctagtagataactttcttacttccacaaaaacaaagtttctcaaggatacaaaccaatggatttatctgtgaactcggtcccagaatagaaactagcaaaaagtcagtacagtactcaaaaaatacttttgtggtatgaaaaaagggcaggtgcagatgtagaactgtaccatcttcagtttctgttcacaattgttttaaaacaattctcatctatccagtctgctctcccacgcctcagatgaggggaagccaatggtcaatgctctgtgatagcccaagtaggatccaatctaggtaatccctgtccaccttagctctgtcctctgagggatttgccaggttgcaccacaatagttctccattctctttagtctgaacttatgctgtaaacccaaggcctggcacaggggtatgcaggaaagtttgagtgaatcagtcacaacagctctagtacagtactgcatcgatatgctctggagacctgcagcctatttttcccagagaaataaagtggagtggagatcagaagccatggcttcccccctacctcctctggtcagtgccaggctctggcctcaaatactgaagaaacatgttggcccagttgcggcaagttctcattgttgggatgcattttagtgtacgaaataaactggcgacgaaggcgactcagttctgccatggtcaagggccgggtaaaccgcaagtgctctgtggtaccaggaagcgtgagcaagtccccggggacagcgctcttctgcgcttccatcaatccggccagtacttgactcgtgacctggtccaactggtgcagaaagctgccggaggcgaggggctgggactgcgtagactgatggggtggtggggcccggttctcaaacagggcagagcggatccccgccaggggcaacggctcctctaggcccaccaaagtgaataaaggccggtcccagcgattccgagaatcgggagcctcaaagcgcagcgttagggcctccaggagttcgggagagtaaaaggcaccggacccatgctttgcagatttctctgaatccggagtcacaagagctggagactccgcagccccggattcttctcgctccaattccttgggtacgtcggcctgggcacttccatttactacagagtccgcagtatgcagttccctgaggacgctgctgcncngncgcctgggctctcccgtcctcctcaaggcgtggccgccaactggacactgacgttccggcccagggttctcgttcgcgcccgccacctgaggtcccgcgatcgggccgccgggccgtacgcagtagaccaggcagagcggggtgcgcgccgcccgtgccaggcgagtagagctcgtaacggaaacctttgatgtagttaagcgagtccaggatgaaccacgtcgtggcgactcaggcgccgttccacggaggcttgcagagctccacgcaatgccttctcacgggcagaatcgccgtacaccgctgggtcctctgcgcccaggacagctgcgtcgtccaccacgtacaccgcgcg

SEQ ID NO: 56505 - DNA, 209 bp, Homo sapiens
tatgggaacatcaggaatgtgagagacacatccctacttcaacccaggacacacaattaatgtctagaaactaacaggaccaagaggaattgacatgttttacagacagatagatatgcataactaattttggaacacatttgtaacacatgcgccacataacaacatttcactctgtgatggaccaaatataccctagtggtcccaca

SEQ ID NO: 56506 - DNA, 1645 bp, Homo sapiens
  misc_feature (1)...(1645): n = a,t,c or g
aaagattggaaaagatgtaatatacaagcaataatggtgagcaatgaatccagtaaaacctaaatctaagttaatggaaatgatgtggttgttgcaaacctctaatgcagtttatgaagaaagaatttttgtaatagaagagacattatgcaagaacaaatttaataataagctgtatctataattccagactttttttccctgcaaaacctgggaaacaagagggatgaaggaatataaacatcctaaaagcctcatattgttgaaggagactttgaaattcttggcgttgatagatacatgctcagatatttattaaacatttacagataccaaccagcaaaataaaaagggaattggaacttctgtacctcccttttcttttatcatgtgggaaagtctcaaagccctggcactgggagctgctcagaaggcaagggccacatgtgcccccagcttccccccacccccagcacagggccaggaagccactgctggtggctccctgtctgctgcctcccgagcagtaggtcccagcgaggtggggtggtaataggttgggctgggagcagattagcaaaccctctcctccccgcaaggaaataaccaggccagataagactagccataaaacaaaacaagggctgatgtagaaaaggattggatcataagacacgagcaagccatagcatcactcattacacagagctgagctttactgctcccagcactacagtcctgggcctgacaccagcccaggcatcggagaaccaggtgccacccccaaaaaacagtgtcacagaactaaacattatccacactgccccaggtgacacagaccccaggcacccaggagaaaatagagaaattaggatcctagtcacaaaggtcacagggactttggtggcccctggtcacatgtgtgaaatcttggcaatgtgtaggaatcagtgagtgcgcgctgagtgtgtgtttgtctgaaattagaaaatacccaagtgtgggcctgagtctccctccctaccccagggcccagacttgcccacccagggccctaaggcaggtgttgggcctcaccctcaaccgtggctccctgagggcaagggctagaatttcctgagatggagagtgagtctccccgcttcagctaaggattcctggggcccccacacaggcctcttgaaggccctgccaagtctgggtgtcccactcctgaggccagctccgtcctccctgtgggagtctacccagggtccagctcagtgctctgcctccagggggcgccaaagggacacttcttaaaggctgctggagttggggaggagagctgagtgtaccctgaccgcacagatggtcatagctgaacgaacctgaaggctggcaagttcattcctacctgacaggagatggctaaggctcaaagaaggtgatcccaggcgagtgcagaacntggctggggcccagcatggagggcagcctggcccactatggctcactttgctatcctagggccccagggaaaggtatacttctttccacccaggaaagcctggccccaggacagctggctggctgggggaaggaggaagaagaccctcttgctccagaaatggccaacacagcaaatgcccaaacaactctttgg

SEQ ID NO: 56507 - DNA, 480 bp, Homo sapiens
gggagtaccacctgagtctccagcttctccggaggagccagctgtcctggtgggacgatagcaaccacaagtggattctccttcaattcctcagcttcccctctgcctccaaacaggggacacttcgggaatgctgaactaatgagaactgccagggaatcttcaaactttccaacggaacttgtttgctctttgatttggtttaaacctgagctggttgtggagcctgggaaaggtggaagagagaggaggtcctgagggccccagggctgcgggctggcgaaggaaatggtcacaccccccgcccaccccaggcgaggatcctggtgacatgctcctctccctggctccggggagaagggcttggggtgacctgaagggaaccatcctggtgccccacatcctctcctccgggacagtcaccgaaaacacaggttccaaagtctacctggtgcctgagagcccagggcccttcctccg

SEQ ID NO: 56508 - DNA, 437 bp, Homo sapiens
aatgagtactggtgaacaaatgaaatacatatgatagagttagaaagctcccaggttgactatctttgaattggaaacaggagcaaaaccccattatctagcccatctgagcctaatgggaacatgagatgaaggccatacctaatcctctgcttggatggctacactgatatgttacccatttgcaatgtatggttttgtgcttctcactgacctcttgtgtggcatgtaacatctccagattctagctcctgctgtgactatagtaagtgtacatgtgacaaggtaatgagctatgtgtgcagggggaaatggggtagtggtgaaaccaatggctgcaagcagaatggtgtattctgagcttgttgagttactatccttttggttttggggtaactgagtagactagctgtcctagtaggtagcatagaacaaag

SEQ ID NO: 56509 - DNA, 314 bp, Homo sapiens
attagtccttaagttgaaggcatactagtgggacatcataacagagtgaaaacttgggggtcatcctttttgtctcttcgcccccaggaaaagcagggcaggcagggaacagcagtgggtgaacctcttctctgctcagggatttcaggccttcacacttgctctttcctttgcctctaagatgctgccattggcctccaaatggctccttccttcatcttgagatttcagtgctaatattttctcctttgagggatttcttctctgacctagctaatccaaagcaacctctatgcctcacctggttttattag

SEQ ID NO: 56510 - DNA, 850 bp, Homo sapiens
ggtaagccaactgaaatctactcaagacaccttaaaccaaatggaaaagtttggaaaagtacaagatgcaagtgagaaatagcaaagcttctttttgacaagttaaagatggatgtttgtcaagaaagtggatttacttggagctagtcgctgcaatatgctatctcattcgctcactacctaccagagaacactgcttggattctggaagaaaacagctcgaatgatgtcccaaattcatgaagcctgtattggctttcatccgtatgattttgtagctctcaagcaactacaagacacgccaagcaagattagtgaagacaataaagatgaacaaataggcggttttcttactgaacagctcaataagctagttttgtctgatgaggaagcaagctttgagagtgaacaagcaaacaaagatcacaatgaaaaacattctcaaatgagagaatttggagcacctcagttttctaactctgaaaatgttgcaaaagatctacctgtagattcattggaaggagaagattttgagaaggaattctcatttctgaacaacctcctaagttctggttcttcaagtactagtgaatttacccaagaatgccagactgcctttgggagccccagtgccagtctcacatcccaggagccttccatggggtctgagcccctcgctcattcttctcgattccttccttcacaactctttgaccttggctttcatgtggctggagcgttcaacaactgggtctcccaagaggaatcagaactttgtctttcacacactgataaccagccagtgccttcacagagtccaaagaaattaacaagatcccccaacaatggc

SEQ ID NO: 56511 - DNA, 1566 bp, Homo sapiens
gcggggtcgagatggcggcgcctttgaggattcagagcgactgggcgcaagccctcaggaaggatgaaggggaggcctggctgagctgtcatcccccagggaaaccatctttgtatggcagcctgacttgtcaaggaattggcctagatggcatcccagaggttacagcttcagaaggatttactgtgaatgaaataaacaagaaaagcattcatatttcatgtccaaaggaaaatgcatcttctaagtttttggcaccatatactactttttccagaattcatacaaagagtataacatgcctggacatttccagcagaggaggtcttggtgtgtcttctagtactgacgggaccatgaaaatctggcaggcttccaatggagaactcaggagagtattggaaggacatgtgtttgatgtgaattgttgcaggtttttcccatcaggccttgtggtcctgagtgggggaatggatgcccagctgaagatatggtcagctgaagatgctagctgcgtggtgaccttcaaaggtcacaaaggaggtatcctggatacagccatcgttgatcgggggaggaatgtggtgtctgcttctcgagatgggacagcacgactttgggattgtgggcgctcagcctgcttgggagtccttgcagattgtggttcttctatcaatggagtggcggtgggtgctgctgacaactccataaaccttggctcccctgagcagatgcccagtgaacgggaggttggaacagaggccaaaatgctgctcttggcccgggaagataagaaacttcagtgcttgggactacagagcaggcagctggtgttcctctttattggctcagacgctttcaactgctgtacttttctctctggcttcttgctattggctgggactcaagatggaaacatttatcagctggatgtgaggagtccaagggctccggtacaagtcatccacagatcaggagcaccagttctatccctgctaagtgtcagagatggattcattgctagccaaggtgatggaagctgttttattgtccagcaagacttagactatgtcactgagctcactggggctgactgtgacccctgtgtacaaggtagcccacatgggagaagcagatcttacacatgctgtcgagacggtcttgtacgacgctaccagctttctgacctctgacttcttggaaagagcagtcccggttagtgaaaaggtttgaccctgatcaacaatgagcagaaacatcatcagtccttcccaaggaccatggcgtttaatgtcttgggcaccccttggaaatcacagaaagtcagctgtactggccgtgtggaactctcatcccaagacctactttgaactgagtaagaaggtcattgtgcccactgcatttgttccaacttctccttgtataaactcaccccagcaacacagggcaaggatatagatgcttttagtttgttcttaaaccagttttgttaaatgtttacaaggacctcagtactaaagcctgttctctggaggaaataaagaaaatatgtttggaggtgcctga

SEQ ID NO: 56512 - DNA, 362 bp, Homo sapiens
gaaaagcagttctcagtggtagatggcattattattaaccagaaaggagaaccaggaagcttttggtgatggaaactttctaagctttgatagggatctggattatgagggtttaagtattttcaaaactcatccaaatgttcccttaaggtttaccatttcatcataattagattttaccttgaaaactaaaagcaacactgaactctatctagttagcagatttgcttaatcagtgttatagattagccagtcagaaaccactttctgtgtattattggcttgaggaaaggagtaaatacattgaagagaatgaatgaatcaatcaatcaatgagcaagtgactaaatggcaatactgga

SEQ ID NO: 56513 - DNA, 375 bp, Homo sapiens; identical to SEQ ID NO: 43612

SEQ ID NO: 56514 - DNA, 271 bp, Homo sapiens
gtgcggcccactgaagccgtggggacgcgcccagcggagctaatcagattacctggctggtgtttgcttgttctggagtgatcttctgactggaaaagaactatgtcatggatcaaggaaggagagctgtcactttgggagcggttctgtgccaacatcataaaggcaggcccaatgccgaaacacattgcattcataatggacgggaaccgtcgctatgccaagaagtgccaggtggagcggcaggaaggccactcacagggcttcaaca

SEQ ID NO: 56515 - DNA, 379 bp, Homo sapiens
aacttataatttatgtgcaagtgttttcagtgccctgaatcaaactataaatgtggggagaaatcacctccatcaaacagttgcatatttactgtaaaagtattcccagtatgtgtgcagcatgaagaaagtattagtgcttctcagtgttctcagtgtaaattctatttatatacagcatattcacatactactttccttatattttatatagttctatgactgttgaaacatcaaggagttaaaaaaatcttaatatttcatgattaactctaagtactattaattaatagcttgcgaaatattagcaattttcccattatggactattctctctaaagcaagagagactagcattcccagacatcattctagggtc

SEQ ID NO: 56516 - DNA, 422 bp, Homo sapiens
ctttatggaaactttacccaatgtcccatgtgctctcccttctggctgaatgaacatgaactgtttctggttttatgtgagtcctggggattgttctacttgctcttcctagtggctcttctctggacttagactgtcttgacaaagggaacaacctatcttcagcactcgagctcatgtcttccaaattgacccaaacacaaagaagaactgggtacccaccagcaagcatgcagttactgtgtcttatttctatgacagcacaagaaatgtgtataggataatcagtttagatggctcaaaggcaataataaatagtaccatcaccccaaacatgacatttactaaaacatctcaaaagtttggccagtgggctgatagcccgggcacaacaccggttatggattgggattctcctctga

SEQ ID NO: 56517 - DNA, 501 bp, Homo sapiens
attgatgctacgagatgaaagattttatccttccttcagacagaatgcactttatgtgcgcatgttagctgagcttgacatgttaaaagatcctagtttcagaggatccgatgatggggatggagaatcttttaatgggtctcctacaggaagcataaatttgtctttagatgacctttcaaatgtttcttctgatgactcagtacaacttcatgcctacatttcagacacaggcgtttgtaatgatcatggcaagacatatgcattatatgccatcactgtacaccggcgcaacctaaacagtgaggagatgtggaaaacctatcgtcgttatagtgacttccatgacttccacatgagaatcactgaacagtttgaaagtctctcaagcatattgaaacttcctggaaaaaagacttttaataatatggatagagattttttagaaaagagaaaaaaggatctaaatgcatatttgcagttactgttagctcctgaaat

SEQ ID NO: 56518 - DNA, 120 bp, Homo sapiens
gctatacatagtatgcttgctatactcagcacattctgcggcaaacatactatgtatagctctaacctgggtgaaccagaaagttaaacatgaaattgcgtcgacgcggccgcgaattcc

SEQ ID NO: 56519 - DNA, 245 bp, Homo sapiens
gggaaaaaaaattccaatgctatattttgcagaaatagaaaaatgcttcttaaaattcgtataatagatcttgaaaagcaaaataaattctgccaaagaacaacaaagctggaggactcaaatttcctgatttcaaaacttactacaaagctgcagcatcaaaacatcaagtcggtggcctgtggaaggaactgaggagcaccctccaagcccagcagacctgggtccccagggaggagctgagg

SEQ ID NO: 56520 - DNA, 140 bp, Homo sapiens
cggacgcgtgggctgaatcacagactccgggaagtggagcccaaccccctgggtaatactgatgcactttcaagtttaagaaccactgttctacaatacaaagtacaacttaacttgaccgctctgaaaaaaaaaaaaaa

SEQ ID NO: 56521 - DNA, 392 bp, Homo sapiens
cttgatgcaggcacagatttatcaagctcctcagtcaacaaacacatcaccggaagaaacatggaaggaaaggaattttaaaaggaaataccaatctctgtgcaaacaaagccttgtatattcatgtttgcaccaatctactgtgagatttatgaagaaaaacaaattgcggacaactctctatgtacacttacaaatgcctcagttgatgcttgtgggctgtttgtcagcgttctgtgataatgaacacatggacttctgtttattaaattcagttgacccctttagccaattgccaggagcctggatttttacttccaactgctgatatctgtgtaaaaattgatctacatccaccctttaaaagcattgatgaattaattagaacttta

SEQ ID NO: 56522 - DNA, 1533 bp, Homo sapiens
gagttgaatttgaagtttgtgggaatagaggtgaggcaccaggggcagaaaaaaaacaggagacctcgcctcagacaagcggggcctgggtccccatggatgaaagtgccttcccattatgctgtaccctgggcagagtggacagtgacgacctggttcgagcccaggggtgagcttcgggaccgcttgcggttaccagaaagcgaacaaatggtccatgaacggaaggtgaggcacctgaggcagagaaagtaaagaaacgcgccgccgagaagcagtgcctgggtccctcacggaggaaattgtcttctccttagcccgttcgcttggcactgaggtccctggcgtccctggtttgatcccagggtaccctcgggccactagtgttaccccaaggtgggcagaaagcccataaagggggaaggcgaggcacctggggcagagaaaaaaaaaacttcgctgcagagaagcgcggcctgattccccacggacgaaagtgtcttcccatcagtccctgcactgggacccggggaccctggtgtccctggttcgagctcagggtgtgcctcagccgctacgtgcaccccaaggggagctttgggagcacaaagcccatgagggaaggtgagttttgagggaggagtggtgaggcacctggggcagagaaaaaaaaaacaatacgcgccacggagaagcagagcctgggtcccccacgatgaaagtgtcttcccatcagcccttgcgctgggccctgtggaccctggcattcctggttcgagaccagggtgcgcttcaggccgctaggggtacccaaaagcgggcagaaggcccatgaggggaaggtgaggcacctggggcagagaaaaaaaaccgcagctttgagaagcggggcctgggtaccccacagaagaaactgtcttcccatcagcccctgtgctgggccccggcaatcctggcatccatggttcgagtccagggagcgccttgggatgctaggggtaccccaagtcgggcagaaggcccatgatgggaagttgagacacctggggcagagaaaaaaaaaaccgcgccgcaaagaagcgggacctgggtcccccacggatgaacgtccctacccatcagcccctgccctgggccccggagaccctagcgtccctggctcgaaaccagggtgcgcttcgggcccgctagtggtacccagaagccggcagaaagcccatgaggggaaggtgaggcacctggggaaaagcgaaaaaaacaaaaacaaaaacgtcgcagagaagcagagcctggggtccccgaggaagaaagtgtcttcccatcagcccttgcgctgggccccagggaacctggatgtcccagtttcgaacccagggtgtgcgtctggccactaggggtaccccaagtcggacagaaggcccatgaggggaaggtgaggtttgagggaggagaggtgaagcaactgtggcagaaaaaaataaaaaacaccacgccgcggagagggcagagaaaaaaaaaaaaaaaaaccctgcc

SEQ ID NO: 56523 - DNA, 481 bp, Homo sapiens
gatgtggacgcccaccatcccattcagtgtccaggaacacctgcaacaacaggattcacggatcagcctgagatgatcccagctgtgctctggacagggagaaggaaacccgaggcttaagagatgaagtctgaggtgttggtggagctgggatttaaaccaaaatatgtccaactgcaaagcatgtaagtaacaattttagagggtatacggaggtgaccctaagtaacaaggaatcacatatagtgagcaagcaatttgcttttcagtttttggtcaatccttatgattatttagaggagaaagttcagtttggtgctggtatatcttatgtttatcacccgacagttgttaatctctttttaacaaagaatacaggccaaggccctgtgactttagctggctttggtatttggccaaaagttaatgactttggcagttagtgtttttatccatgccaagcgatgatgattttctcttt

SEQ ID NO: 56524 - DNA, 325 bp, Homo sapiens
gcattttccaagtaaagttcagatgtttcgatattcctgacactatttgataaattattttaaggaaaggtctacacacacacacacacacacacacacacacacacacacgagaatggtgcctgattcataattggcactcactatatatttgctgaatgaatacataagaaaataaatgcatttcctttttcatctttctctctctgagaatgggaactgctgcaggatttttttaaatggcaagtttcaatatatacctttcttcttaaatgtttgctttaagaataatttcagaaggagattattctaaaatatggagcat

SEQ ID NO: 56525 - DNA, 504 bp, Homo sapiens
cggacgcgtgggcaaactttcctgagattagaaaaaatattagaagagtccccccacctgtttcttactttatgagaccacacctaaaagatagaagactgctttgcaaccaagaaatccttcatgaacacctctttaatcacaagtcctcaactccaaggttagctttatttcaacttttataatacttttcttacttttcttgatagctttaccacccatgtattcattcctaaaaaatacacagttttgtctgattttgaattttatgtgaatggaattgtacatatctgtgtttgtgtcttccttgttttactcaatactgtttctgagatcaatcacattatttgttaatattttgtttaggatttttgcatctctatttcagtgtgtgtttggaatgtaaatttccattctcagactatcttttggcctgaatttggttacatgagtatatgttctaaaaatattacttacactttcgaataaattttaaggactttt

SEQ ID NO: 56526 - DNA, 491 bp, Homo sapiens
  misc_feature (1)...(491): n = a,t,c or g
aaatttctattttacaaatttttcagggaatcatattcttaacttcactgagaaaaatgtgttactcttttggacaatttatcttatttctatcatataagatgtatttttttattgtccttaaaagaagctctagcatgaaattaaaggaaagggaaagaaatagatctggtgcacccgaacattaggagaaaatgaaaaatatacaaccaaccgttcgtgagtcatcaaaaagtcaaagtnnnnnnnnnnnnnnnnnnnnnnnnnnnnnnnnnnnnnnnnnnnnnnnnnnnnnnnnnnnnnnnnnnnnnnnnnnnnnnnnnnnnnnnnnnnnnnnnnnnnnnnnnnnnnnnnnnnnnnnnnnnnnnnnnnnnnnnnnnnnnnnnnnnnnnnnnnnnnnnnnnnnnnnnnnnnnnnnnnnnnnnnnnnnnnnnnnnnnnnnnnnnnnnnnnnnnnnnnnnnnnaagtcataataagcaaattattggctt

SEQ ID NO: 56527 - DNA, 902 bp, Homo sapiens
  misc_feature (1)...(902): n = a,t,c or g
gacgggtgccgtggttgggagctgttcagcgcactcctgacctcttctagacctatggctttcctgtcctgcattcagagctagaggccagctcggccttgcgagaagcatccaactttgagactttgcaggctgccaggtgctggttggggggcacagagcctggggctctggggaggtaatatgggggtctgggaaactccgtgaagagacatagccatgcggggcctgaatctcctgaactacagccagtttcctgagattagaacctgtgtgtatgcacatgtgaatgtatgtgtgagtgcacatgtgtgtaagtgcagtgtgcgtaaatgtgtgagtctgcgtgtgttagcatgcctgtatgtgagcgcgtgtgtgagcgcatgtgtgttgcaccagtgcacaagtgtatgaatgtggacacatttataagcacacctgtgtgtgtctgagtacatgtgcacacacgtgtgcacaaaatgtgcatttatatgagtgtgagtgcatgcatgtgcatgaacatgtgtgcacaagcatgtgtgtatgagtgttcatgtgtatgagtgtgtgtgtatgcaggtgagtgcatgtgtgtgtgagtgtgtttgtgtgttccccttggctgccaggccaacgactgcttctctgcatcctgctgtcttcgctacctgagggtctgtgacttcttccctgtgtgggtccagcctgaccccctgtaagtaaatgtccaaaagccccttgcccctcccctaggggcttaccaggggaacataactcttactggcattatgtttttagttgggaggaggaaggccnggggtttttaggggaaaggaaggagnccaaacttttggttgggccttttggtggccccctnttcaggttccccatgaacaagg

SEQ ID NO: 56528 - DNA, 414 bp, Homo sapiens
  misc_feature (1)...(414): n = a,t,c or g
atggcagtgaccaaggagctcttacagatggacctgtacgcgctgctaggcattgaggagaaggcagcggacaaagaggtaaagaaggcgtataggcagaaggccctctcctgccacccagacaaaaatccagataatcccagagcagctgaactcttccaccagctttctcaggccttggaggtgctgaccgatgctgcagccagggctgcatatgacaaggtcaggaaagccaagaagcaagcagcagagaggacccagaaacttgatgagaaaaggaagaaagtgaagcttgacctggaggcccgggagcggcaggcccaggcccaggagagtgaggaggaagaggagagccggagcaccaggacactatagcaagagatcgaacgcctgagagaanagggttcccggcag

SEQ ID NO: 56529 - DNA, 1063 bp, Homo sapiens
gctaaaaaatgctcatgtccagtttttgtgttgagtgaacaatgctgcagaccctaataagattgggtacagatcggcatgcgcctgtagtcccagctactcaggagaattgcttgaacctaggaggtggaggttgcagtgagccgagatcgtgccactgcactccagtctgggcaacagagcgagactccatctcagaaaaaaagaaaaaaagactgggtacagatgtgatattggaagaaaaagatcaagctgatgaggttaggatacccaggccctttggacttaaagatcactagtgtctaaattccatcgatggcatttcagtctataggtaaacttcctggaagctggatttggagacagtttatcatctgattattgggctttcgtataggtccttagggagcagcttacctgaaatgcatttagtgtacaccagtctgtaaacttcaacctgtaatgaaagtgtaataaatgtacattgagttgatgtgataatgtgatataataagaaatatatatttgatcttcctatctagttccttgttcagagctcctaaaacccttgtaatttccaaagtgatggagtacatcttttgttctagtatttggtctttgaccccagttcctgacacaaagctcctaaattcctttaaatttcccagtgataggagaattttttgttctaatgaggtcactcttgatgggcacctggataactcaggatgggggctgctcacaaagaccacatcatgattggaagtttcaaactttcagtctcccacctccagagaggggagaggggctggagatttgtgtcaataatccatcaggcctatgtcaacaagacataatccgttaactatggagttcagggagcttcagggttggcaaacattttgatgtgccaggaaggtgacgcactccagctttatgaagtcagcaagtcctgtgctcaggatgcttctggaccttgccccaggtaccccttcatgtggctgttgttcatctgtatcctttgtagtagccttaaaataaactgttaaacacaaaaaaaaaa

SEQ ID NO: 56530 - DNA, 147 bp, Homo sapiens
catctggcccatcctgttacttaacagagaaggtacctgaggctcaaaaaggatgactgacagtcctagtggcagaatggaggtgggatctggaacccacaacttgattcctaggactcttttttttttaattcccacattggctgg

SEQ ID NO: 56531 - DNA, 436 bp, Homo sapiens
taaaatttaagataaaatttaatagaaagatgcatgtctaagtaactgtatggatagcagaatgtgatatacattgtattagaagctttaaaaagtgcccttggaaaataacaaaaggtgccctgaaaaactgagaagagattaattttatcttaggaggcactgagaccatgatgaaacagctagattttgaaaaacggtgggatttggatagcaaatgtgcagagaaagaactataggacaggaaaagcaagccattcagtcttaggaaaagctgggcatgataggacagaagacatagggaacagagactctttgtgctgagaagggacttactagacttactctctaggcagcaggagcctgtcagtgtttttggttgaagtgagatgtgatctgatctacattctagagacaggtgatccagcaggattta

SEQ ID NO: 56532 - DNA, 401 bp, Homo sapiens
  misc_feature (1)...(401): n = a,t,c or g
gaaagcctaacataggtaatcattttcaagaaaagggtgcaggaagtcgatgtttaataaaggttgggaggtataaggggaggtgccaacttgcgtaactacacacacataaagacattttccatttggtgttggcgtgattcaaatggaaaattatttccttttcaccaagtggactttggagagagaggacaactctgaagtttctaaacaaggaaatgttcatggtcatttaacactttggggtaaagattttatatttcagctgtaaactctgccctgcccacgcgatctacccccacgtccctcaaacagtctgagctaccttttaggtagtttttaaaaactaactgcatataatttaaaaactaaaagtggncgggggcagtggctgacacctg

SEQ ID NO: 56533 - DNA, 364 bp, Homo sapiens
ttttatatttattccttcctttgttttcctctctgtaagacagctactactgagcactaattagtagaaagtcagagtggaggttatctgtgcatgtctttctgcaaacattactgttgaggccatctgaagagagggattgataggttaggctgttgcaccgtgaatgtcctgctttgcatttttaacctcagctccccaacatatatatcttgcagtttatatgccttttcatttaaccgaaacctcttttatttaatttttaacataacaacctacaattcttgtgtttttattatgctgtatttttctgtgtttcttattacatgtgattgctaaataaatcatatttgagggaaaaaaa

SEQ ID NO: 56534 - DNA, 405 bp, Homo sapiens
gtgaggcccggattgtgtgtgctcgaggccaggaagaggaagggagctgctgcacctgcttgggtgacaaacagtgatgaatagcacctcacagcaattaggatgactgtcatcaaagacacagaaaatagcaagtgtgagcgaggatgcagaaaccctcatgcacagctgctgggagtatgaaagggtgcaaccactgtggaaaacacgttggtagttccccaacaagtggaacaccatcaccatgtgacccagcaattccgccctgcgcatgtatccgaaatagctgaacacagactcaagcggatgtgcgtattcccacgtctatagcagcgttgttcccagtgaccaaatgtggaaacaggctgtgtctgttgatgggtgatagacaaacaaagtgtccgt

SEQ ID NO: 56535 - DNA, 439 bp, Homo sapiens
agcgcactgcgtggtcgcaccctacccgggctgccttggaagtcgtccccgccgcccctccgcaccggcatgaagctcatcgtgggcatcggaggcatgaccaacggcggcaagaccacgctgaccaacagcctgctcagagccctgcccaactgctgcgtgatccatcaggatgacttcttcaagccccaagaccaaatagcagttggggaagacggcttcaaacagtgggacgtgctggagtctctggacatggaggccatgctggacaccgtgcaggcctggctgagcagcccgcagaagtttgcccgtgcccacggggtcagcgtccagccagaggcctcggacacccacatcctcctcctggaaggcttcctgctctacagctacaagcccctggtggacttgtacagcccgccggtacttcctgaccgtcccg

SEQ ID NO: 56536 - DNA, 1198 bp, Homo sapiens
  misc_feature (1)...(1198): n = a,t,c or g
attttctgaacataataaataatatattaaaaatttgccttctgacaaactcagataatggaccagtcttaaatattgttatgtcataaagcaaagttaaggcattaatatgggctgcttaaatctgactagaagatgaaagcgtttattgtaagtgtaacacagagatactatcaggagtgaaatcagtccatttggcaaggtaaaatactgatttagagttttattctttatttcttttttgttgtgtttctttcagctatggtttcattttggttgtacagtatataaaccatatttgttttctgtacacaagactctcaagtgaattttgcatgcattatacattaggacacatttataaattaatgagtaactatataaatttatgtgtattaaaacgtctgtagcttcaatctaaaatctactgctctttctgaatctcccagatatcatttctgtatggtttctgactggcctgctgcctgagtttcagaaaacaagggaggcattatttttatgggaggaggaactaagatggtactgaggatgtctgactgaaacactaccctaggaagctgtcttgtaggaaaatagaataaaacacacagaccagaagaaattgtcaagaatcaaacagccatccaaaaacagtcatgagaaatctaaagacctaaataatcttaggtatatgctctcagtgagaaataagaaaatgtgtccttaagcaannnnnnnnnnnnnnnnnnnnnnnnnnnnnnnnnnnnnnaagtgagcatgatccaggaatatagtaaaccttgtgagttgtgacctaggtgaaggtataatggataacatctggaggaagcatccatttgttcagcctaccctaggggtttactttcagacttttccctacagtttaaagcacttgcgttcagtgtggtacgatctgtttgtaatgttaatcattgactattgttctgctacttggatgttgatagtgaagcagagaacaatttatcatcgtttattatgagtcactatgcacgcaactatgcttaacatggcgaaatgtattaaacactcgtccaactatttatgaaatactttgcataatttaatttgcttttgtacagttttatgtaaataaattgcttgtcatttttgtctctgcaaattaaaatataacatggtcaaatggtaaaaaaaaaaa

SEQ ID NO: 56537 - DNA, 1023 bp, Homo sapiens
ttttttttaattttctccccaaaatagccacattcttttatttgatgattcaatacatttttgattcaaatagtcaccacataacctaggcacgatattaagcattttacaagcaaaatattttactgattttcttttaaattgccagagtacaataagtgaactggttaagagacatacttctgtacataaaaatatccatgtatttatacaagtgtatggaacagagtttaagataataaaaccacaacatcacaataaataggatgtgttcctactgcacagcacagcacgctttatcaggaagctgccaagtctttttcaaggtgctttatgtttttctgagctaggctcagatttccccaaaaaaggaataggttagtaatggctggatctgaatgtctactttcataagttgctttttattttcatctccaataacaggaatggaagatatgataatttaattattttcaaaaagtctttgcaacttaccaattctattccaattcagttttttaaaatgcagattaatctaactctagcaccatacgagaatgaaatacatgtatttttgtcagagcaacaatattttatatcatctttgttcctctggctataacaattgtgtttagaaaaatttaccaagctaaaaatagttgatctaagttgtcataaaaaagaatattaaatacctttggtaaaaatagatatatttaacaagattagaaaagccaacagttataatgtcaaaaggagaatataaaaatgtacacaatgaaacaaataaactgacttatcgataaagtgaagataaggccactcttcttttcaggtttatctcttccaaaccatgaatgtagttctcttcttctaaatggcagaaattttaataagaaatatgaaaaatccagtctgtcctatcagcacgacacaagtttaattcatagcaacatagttcctttttaaaaaccaggtttgtagtacatagaatgttctggtttacatatgtgaatatgagca

SEQ ID NO: 56538 - DNA, 400 bp, Homo sapiens
cactgaggaagatggggaccagcaggacagacacgtcagcaaactcatcttctgcttctttgtcttcggcgccgtcttgttgtgtgtgggagtcctgctctccatctttgggttccaggcatgccaatataagcccctcccagactgccccatggtgctcaaggtggcggggcctgcatgtgccgtggttgggcttggggctgtgatcctggcccgctcccgggcgcaacttcagctccgtgcagggctgcagagaggtcagcagatggaccccgaccgagccttcatctgtggagagagccgcagtttgcccagtgccttatctttgggtttctgttcttgacaaagcggcatgctcatcaacgtcctgggcatttgggtccctggatgtggctccaac

SEQ ID NO: 56539 - DNA, 707 bp, Homo sapiens
cactcgttaaatcatttatcaaaagtcattttattgacaaaatagaatacttatatctgttcttacaggggtaagcctctaaactttttacaaaaaaatgtacacactatatctttggatatatacatattttacactttttttttttacaatttaacaaataattatataaatacatcctctaatgtaagaaacccgtatttacgtggggtgtataattaagacatttcttgtttgtttacttaaggcatttgcctggtcattaagaatacccaaaccgtgcaatcccatcaggtggcggtcacccctcctccagggtaagtcaggggtgggagtttacgtaggaagagtcgagggagaaaaagaggttctcccaggtgaaatctgtgtatctgactgcaaacccagccaagtgcagccagggagggctccaaatctcgggttctggaaacgccgcagagtccaccctcctcagccaacagaaattaacgcgtggcgggaggagctccccgcacatcaatggaggaaaaggggctgggtctgggaggcttcaatgccaggtactttgttctaagtgagtcatttaagtcccagctaatggataccattaagagttcattatcatgctaatagcaatcaacactgtgaaggggtgggaacctcagcccatcaagtgtcccttcgctgcacttgggcggacgcgtggg

SEQ ID NO: 56540 - DNA, 394 bp, Homo sapiens; identical to SEQ ID NO: 43930

SEQ ID NO: 56541 - DNA, 370 bp, Homo sapiens
gattgggtgattatctgaatgggtctagtgcatacttactaaatattagacttaatgtgtaattatatacttgaaaggaaaaataacatacttattaagactgataaataatacattcatattgtaaaattatggtaagatcataatctcagttctttcagatgaagaattgaaaaagatctagtgaattagataaaattattaaggtaaatatgcttgaaattgagagaacaagctaaagtctatcttttgagtgtaagtaaaatcgatgtgttaccacaggcaacttactgaaccatgtaattagtttttttctatgaaaaatgagacatactgagattgtgttaaagtagcatgtaaagggcttatg

SEQ ID NO: 56542 - DNA, 438 bp, Homo sapiens
ggcgtccgtgaggggctcctttgggcaggggtagtgtttggtgtccctgtcttgcgtgatattgacaaactgaagctttcctgcaccactggacttaaggaagagtgtactcgtaggcggacagctttagtggccggccggccgctctcatcccccgtaaggagcagagtcctttgtactgaccaagatgagcaacatctacatccaggagcctcccacgaatgggaaggttttattgaaaactacagctggagatattgacatagagttgtggtccaaagaagctcctaaagcttgcagaaattttatccaactttgtttggaagcttattatgacaataccatttttcatagagttgtgcctggtttcataagtccaaggcggagatcctactggcacagggagtggtggagaagtctatctatggagccccattc

SEQ ID NO: 56543 - DNA, 651 bp, Homo sapiens
caatatttgaaaatttccagtgagaattaaaaaaggactagtgatgatatagcaaacctggacctgaaatttgggggtggggggtggggggatatctgttttgcagagaaaatttaccagcctccagcaaaatctctgcatcttgtactcaatagcaaccattagtattgtcatttaaaaagaatgaatcaaaaattcatacgtaatggaatgaaaagaggaaaactttctattaaacactgtcaagaaagacccattgctatctatcacctatgaaattaaacctaaaaaaatttttttttattgtaaaagcgactgctcgttgatgtctggaagtgatccagactttgtttcactgtgatccaaaaagttagacattccttccatttctcaagatttggtaacaatttttttttaagtcagcatttcatataatacataaaattaagacaaattaacttactgatatgtggccaatatcaacccttctcacccaacccaaacatgttctggagatagaaggacttatcctcaattatattccagtaaatttatctccataatctgttttatcccctaatgtatgatatatctcaccaaatttttctaggaattgaataaaagcagtttttgcttaacttgaatttcctt

SEQ ID NO: 56544 - DNA, 294 bp, Homo sapiens
atttgcaagtagttctatgaaaaatggttaaaatagaaaatgtgcttaataatattagctacttttcagtaagcactttcaatataccagactccttattcatcttatatctaattcttccaacagtgttttaaaattaatgaaagaaacagaggcccagagaaggtcaggaacatgccataaagcctgaagccagtaaacaagggagctgaggtttgaaataagattctatgttagaggatccctcagttaatgcaggggaattcaaccagaacttatgtccaagtagagtta

SEQ ID NO: 56545 - DNA, 125 bp, Homo sapiens
tttatgaagtaaaaaggttacagtgagctcaggttactttattactgaagaaagagtatgttatgaatggagtgtagcccacatgtccagcgctcactcgtctacaggagtgcacagccatgcct

SEQ ID NO: 56546 - DNA, 391 bp, Homo sapiens
gctgatatccatccagatttccatgtagccttcaccccctcaaagattagctttccttcgtgtggtggcagttcacggagcacctttgggagtatccctcagtacctgacgaggagcccactgcctgggacaccagacttgctcccccggaaccgggagccctccaaggggctgtggcatggcgccctgacgccccagcttggacccgttgcctgcctttgccctggactcctgagtgtagagctcagcccaggagccagtatgggtcgtgaacaggacctgatcctcgccgtcaagaatggagatgtgaccggtgtgcagaaactggtggcgaaggtcaaggccacaaagacaaagctcctgggctccacaaagaggctcaacgtgaact

SEQ ID NO: 56547 - DNA, 459 bp, Homo sapiens
  misc_feature (1)...(459): n = a,t,c or g
ctgccctgctgttgaaacagaatcctatttggaaggcagacatgtggcccatctctgtagccatcactgagaaatctggattttcaagggcctttctctctgttgcccgggctggagtttagcgactcaatcatggctcactgnnnnnnnnnnnnnnnnnnnnnnnnnnnnnnnnnnnnnnnnnnnnnnnnnnnnnnnnnnnnnnnnnnnnnnnnatgttttgcgtattattaaagatgaagacttcaaaatactggagcaaagacaagtagtattatcggaaaaagaagcacaagcactgtgcaaggaatatgaaaatgaagactattttaataaacttatagaaaacatgaccagtggtccatctctagcccttgttttattgagagacaatggcttgcaatactggaaacaattactgggaccaagaactgttgaagaagccattgaatattttcc

SEQ ID NO: 56548 - DNA, 228 bp, Homo sapiens
ctcaccactttttaagtaagcaaacagcagtatttcccagaggcaagaggttcagcaagaagtcaggaaatgtttttgtagataagcatctatcattctgatgggccatgactagtgtgttcacttgtaattcctttgcctttaaaaaaagagaatgatatcaaaaaataagtgccttatactgtgaaaaacgataaaaggacttcctgattctaaaaaaaaaaaaaa

SEQ ID NO: 56549 - DNA, 933 bp, Homo sapiens
tttttttttttactgtgcgtattaataaatattctttattttaaattttgcacattgcgctttaacattacatccaaacattttgcaagtggatgtctactttgtaaaaccatatattcagctcattgtcatttctgtacagaattataagtacaacattactttttgccactaagttgctttagtaagtctcacaggaagagaaacatttaatgaaaagagatggcttaaatcatatggcaggcctgcgcagccacgcaactaaagacacaagcctgaagaaagaactaatgaggatacctccaccgtctcccaaaacaagaaagaatcacattgatttaagataaaattttgccataagtcactaaattaagagtttttcgaaagagaaggcgcagtagtcatcgtgagtgtttcattgaaagacagagctattttatttatttaatttgctccagccgttgtcaaccagccactacaaatgggcctcttgtgatcatttaaccggcagtatttattaaatttctccttcagatgctgtcggtattgttctctattgctgtagaaagactggttattagccataaatgactgtatttcatcttgtgagataaagatttcctcatctgaagtacattcagactcatcctgcaaattaaagcagtagttaagactatgacttaagaatgcaaaatgttatgtaatggaggaggacagctaaaaattaaaccagtctaactttttagtttcacatcagtcacataaagcctttaattggagtgtttgcagaataagcatcatgtcattctgcctaagaaagtagtgagaataaaatccaactccttgagttgaaaccttgaatctataatttctcctagaagcctatgagcctagcaaactaccaccataccttggccttgaaaaaataactaa

SEQ ID NO: 56550 - DNA, 440 bp, Homo sapiens
  misc_feature (1)...(440): n = a,t,c or g
ccgtcaggttcagctgcaccaatggccggttccatgcccggcatgccctctcctccagtgctggtgaatgctgatcagagcgtggttgttcaggcctcctcctctgcagcagacacaaaccaggtgctcaaacaggccaagcagtggaagacctgccctgtctgcaacgagctctttccgtccaacgtctaccaggtccacatggaggtagcgcataagcacagcgagtccaagtctggtgagaaacttgagcctgaaaaactggcagccgtgtgcaccatttctaaagtggatgaaaaaaaaaacggtgcgatgtctgtcttgtaagtgcttggtctctgaggaagagcttatacaccacttgctgatgcatggcttggggtgcttgtctgtcatgccctttcatgatatcaaatgnctttcaaacacaacaagaatag

SEQ ID NO: 56551 - DNA, 296 bp, Homo sapiens
agactgtgaaactactggaagaaaacataggggaaacacttgaggacattggtctaggcaaagattttatagctaagatatcaaaagagtaggcaacaacaacaacaaaaaacagacaaatgggactatattaaactaaaaagcttctgcacagcaacgaaaacaacagaatgaagagacaacctgttgaatgggagcaaatattcacaaactgtttattggacaagagattgatattcagaatatataagaaatgcaaacaactcaacacctccccacaccaaaaaaaaaaaaaa

SEQ ID NO: 56552 - DNA, 401 bp, Homo sapiens; identical to SEQ ID NO: 42091

SEQ ID NO: 56553 - DNA, 922 bp, Homo sapiens
agaggcacctgcagccctccttcctcagcaggaaatcaatgtggagccccagaggacattttatctcagagagagcatgctggccacaggacccagtgcagccctgcttcctgcaccgtgggtctttcctgatagctgcaggcttgagattgcagcctcaggataggacacgttcagatgccttccagactacacacactatgcttagattcgagagtctttcctgaccttaaaatttgtcccttgcttactttcacactgcagaagatttatatatatattcatcattatttttggcagcagtacaagtggaaacttcaaaaaaatcattccctttcatgtcctggtctttttaagtcttgatatgtaacccattttcataaatatccaaacagagattgtcattccccttaaaaacagaaacaaaacacaaaactagtgcttgtgaaaacacacagcgcaaagacaattatcctattgcattaaaaaaaaaaatcagtctgcctagagacatttcattggctgcattgtcttaattccctaacgaaactgcatcaaaatgtcagttgtaatttagcctctgatcagctgttaaatattatttaaatatttacaggtcctgtggggtatctcccattacccatgtcgccctcaaattacataagcgatcataaaataagaagaaaaaaaaaggtctttagtagatcacagcagagttaccactgataagagtgttggctttgttcagttgtttctaaattaccagccgtcaagcacagtagcccctaaaaccaattttgagcaaggataaattcaactccctcatctgagaaccttgactttccagttgccttgaagtattgggaatagtaactgtacattttcaatttaattatttggtattttatttgactgcttggcc

SEQ ID NO: 56554 - DNA, 359 bp, Homo sapiens
ggaaagaataggcactgtttgcactcttcggtgatgacgtttaatcttttaatctccccttattcttccccatgggaagacaaaaatgggaagattcagataattatttgtagggttggacattgagtgggtctgcgaacctaatacgttccagaatcctaatgttgtaggaattctcagttaccaaccttggtactgaaataaataaagtaggagggaggtggagaatcacaggtcaagcatgaataaggccacatctggcagaactgggacatatcttcaatacaacagtgataatagtaacactatccacatgtttatctaagtgacaaattattaagtagttacatttacattcc

SEQ ID NO: 56555 - DNA, 264 bp, Homo sapiens
gtttataatactgctatttttgattcccttgcctaagaaaaattatgtatgaataaaaatttaatttgaactgatatcacttcccttaccattcacatgttaactaattgataagataaaaatgtgttgtagtagaatagactagatcgtatgcctttttagatgaaaattatagaagatatttagtcatagtaactacaaaggcaaaataaatatcacagcaaaaccagtaataggaatgcttgcagactttttttttttttt

SEQ ID NO: 56556 - DNA, 403 bp, Homo sapiens
gaggaagctgatgaagcaggtacaagagcaatgccccaacatcacccgcatctacagcattgggaagagctaccagggcctgaagctgtatgtgatggaaatgtcggacaagcctggggagcatgagctgggggagcctgaggtgcgctacgtggctggcatgcatgggaacgaggccctggggcgggagttgcttctgctcctgatgcagttcctgtgccatgagttcctgcgagggaacccacgggtgacccggctgctctctgagatgcgcattcacctgctgccctccatgaaccctgatggctatgagatcgcctaccaccggggttcaaagctggtgggctgggccgagggccgctggaacaaccagagcatcgatcttaaccataattttgctgac

SEQ ID NO: 56557 - DNA, 261 bp, Homo sapiens
aaagactttcacagagactttcttcatgagattgaaacagtctgagggaaaaggccataccaatgctggagatgcaatatatgaggtggtgagtctacagcgagagtctgacaaggaggaaccagtcactcctactagtggagggggtccaatgtcaccccaggatgatgaagcagaagaggagagtgataatgaactctcaagtggaacaggtgatgtgtctaaagattggtcctgagaagatcctgtattcttggggag

SEQ ID NO: 56558 - DNA, 948 bp, Homo sapiens
ccaggaccccccccaggaggcggacgctaagcggcagcggcagtggcagtggtagcagctatagtggttccagctcccgatccaggtccctgagcgtgagcagcgtctcctcagtgtccagtgctacgtcgagcagcagctctgcacacagcgtggactcggaggacatgtacgcagacctggctagccccgtgtcctcagccagctctcggtccccggccccagcccagaccaggaaggagaaaggaaaatctaagaaagaagacggtgttaaagaggaaaagcggaaaagggattcgtccacacaaccacccaaatctgcaaaacctccagcaggggggaagtcctcccagcagccctcgacaccccagcaggcaccccccgggcagccccagcagggcacatttgtggcccacaaggagatcaagttgacactgttgaataaggcggctgataaaggaagcaggaagcgctatgaaccatcagacaaggacaggcagagccctcctccagccaagcggcccaacacatccccagaccgaggttctcgggaccggaagtcaggtgggagactgggctccccgaagccagagcggcagagaggccagaactccaaagcccctgcagccccggctgacaggaagcgccagctgtcaccccagtccaagagctccagcaaggtcacgagcgtgcccggcaaagcttcggatcccggcgccgccagcaccaaatcagggaaggccagcacgctgtctcggcgggagggagctgctgaaacagcttgaaggccgtggaggatggctattgcacgcaagcgggccaagatccccgggaaagcataggccgtgccccgaccggactggacgcatttttatacatagggtaagcgcagccattttggattttgcagttaatgtcttattttggctgtgattctttttaaaaaag

SEQ ID NO: 56559 - DNA, 366 bp, Homo sapiens
cttccttaggaatggagtggagaaagatctttagacaactggatgactgtagatcaacctgcaactgatgatgggcatgaaacagttatttgttaaacctagactgcatgagtgttaagggagagagcatggcatagccatgtgcttagacattgtagattatggttgtaactgttatgcagttctgttaatctcatccatccattttgtattttcatttctagagattccatttgagtcctttttatatcttctgtttcactccttataacattcatgctttccttctattagtatagggagaatttctgtaagagagcttttaatgtccttgtctgtgaattctgtaatctctgatcacttcta

SEQ ID NO: 56560 - DNA, 356 bp, Homo sapiens
gggtacactggtacctacacgctgtcactcaggcagagggtgaagacacactttcgtggacaagagcacacaggcgaatacattcacacaggtgcgcgcgcacacacacacacacacacacacacacacatgtagtcacaggctagaccgggccacggagcagaggctggattgcccctcagcccgaagttctccacctggccttggcatggagtagggttgtgcgctgaggtctctcccaaggctgtgtgctgggagtcactcttgagcctagctggagggttgcaggagctctagggtgttggatgggggatcccaagatccacagaggtcctggcagagctgggggccatggg

SEQ ID NO: 56561 - DNA, 326 bp, Homo sapiens
gggttcacgccgttctcctgcctcagcctcctgaatagctgggaccacaggcacccaccaccacgcccggctaattttttatatttttagtagagaaggggtttcaccgggttagccaggatgatctcgatctcctgacctcgtgatccacccgcctcggcctcccaaagtgctgggattacaggcgtaagccacggcgcccggctcaaagggactctttattgagcacaaactttggccataaagcctatcctctgtttgggctgtcctttcatatgcttaaaataaccctttgacccacaactctgcaactgtcttctgtgttt

SEQ ID NO: 56562 - DNA, 2284 bp, Homo sapiens
  misc_feature (1)...(2284): n = a,t,c or g
ggaagcgatagcgttttgcccgcattcggggcgcgcggagctggggggtccctgtggggctcccggagttaagatggcgtcctcagcggagggggacgaggggactgtggtggcgctggcgggggttctgcagtcgggtttccaggagctgagccttaacaagttggcgacgtccctgggcgcgtcagaacaggcgctgcggctgatcatctccatcttcctgggttacccctttgctttgttttatcggcattaccttttctacaaggagacctacctcatccacctcttccatacctttacaggcctctcaattgcttattttaactttggaaaccagctctaccactccctgctgtgtattgtgcttcagttcctcatccttcgactaatgggccgcaccatcactgccgtcctcactaccttttgcttccagatggcctaccttctggctggatactattacactgccaccggcaactacgatatcaagtggacaatgccacattgtgttctgactttgaagctgattggtttggctgttgactactttgacggagggaaagatcagaattccttgtcctctgagcaacagaaatatgccatacgtggtgttccttccctgctggaagttgctggtttctcctacttctatggggccttcttggtagggccccagttctcaatgaatcactacatgaagctggtgcagggagagctgattgacataccaggaaagataccaaacagcatcattcctgctctcaagcgcctgagtctgggccttttctacctagtgggctacacactgctcagcccccacatcacagaagactatctcctcactgaagactatgacaaccaccccttctggttccgctgcatgtacatgctgatctggggcaagtttgtgctgtacaaatatgtcacctgttggctggtcacagaaggagtatgcattttgacgggcctgggcttcaatggctttgaagaaaagggcaaggcaaagtgggatgcctgtgccaacatgaaggtgtggctctttgaaacaaacccccgcttcactggcaccattgcctcattcaacatcaacaccaacgcctgggtggcccgctacatcttcaaacgactcaagttccttggaaataaagaactctctcagggtctctcgttgctattcctggccctctggcacggcctgcactcaggatacctggtctgcttccagatggaattcctcattgttattgtggaaagacaggctgccaggctcattcaagagagccccaccctgagcaagctggccgccattactgtcctccagcccttctactatttggtgcaacagaccatccactggctcttcatgggttactccatgactgccttctgcctcttcacgtgggacaaatggcttaaggtgtataaatccatctatttccttggccacatcttcttcctgagcctactattcatattgccttatattcacaaaggcaatggtgccaaggaaagagaagttaaagaagatggaataatccatttccctggtggcctgtgcgggactggtgcagaaactactcgtctcccttttcacagcactcctttgccccagagcagagaatggaaaagccagggaggtggaagatcgatgcttccagctgtgcctctgctgccagccaagtcttcatttggggccaaaggggaaacttttttttggagaaggcgtcttgctttgtcacccacgctggaaatgcagtggcggggatctcaagctcacccgcaacctcccacctccctggggttcaaagtgattttccctgcctcagcctccccaaagtagctgggaaatacgggcaggccaaccatgcccagctaaattttgtattttcaagtagaaacgggatttcacccaacgttggccccaggctggtctcgaaactccctgacccgnaaagtgatcccacccngctccgccctcnnnnnnnnnnnnnnnnnnnnnnnnnnnnnnnaccgtgcccggccccaaaggggaaactcttgtgggaggagcagaggggctcacatctcccctctgattcccccatgcacattgccttatctctccccatctagccaggaatctattgtgtttttcttctgccaatttactatgattgtgtatgtgccgctaccaccaccccccccatgggggggtggagaggggtgcaaggccctgcctgctccactttttctaccttggaactgtattagataaaatcacttctgtttgttcagtttttca

SEQ ID NO: 56563 - DNA, 339 bp, Homo sapiens
gaattggagctgtccaggccaggacaccccgatgtccaggggcttccatacgaacaggcacatgggctgggaagtacatgaggcccctgggtagaagggtctgtcagttctctcctcccttgccctctgggagggtcctcctaacatagcttccaggaggtgggaggagcagttactgtcagcaggtgtcagccaggtgtcagcttctcctggggatctctagatgtctgcttgtgatttttggcaagtatatgcaaatgagcctcctctcctgccctgagacaagtatctgcagtgtgaacctggcagcctcagacccaaggggctcagaggaaactt

SEQ ID NO: 56564 - DNA, 361 bp, Homo sapiens
  misc_feature (1)...(361): n = a,t,c or g
tgtcaatctctctcattctacctcctggtaaggagctactaccaaatactaaagctactttttcttactcgttcgtagtactgtcgagaatcagcttatcttcaccctcttagactatatgtgaaaaggcacaataggaagtttgggcacattagagacaaatgtgctatactttacggcttagcctgcgcccggttcttatttatcgtcaactgtggacaaaatgattttgtttcatgagacaaagggggaccaccaacttctacggtaatgtctgccttttgctagatagactggctattacataaccatatgtagnttatttttaaggagaattacntattnntcttacatgcctgta

SEQ ID NO: 56565 - DNA, 404 bp, Homo sapiens
gtttgtgaaggagaatgtctggtttcccatgattcttgaaaaaatataaggtataccagcaggaaccatctggaagttgcttggaattgaattgtgatggggcctgtttctatacattatcaatgaagtgatataccaagtaacctgtatagaacctaaggaaaatacttgcttattttctaggaaatatgtgcaatctgtagttttaacagaacccttcttctccgggcatatcaatgtattcacaagttatatatagttaacttcttcattaaaatgcagccagatcttgggtgactgtgagaatagctgtaaaaatatctaggccacccattcttagaatcaaatgttaccttactgagaaaacaaatagtttttaatgattatagcatatcttaataaat

SEQ ID NO: 56566 - DNA, 372 bp, Homo sapiens
gctgactgggtgctaggggctgattacaaaggggaagagttgaacagacatcaggggccgatgaaaccaaaggactaggagtcaggagaacaagtcagggattaggagacagcggtttggtttattgttatccagctggaggactcctaggggcagcagcaggaggaataccagggccacggaggggccaggagtctcacagtggagggcagactctaacagatgccagctgaacgctcgctggccctggatgtcatacgagttggggaccagaaatctgggctcagagaacccgtccagggagatttgaagccatgggttatcttctagagttgatactgataatatattttaatttttattgatgttaat

SEQ ID NO: 56567 - DNA, 414 bp, Homo sapiens
ctgcattgggccgactgccattcccatgactgctgcacctgcgtttttagagaatgcctcataacccactgattctcattcacagagaatgggagaacggaatgaagaaagattccagcagcttatagaaggatagcaatattttgggacagggaaaatcctgtcatacctcatctcttcctcaggaggagttctgagctggtcctgcttttcatagttgtttcttttcttccacttaagaactcatagatttttcttactgtcctaaggaagtccttacctctgaggtatctcctcaatgaatactgttttcaaggctgaaatagttcattatgttaataaccttctttatgttctcagggaaatgcttaggtggtgtcacaaaatgtgccttttcttttcttttcttttttt

SEQ ID NO: 56568 - DNA, 640 bp, Homo sapiens
tgcagtgcctaaatatcatttaaacagtaaatattaataggaaatattgctatatctgaatatataatacaaaagtttgatcatggtgacacaaatgttggacatttttttccttataaaaggctctttttttatatattgtacaatatatttggagattcagagcatagtgactatagtcgaaaactgagattgcacttccaaaattggccacaagtaaataatcttatgaagggattctttatcatgtttcaaacaagtgggttacaagcagactttgagacacttttccacagaaacaatactatgaattggtgattgagttcccaggccaagcctccctcaacaggttcaactctaatatacctaacctgtgatactgaaggtgcctgcctgagttttgggtctctgagacagggtagtgtgagtagtttggaggaaggacagtgcaactttccaccccttttcctaagaacaatgtctttctccttttaatttttccactcattttcacctcctaatgcccttgagatccaggtacactcctgggagttttgttcacctctcccaactgagaaccttcccactgggctccatcctccctcctgaggttcttcatattccagagtcacccaccctt

SEQ ID NO: 56569 - DNA, 414 bp, Homo sapiens
ggctctgcagccacaaccatgtttggccggaagcgcagtgtctcctttgggggcttcggatggatcgacaagaccatgctggcaagtctgaaggtcaagaagcaggagctggccaacagctcggatgcgaccctcccagaccggccgctctcccctcctctcacggcacctcccaccatgaagtcgtcggagttctttgagatgctggagaaaatgcaggacgactatatcccataccccagcatcgacgaggttgtggagaagggaggcccgtaccctcaggtcatcctgccacagtttgggggctattggatcgaggacccggagaacgtgggcaccccaacatcgctggggagcagcatctgtgaggaggaggaagaggacaacctcagcccaacacatttggctacaaag

SEQ ID NO: 56570 - DNA, 301 bp, Homo sapiens
  misc_feature (1)...(301): n = a,t,c or g
tctcgaggatccgaattcgcggccgcgtcgaccctggatcggcaccggcacagagggtcagagtgttggcacctgtcttccggatctgttcacccgtcccctggaccggctccgccacagagggtcagagtgttggcacctgtcttccggatctgttcacccctcgcctggaccggcaccggcacagagggtcagagtgttggcacctgtcttccgggtctgttcacccgttccctggactggcnccagcacanagggtctnagtgttggcacctgtcttctgggctcatccctccctttg

SEQ ID NO: 56571 - DNA, 251 bp, Homo sapiens
  misc_feature (1)...(251): n = a,t,c or g
taatgctgtaaggaagcagtttaaaaattttttttagctgtggaatttgttcttacaacaaactcttgtagcagctcaatatattaaaaataaataaataaacaaaaagattaaagcgactgaagtggatctgagagaaatccacatctcttttctcacttccaaacagcacacttctccctactcctaacctcatgacagcnnnnnnnnnnnnnnnnnnnnnnnnnnnnnnnnntnaaaaaaaaaaaaaa

SEQ ID NO: 56572 - DNA, 603 bp, Homo sapiens
ttttcaaactccaggtgtaactttattccaccttctccaacttcagagttccaaccttagaggatagagcattatgtggaaggagggtgaggacttgatatgaaaaaagtgatgacatacccctggttcatttctgggtttcctcctaggccaattcaaaacttccaaaataaggtcaagtaacacaataggctcacacttgcatcacaagctgtttagaaagtgtgcacagatctctgactcagaccagatgtcctccccaccatgggcaagggctggtgggaaagacactcccagccttcgccttcatccaatactaataaataacctacagaaagagcagcgctggaggctggcccttgagccacccactgctaccgttgcggagccaggcctgcctcatagccctctgtcttcatgtcattgagccctagctcctcattttggtcaaaggtgcgcttgtaacgctccaccttcatctcaggatcatcttcaggcgcatacacattctgcaagtaactgtttcctgctggatcatccataataaagtggccttcatgttaccttcggtgatctggtccaacttctggctaaactcctgag

SEQ ID NO: 56573 - DNA, 807 bp, Homo sapiens
gtggatttactaggaaggtgggacgttggaggggtggccgcatggagtgagtactgtctctggccaccgagcagagccaagtgacagcagcgtcctggtaggcaggcaggcgtatcaggtttcagaggatgcggctgggaacgggagtagaggtgaggggtcgttgcatctgtcgcggtgtgtatcttttgggggttcagcgccaccagcgacttgggcctcattcatcgcgcttacatttctccacctcatttgaagaacgagcttcgtagcccacggagctgaggtatatgagctccctgaaagcacaaagcagttatttccatcttcagatcattcagagattatgaaggcacaaaccctgccttcaatttgcttatagtcaagtggagcagacacaagtcaatgattgcagtatagccactgaagtaatctaaaagaggtggggaggccacagcttatgtgaatgactttctcaggagttataaagtgatacagacttatcagcaggttgcaggtgaacatggccttgaggtaaatctgtcccttgctgaatacagtttcagtagattgtttatagtagtttcaggaattgagattttttacaaaaatacaaaagttttgcttggttctgttctagatgttttcttctaaataaatgagaaagatgtttcaacaaaggctctttatgctgaataattgtgatgcttgaagttgctaatctgctttaagtggattttaaatgtcaggcaattctagacagttttttcttggtcaaataaaaatttaattaaaacttaaaaaaaa

SEQ ID NO: 56574 - DNA, 329 bp, Homo sapiens
ctcaggaaaccatgtccaaaaccctagcagcggtacagcatgctgtctccaacccttatccccaggtttaagggtggtttatggccatacgtggaggttttttgttgttgtttttgagactgagtttcactcttgttgcccaggctggagtgcaatggcaccatctcggctcactgcaacctccacctcctggttcaagcgattctcaggcctcagcttcccaagtagttgggattacaggcgcctgccaccacacctggctaattttgtatttttagtagagatggggtttctccatgttggtcaggctggctcaaactcccgacctc

SEQ ID NO: 56575 - DNA, 340 bp, Homo sapiens
gaagatataaataattcacagaaaaaatgttaataaacaagatatgtgaaatatactcaaggttttaggtaaatgcaaattagaacagcacttttttggccacagaagcataaattaacaattttcatataaatcctattttgaaaccaactcgatagttgataaaaattctaaatccagaattctagttttcttaacttatcccaaagaattacttgcatctatgtgaaaagatttatatataataatgctcattatggcactgtttttattagcaaaaaacttaatgggttaaatatattacgatatatctatacggttttgtagagtagtcaaattc

SEQ ID NO: 56576 - DNA, 380 bp, Homo sapiens
gatagacatgtctcaattatatatgtgtgtgtatgtttttaaagctaaaaacattacttttagatccctagaatgaaaatttttttctcatctatgcaattcccatatggttttttttaaatcatattttattcattttctccctttagcaattttcattttatttctcataatttgaacagagacagttctcatacatgatcagatgctttttttttcttcttaccatcatttatgcatgacataggtaatgtgactaatttctccagttgattcaagaaactcattactttgcctcaaattatatgtaaaatatttgttttacttaggttacagttatcagaaaggtagtttttttcttctattaaaatataacattg

SEQ ID NO: 56577 - DNA, 613 bp, Homo sapiens
cagcggctttgcctgcacgaccagctgtctgtccaacaccggggcctggtcattgcctacaacctactggcagccgatgctgagctggccaagaagctggtggagagtgagctgctggagatcctgactgtggtgggcaaacaggagccagatgagaagaaggcagaagtggttcagacagcccgagaatgtctcatcaagtgcatggattatggtttcattaaaccagtgtcttagacagcgaccctcagggatgctgggagtggtcctgtactgtgcagagtcctgggttggttgggttctcctggagagtcaggtcatctagggatcatagcagtgacaatgaagtctcaatataaaggaaagacttgattgttctctgagttgtgagtcttctcctttgtcctgacagagtttggatgttcactctctctcttgcttcctgtctccttatatttgtcatgtttcagaaattcccagaataattttcacccatgattagaaataggttggatcattctttctgtacccattctgaaggccaggataataggttgaagttctttatattttggaaaatggattttgtggtaaggtaggaactaacgggtgt

SEQ ID NO: 56578 - DNA, 414 bp, Homo sapiens
tgtttgtttactctgaagtggtctatgttctgtttgtttgttttactatactttgcaaaaaaacagatggctggcttatgttcactgttgtagtgcactacctagtatcacttggccttcctgttgtcaagatgtaggaagcagcgtaagggatgtcgggccttcagacccccaattgccagctgtggtcctagttccagattgcatggaaatatttgataacattcctgcactgagttatcatggtctgaatatttatgtgacgctctacgagtggtaccaaaatgttagtgatggagtttttactaatggcaccttttcctgtttttaaattctagaatcttaataaatccaaagtgtacattttggtagtgatttcatttagttatttactttaaggactcccttttcaag

SEQ ID NO: 56579 - DNA, 391 bp, Homo sapiens; identical to SEQ ID NO: 37728

SEQ ID NO: 56580 - DNA, 332 bp, Homo sapiens
gccaaaaacattatgtatcaaacaaagattatcattggcttactccatatagagttttatttaatcagttaaaataaaacatggtcttcagagtatgatctttctctctttgctgggttttagggaatttggtgtgtaattttctgacatacagcatcacatccagtatatacagaatgagggtcttcttttaaggatgcttgtcatttaaaactgctcaagccggctgggcgtggtggctcacacctgtaatcctggcactttggcactttgggtagccgaggtgggtggatcatgaggtcaggagatcgagaccatcctggccaacatgg

SEQ ID NO: 56581 - DNA, 353 bp, Homo sapiens
  misc_feature (1)...(353): n = a,t,c or g
ggaacgtgtctctctccaagtctgtgacgctgactttccagcacgtgaagatgacccccagtaccaaaaaggtcttctgtgtctactggaagagcacaggggcaggggcagccagaggtccagggatggctgcttcctgatacacgtgaacaagagtcacaccatgtgtaattgncagtcacctgtccagcttcgctgtcctgatggccctgaccagccaggaggaggatcccgtgctgactgtcatcacctacgtggggctgagcgtctctctgctgtgcctcctcctggcggccctcacttttctcctgtgtaaagccatccataacaccagcaccttactgcatctgcag

SEQ ID NO: 56582 - DNA, 13659 bp, Homo sapiens
  misc_feature (1)...(13659): n = a,t,c or g
accacctcactcaagaacagtcagccagtgatgctgaggctcgagagacacattggggttaagcaagtgtttaaggggtaggttaggctttttaactcaatgaggtttgcttttctattttaaagaatactaaatgcttaacaataatcactaaagatttcaggggtgcaagttgtgcccctagtatcttattacattaagaaaacttgaggacgtgtataagctccgtatttaccttcagtgttaaatacactctcaagttcaacagagcccacaatgtttcagaggtgctatactgtggaagactgcattttgttctgcgaggctcattaaaaagcaccagttatcaggaaaattgatcagagaggctatgttagctgggttcacagaaaactatttaaaatctatgaatcctatgtgtgtgctgcaaaatatgtaatgtaatgagaggggaggaaaacttggataatgtactacaaatgcttccatgtttgagagattcaaaccacaatttgtgactggttaaacagttcctcgaggggggaaaaatcaagaccaaacagagataatatccccaaagcagcatttatttacccattgaattccaaaacatttattttagaagtctggcatttcataatcacccatcttgattgacatgggctgacacacatggcgctgtcaggatacacaaggacaatagccaaagagttacaaaaaataaatccatgattcttaaacaattgcaaccaaaaaaaaaaaaaaagttacaagtatcaaaactttcagatgcattgcattgaaaagaaggtttgtgcacgtcataatttaaagaggcaaaaccaaggagctactgaaacctcacgttaaacagtttattataaagctgatggaaaggagcaagttgtctctctgtatcagcttcccttaacagttttccattaattgaagaaagaggtgggaggggtgaattcatttttgcatgcacaagatgtactgcttaacgaaacactatcagcttgttttaaatggatcttttaaatatcaactgtagcctggttggctaattctttctaatcttccccattactttcgcctagatttcccatagatcaacaggcatagtaaaatgcctcatcagaacacacttctccacacaattcaaaaagggagctcctgtgggctcaaagcaaccatcagtccagcaatgcccatgatttatctgaaactgcttcccaagagacaggagtgcagatctgagtagctgtgctgccaatacagataggtttagcactagatatttagtgattgtggcaaggaagaatcggtgatgatgggggtggtgggtgaaggaagggcccaggggacctgaaggatcttcagttgccttctcctgcttcttcatcctgctggtcgctcgtccagagggtgaggttgtctcgcagcaactgcatgatcagcgtggagtccttataggaatcctcgtttagtgtgtccagctcagctatggcatcatcgaaggcttgtttggctaagaggcaggcttgctcaggtgcattctggatctcatagtagaacacggagaagttgagggccaggcccagccggatgggatgcgtgggttgcatctgctctttgctgatttcaaaggcttccttgtaggcagcttcagaagcttcgaccacactgtttttcttctccccagaagcgacctctgctaagtagcggtagtaatcacccttcattttcaggtaaaacaccttgctctcatactggaaatcattgcagttcttgatcaggaacttgtcaagcagagacaggacatcattgcaaactgtctccagctccttctcaatcttctcccggtaagctttaactttctccaatttcttttcgtttccatcagccatggttttctgctcaatgctgctaatgaccctccaggaagatcgcctggcaccaaccacattcttgtaggccacagagaggagatttcgatcttcattggagagaggttcattcagctctgtcacctgcaaaaccccaaaaagataaacattgaaagcaaaatctgaaaatcttggtaagaagccttcccttcaacataatcaacaatccttctcaagaacggaattacgaacaggtcagtcactctggagaataaaaaccacccatggataaaaccaatatagacatgaaccctatgtgaagaaagactatagtctaacagaagagataaatacttggcacccaaaacagaaaatcataggggcttgagaaattcataattcgggtctgataagatgttgctttcaccttggtagaggaatgggactaaggataattatgaaaaggttgtacagcagcagtacataatggtgaagaagaaaacctcgagcttcagccattctgcaaaagatactctgaacaggccgggcgcgatggcttatgcctgnntaatcccagcacttcaggaggccaagggcgggnncagatcatgaggnnnnnnnnnnnnnnnnnnnnnnnnnnnnnnnnnnnnnnnnnnnnnnnnnnnnnnnnnnnnnnnnnnnnnnnnnnnnnnnnnnnnnnnnnnnnnnnnnnnnnnnnnnnnnnnnnnnnnnnnnnnnnnnnnnnnnnnnnnnnnnnnnnnnnnnnnnnnnnnnnnnnnnnnnnnnnnnnnnnnnnnnnnnnnnnnnnnnnnnnnnnnnnnnnnnnnnnnnnnnnnnnnnnnnnnnnnnnnntactctgaacagtaagatcgtacggtccctttgtcaaatgttcaaagacaacagactggaagtgttccagactctgcttccagctttatactctggaaagaaccaaccactcctcaaatacacattaacagatggtggggcttcacagatcagatggaacatcacacagatccagtggccagagcttcgccctgtgtggctacacatggaaccctaactgatactcccagccctctcccaaaccaaaatgaagaacaattcataagtgacatgaaagtacccccagctcctagtgaaaggaagcacagctactcagcaggaagttgtactctgacctacctcacaggaaactctggtcatcaaggatggaagcatcaattattttaagtggaagagttaaatttcacaagctttaacttcccttagttctccatgatgccaactacaagtgaactagctatgcagttagtaggaagagcattattagactttgcagtnnnnnnnnnnnnnnnnnnnnnnnnnnnnnnnnnnnnnnnnnnnnnnnnnnnnnnnnnnnnnnnnnnnnnnnnnnnnnnnnnnnnnnnnnnnnnnnnnnnnnnnnnnnnnnnnnnnnnnnnnncattagggtgtgccctaagtgccaaccaccaggtgtccttataaggatagtgagattttgacacacacacaggaagatgccatgtgacagtggaggcaaagactggagtgacgcatctacagccaaggaacaccaagggttgccagaagccaccagaagctgggagagtgcctaggaaggattcttccctagagccttcagagggagcgtggcctgcctacaacctcactttcaaacttctagcgtccagaactatgagagaatacatttattattttaaactatccagtttgtcgtactaggttcagcaccccctaggaaactaacagagtttcctaacaagagttcctaacagagttgctaacagagttggtctgggcccaagcaaagaaaatgacttcctaaattgacccaggacatttcacaagcccttaaaagatggtgtgtcgtctaaagtagagggattccttaatatgacctactggtaaaggtctttaattttattaaatcagtctctgcttatccaaaaggtctttaatttcaataatgaaaaaaaagaaagcaaagcacttaggaaaccataaaacactaaacaaaaaaggtattacttaaaccaatctgtaaggacagaacctccagagggaaaaggccaagttcattggggaaagttatcaatagcatattcaaatagacacacttaaaatggattgagaagactgagcagtggagtatcagaaatcatgaacaatgatggtttatttggggaattagtggttcaaggacataagcagcaagtgtaatcattattacaggtaaaaatcagaaaacgtgccaagttctcacaaagtaaaacaagcaattgtctgagtcctccatacccccaagccccagacaaaataaaaataccagctcactcttaatttctccatttccctgtccccaggacccctactcttctgctacaaacccttaacacaggattaagtctctcctttgcctacccacttctttcttcagtgtggtctttggctaacagctatcctgaccattccccaggggtgctgcctccactctggtcaagccagggttctcattattcatcctcacatattcattagtagtctccatacctctcactgtgatctgccccagtctaccatgaatctacaatccatgctccccttaaatccagctaaacacctataaccccactagtttcctcctccagtaagtgcctttaaacacttacatacattttcttacggaaaatagagactttgtaaatatttaataacttagtctttttttgcccacatcagagggtcacatgtctatgttgtaacaaggtttgagggtggcacatctcacacctgcatgtcaaaacccaatcatcacacttatgaactacaaaaagatgagtaactacttagtcttttaacgaacaacacttctgaatcaaaattccatcccaaatattctgataaatttcagaatgcttgaatcctctagaatgacttgcgtttctagagcaatattcaataaaacaaagcataaggcaacaacagaatttggagagctcctttcatcttgtagtaattaaactaaggccatttggcattaaaatacaaataatatccataaggagtcacaatatacttcctcctgtgactaacaaagctgcttctgtgaaactggcaaagatacaccaaggtaacttcccagagtatatcatttaaagtgagtgcaaatctgaaatacatgtatgtataatacagaatgcttgcataacacaaaaggcggtataattattaaacccaagacatctgaagtttagtctgagctagctatgtgaccttaaacaaatcacaacctttttggacatccaaagtaaaataagcaggattagcccaaatgatctccaaggcctccttcagctccaatgttccatgatttcgtttttcctgtgcaccaataaaaggtgtggcagggcttcctactaatgtgaagtttgggtgtatctgtaagcatattctttctccatcaggaataagctgccaaaaaaggctactgggcagtatttatgatgacaccttcacaagaaaaatcatttactgggagtattagtgtttatgtaaaaatcatctggttgcctgccagtctgaatgaatcactatcagcattagctgagggtgactaacatatctcagcaagcaaatattgttcctaataccccagccagagcctaactaggaaataactggatacatttaaatacagtattttttaatactcctggggttataattcagttaacaaaaggaaacatgaaatgaagatggcttactacttgaccagataactaaagaaaactgagtttttcccagactggaaaattatagacccatgtaaaatcagacagtccattaaaacaaaaagatggatagccaatcttgatggatgatacttagcaccagttcccaacacttcaaataccgaaatacaggagccaggagaactaatgaaaagttcagtcataaactgtactgagaggcaaacaccgggtggcaatacagagtaatggatgctctccaggccccgaccatgctacctaagatcatctgcaaaatctaatgaaatcacatttgctgcatctccacaaatcaggaacatgaaggaacaacaagacagaattttacagacaggcctagacaatagttttcagcctctttccgctctaacaccaagattacaacagtcatttcctgcacacggcaccttccctcatggtagccacactaggcactgagtcttcaccgggccacaaaccaggggtttcgccacccctgctcacagcctctctgctttctaggtgtcctgcctgccttcccaccctctgtaatcctacttacacccttcctgaaggacaaccttaaactgatgggctcttcccatgcacaaaggccctcctctccatttcttttaaggattggacttccctgtcagccagttttactcacgtcctgaccaaacacgtttggctacacctagtccccaccccagggcactcacttcacacattttctctgctccaggactacccccaacattactaaatgtcaaaaatgacctggcctgctgatcattcacttatcttcctatgacactattcatttacccaaaaacccctaagggcctccacccactactcacaaggcaaaaaactatgtgtgtgagtaaaaatagatccactgccaaaaacagtacagggactatttaggaaaatttaaagttctcaatctgggaaacatccaacatcaaaagtaacactgagcaaacaaaaatgccacccccgagctgccaggccatagctgcctaagttaggggtaatgctacctcgactcgaatatgctgccatccttcacagctccacacatgctatgggctcatcctttatagctacccacacctacatgctatcaaccagcttggcttttgatatgagtaaatgattctcatgattaagtaaacataaccacatcataaaacctttaagcttctttggcagaagtgtgtgtgtacgtgtatgtgtgtgtgtctgtgtgagaaaagtcagtttgagggtttgaggggtgtcnnnnnnnnnnnnnnnnnnnnnnnnnnnnnnnnnnnnnnnnnnnnnnnnnnnnnnnnnnnnnnnnnnnnnnnnnnnnnnnnnnnnnnnnnnnnnnnnnnnnnnnnnnnnnnnnnnnnnnnnnnnnnnnnnnnnnnnnnnnnnnnnnnnnnnnnnnnnnnnnnnnnnnnnntgggannnnnnnnnnnnnnnnnnnnnnnnnnnnnnnnnnnnnnnnnnnnnnnnnnnnnnnnnnnnnnnnnnnnnnnnnnnnnnnnnnnnnnnnnnnnnnnnnnnnnnnnnnnnnnnnctagagggatgaaagcttgctgagctctttcccaagttaatgcttaggaagtgaggatcttgcctggcctgccccaagctggaaagatatccaccaacagaccaagtcctacaggccactgggcaagaacatcaccagccagggtcaggctgagccccttatcctcaccaggatgaggctgcaattctgtaagaccacaaataggctaaacttcaagctcagagcaggcaagttcgggtaagtaacatccactctaagctaaattttagtcaaataaaacagctacccttgtatagccaagagactgtttttgccttgcttttgacataactgaacattttcatggggattggcaaggattaaatacaacaccatctgaatggcattactgcatgctactgtccctagaggcatccgaattgaaggcttcagaagctgtgccaggttcggatcattggaagtgctaacactcaccaccgcagaagggaatgccactgcagccaggagtaggggcgggaggagcaccaaaatgctgggacagaagacaagctgcctccacttggacactaggaggaattttaccagcaacctagagacagaaattttggggcctgcataaaaatatactaaagggtgcagggagaaaaatacattaaaggcaatatggagaaacaactggtgccaagaatatgaaataatttcttaaaataccccaaataaaatgtaacatagtcctgcacttcttaactcaggagaaactcaaattcaatactttgttaagnnnnnnnnnnnnnnnnnnnnnnnnnnnnnnnnnnnnnnnngcctccaagccttcagaacaagcaaaatccagatatgtgagtttccctcttatgtttctctgttgtagctaaaacccataaatggcagattgttcttaatcgtatttggaaaaaaaaaatgacttgcacccaacagataaaattatttgtttagtaagcccacttatgaagagttcttggatttcagtcaccagtgctgacaatggttaatataccagaatgtatactagacatattatccctttgcctcatggggcattgttacatagtggttaaaatgagagctctaaatttgagtttgaatcttgaattcacaacttactagctgtttgaccatgagaaaatcaacctctgaaagtctcatttgtaaaggggagtaacagtacctatcctgaattgttaaacaagaatgtacacatggaannnnnnnnnnnnnnnnnnnnnnnnnnnnnnnnnnnnnnnnnnnnnnnnnnnnnnnnnnnnnnnnnnnnnnnnnnnnnnnnnnnnnnnnnnnnnnnnnnnnnnnnnnnnnnnnnnnnnnnnnnnnnnnnnnnncccccccaccaaaaaaaaaagtacacatggactaacagctaccgtttaccaagtgcctaaaaagttaaataagttctaannnnnnnnnnnnnnnnnnnnnnnnnnnnnnnnnnnnnnnnnnnnnnnnnnnnnnnnnnnnnnnnnnnnnnnnnnnnnnnnnnnnnnnnnnnnnnnnnnnnnnnnnnnnnnnnnnnnnnnnnnnnnnnnnnnnnnnnnnnnnnnnnnnnnnnnnnnnnnnnnnnnnnnnnnnnnnnnnnnnnnnnnnnnnnnnnnnnnnnnnnnnnnnnnnnnnnnnnnnnnnnnnnnnnnnnnnnnnnnnnnnnnnnnnnnnnnnnnnnnnnnnnnnnnnnnnnnnnnnnnnnnnnnnnnnnnnnnnnnnnnnnnnnnnnatatgttatataaacttgctaaatgtaacacacacacacataaaacgttaggggtaccctctccgaaaccgtatttctggaaaagtgtgacgctacagtctgtcactgatataaaatcccagacaaagaccaactaaagaaaatccccaccaaagaaaatacatttttggtttctttaagggagtcagttccggactgtggaagttcttctggggataattcagggacccaaacccacatggggactacagtttctatttcagtgcaagaaagccacgtaagctgtttgcccacctgaaaggaccttttaaattcaaactattacaagaataatccagagccttcttccttcctcaaagacgattacattttaaatgcccagttagtgggaaacatagctccctagtttttacatatttcaaactgtagtatcaatgtggctttaagatttcctactnnnnnnnnnnnnnnnnnnnnnnnnnnnnnnnnnnnnnnnnnnnnnnnnnnnnnnnnnnnnnnnnnnnnnnnnnnnnnnnnnnnnnnnnnnnnnnnnnnnnnnnnnnnnnnnnnnnnnnnnntttaatnnnnnnnnnnnnnnnnnnnnnnnnnnnnnnnnnnnnnnnnnnnnnnnnnnnnnnnnnnnnnnnnnnnnnnnnnnnnnnnnnnnnnnnnnnnnnntgccacnnnnnnnnnnnnnnnnnnnnnnnnnnnnnnnnnnnnnnnnnnnnnnnnnnnnnnnnnnntactaatcacacctcaaaatcctcctactctctgtgacactgatctgtctcacctggggcagtcagctgtgcacttttacacagcacctgctcatttccccacttcccagaatctcacagttgttgcaacaacagccttttgccagtggttgggccaaatgcccctcctctccgactcctgtttccttaaactgtagttttgtttcctgcacttaagatttctagggagccgctgtggctcaggccggttgccctggcactcggggaggtgaggctacacgttcgaggccaacctggtcaacactgattaaaaaaaaaagatttctatatatatattctgcaggtactttaaacgtgtttctgcccgttttctgtcaacactgtaatcaactggtgtatcagtgttaaaacacaatgctagcccagtaatttttacatttgataactttacagttaccatnctatgttttaatataaaatagatgacttagggccataatacatgatgnaaattatgtctgtctatgaatatccaccagaaatctatctggttattttccctctttccttaaatcacttagtcttctggactaancatttaatncccactttataggtttatttcagttatcaaatggtatttacagagactacgaattgtgtagcctagaattgcctagcctagaaaggacttaggttctagaatctttcacaatatttcttcccactattatactctatgcaagctggtaggtatgagatagagcttgaagatactcctttatgcttcacttcagaaacatttcttgcttcttcaaattatggagagaagcagggaagagaagttctcaacaggtttgaggcaagaccattgtttccagtatgcacgatttttcttcaagcttaccaacactgtcctccaggtgacgctggtagaatgaggaacatcaatcattacaggaaggcagtattatcaagtgagcattttaattatgaaggaaacagaaaacaagttagaagactgaaggcaaaactgacttgttaataacagcaacatcactagttttatacttcagaggacctaaagccaagatgtaagtttcaaggttacagactggtggcatcagaatatatccttaacacatgtgtcctgctccatcctccctacagcaggctacttacctgcccttccccagccctgaagaaagcccaggtaaacccagagggttactgaaacttacaccctttccaaaagccttagttaaggctgatgagattaataacatagagactgagtcatcccagtaacattaagaatttaatctacaaacaccaagttagcagggaaagtgacccctgccagtcccttccaatatattcttttttttcttttaaagaaaatacctataagcacaatatattccatttagatgatgggggagaaatgggtttatcaccattctgagatggcagaattaaagcttggattgactcttctacgctgggtggcttttccaactcattaattatttcaaatatagatattatagattcctttggtttacaaaaggctaccttaaccctccagagaagatctatggacacaagtagcttgctgcaggaaagcattttacaagcctactagaaagccagtctttttctctgctcaaactagatttcgttctggtaacatctctccattcttgcctttttcccccatttcaagttgcctcaggtttctgattgttccagnaacacaccttctagccatttttccttaacctccatttccccttcctttaaacctcgtccctcctttcttttcaccacatttatttcccaaagggctccgaacactgcagtctttacgtctcacttagagggtgagcaaccacttcatgaaaatgtgtggagaggcctcagcctgcataatcccagcaccactcagttactggggaggaggggcttaagtgtgacctgctgtggacagaggcagctttatcccacagaaaattaaggttcagggtcccttccaaggaaatgcattcgtcagtcccatttttgtaaaatatgcaaaactatattttagattttcttttaaaggaccccctgaattacataaagttcagcctccagacctagaccgtcccccggtctggaagaaaacctgcctcaccacaacagcatgctaatagtgctcaagtcaagatcaccaacaaatcaacatacgggcaacggtgttgctggtttccaaacacacccagttatgtgtgtaacaaggacaccagaggaaaggcaactcttcaagcacctttcttacctgaacaatcctaaatattggccccaactacatatttcatctgatattaacatcaaaagccttcaaatgagctttccaaatgacttaagattttagggagcctttgtattggcagttttttttcggaactccctccaaaaggccagcaaaggatacatttactataatcatgggcagtaattctcagacttaagccagctaaaaatcgcctgtgagagctggttacaatgcagatgtctgagtctcaccgcccgaatttctgaatgtataggtctaaggcggagttcaaggggatcctcccaggtctcaggaggttgtacactgaacataggttggtggtcgcagttgttctaccactgtgtgaccttgacgcagggagaggaaatattcatttacagaaaacgtaaaataacgtggagagagagtgagatggtaaccggaactcagaaatgcaggtggtgtgtgacccacggtattttgctagggtgtggctgggcacgactcatccaccggtgaagctgcagaatcgatttatgagggtctcaggaatgcaaagacacacagattcgtctcacctagaagtcacgtttcattttaatctccaagcagacagcgcagcagcaaacctggggctgtggagtggggccccacaccctccgcccactctcccgcccccgtccacgcctagactgcatgaaaggggtcttcgcacacaaagccagacccccaggcgtgggaagatggaaccagaacaattcgaacgagcagagcaaaacagatcggaattgcagacttcaggtcgtggcagagaaaaccagctgagacagggcgccacttactaggtgattctttattccaagttggggaacggaggaagacgagagggggagcccccgggtccggtgaaacgctctaggagaaatgcggctccttcgcgtcccctagggcaccctctgcccccggccgggttccgaactaagatgtggcgaccccgaccggcccgccccccttccggggctgccttcgcgatcccgaactgcaccctcccggatcccccaccctgggcccagcctcaggaagtggcggggcgcccagcgggagcgggaagcgcgggctaagggcgggcgggcggccacgcccagccgggtcgccgggtcgcccatggccgggaggggaacgcgcccgcggccatccccgtccctccccaacgccaggccccccccggccagccgcccgggctcccggcgcgctcaccgccttcatagcggaggccatgtcgtcgtagcgctccgcctgctcggccagccgcgcccgctgcagcagctgctcccggtcccccatgtcgctcgcggctcggcctcgcctcgcgcctcacaccgctggctcgctagccctcccgccggtcagtccgctccccggtcgctgcggaggccgccgccgcgcacgcgcactggctcgccggccggccggaggctgcaggctgcaggctgcaggcagcgccgccgctcgcgccctctcgctggctcgccccgcgcgctgtggctcgcgcgc

SEQ ID NO: 56583 - DNA, 374 bp, Homo sapiens
aaaaccttcaagacctatggaagtcagttgcagccagctcatcacatagaggtgcaggtgaggtgtattttcatcacggtggaaaattctggctgcttcatctccatctctagagccaatattggagcttttcaataaaagctatggcctcaaccaccagcaccaagaagatgatggaggaagccacctgctccatctgcctgagcctgatgacgaacccagtaagcatcaactgtggacacagctactgccactgtgtataacagacttctttaaaaacccaagccaaaagcaactgaggcaggagacattctgctgtccccagtgtcgggctccatttcatatggatagcctccgacccaacaaagcagctg

SEQ ID NO: 56584 - DNA, 367 bp, Homo sapiens
ttttttttttttttagaaagaggaagtctgtaattaaataatgtaatttcaacatctcaaagtcctgaagtttgctatgaaacagttactactattctttctctacatatacaaatttgccttttcacaatgtctcactttatgtaagtgcagtactatttcacaggcatctaaaattatgctaactttcaaaaacaaggaggtcatttttcagaaattctgagcctgtcagagaaactaaatggtatttcatcagttgtctctactggcacattacttctactaaaatgacatgaagcatggtgagcgaaacttgaaataaatgcatctggagtccggctgcaatgacagctatctgctggtgtac

SEQ ID NO: 56585 - DNA, 396 bp, Homo sapiens
catccgcatgagaccatcgagatgaggagtttccacataggcaaagggtgccaatatttaactgaacatctggtttctttttggaagttttctttcacatggtttgtcattacaagacaaggtctgcccagccaggtggatctaccttgcccccatcacctgccgcccccatcaaacatgttgggacaatgcccataggaatggacctccttccccgtctccagctgggactggcgttttttagtctctggagtatgatggttctcatgggtaggatgagatctttggcagaaaggtcttcggtggtgctctgagcctgcgctgcataggactgagcagacccacctcctccagcttgggtggcctgccactcctggttccaaagtctctcctttc

SEQ ID NO: 56586 - DNA, 499 bp, Homo sapiens
  misc_feature (1)...(499): n = a,t,c or g
agaaagtccaagacaaacagtgtaaaggaaaatgtcaacaataaagtcatcactggtgggacctcaaggcagcagagtggaatcacaactagatcctgcaatgtaactaatcaaaatcttaggaatttttttttacaaagcagaaattccatacgttttgacccacgaaggggagagcttcagcacatgaaacagattcgtctggagtaataggaagtatgtccaaatgagggaggaggcatccaaaaggacaagacctgctaagcactctgagagcattgtctacacctgctgcttccagatcatcatctcccagttgttcccaggcagcccagcagttctggactttccattccctaccattcccaaccaggaactggcccttcggccaaccttccttccacatggcaccatgggtccgaggataatggaacattgtttcgggattggcttaactggggncaaattggatttccttttgggacgtggcggcctgctg

SEQ ID NO: 56587 - DNA, 415 bp, Homo sapiens
cggacgcgtgggaaaaacctggattatggtagtaaatatttagaaatgttaaaaggaggagtaaaataatcaaagcgttaaaaaaattccaatgaaaatttctggggcacaaaataaaagaaaatatatcagtaagaaactgcttttacatgatctgaaatccagaaaatgttttcaaatgtttatatcatctgtgccaaaggagagaatcctgactttctgcttcttactttctataactcagatttttaaacatccacccaaaagattttaaactcagattttaagaaatccacccaaaagattttcaagaactcagattttaagaaatcctcccagaagattttcaagtcacaggtttcaaatgggaatgatacaagcctaaaaactaggtttttgtgcagttttgtatttt

SEQ ID NO: 56588 - DNA, 419 bp, Homo sapiens
ccttttctcagtgtcttaccaagaatgaaaggcaacctatgtaaaaactatgggctttctagtataaataaaaactactcatctccagaaaataaacaatgactgctaagatgattgaaaaaagaaaggagaagaaagtagcttgtaaaagcgtgtgaaatgcattcacgttggaatctcctacaggcacttcaggtcaaagactaccgatgtccagatcataatgcgaggacagtttgagcccagtgctctctgactgaggtagaacccccgggaaggtgaagagggcagccgtctgcgaaacagcccagcatttaagaatgggcagcacctggccaggtgcatttgagaactaggaatgtggcaacaataacatttatttatttggatgaagagaaagaagatgtattggattccct

SEQ ID NO: 56589 - DNA, 453 bp, Homo sapiens
  misc_feature (1)...(453): n = a,t,c or g
cattttagccagaggctgtttcaaacaaaaccaaaaacctaagtagagcattacaggcctctgtggctgctgcgtttctgtagaaagcaacttattttattgacttttttttttaaggaaaagaaataaaaagaccccagcaggcaaaaacatttaaaaaaggatttttttccctcctacttaaggggttctttctccctttgctctactttgggagaatgaacttaacatcccggctttttttgttaagccatagctgaccttaatctggggttagtttattaaaataattaaaaatactttctaaaaaaagatatttttgatattaggactgaggtggaaacatataggggcaatttataaaaaggtagttagagaaatatattttagggaactataaccacagagcacagatgactcccaatgagctgatctgctttagggttcnccctt

SEQ ID NO: 56590 - DNA, 428 bp, Homo sapiens
cggaaagatgccttgccactgggaaccttttccaagtatacttggcatatcacttaatatcctggcaagttaaacaaatcttagataccccagagatgcccttgggaaatcacccgtagctttatccagaaccgagatgggacttatgagctatttaaatgccctaaagtggaagtagaaagcatagcagaaacctacggtcgtatagaaaaacaaccagtgctgcgacccttggaactaaaaacttttctcaaagttggcaacacttccccagatcaaaaggagccaacacctttcatcatcgagtggatcccagatatccttccccaatctaagattggcgagctgcggatcaagtttgagtatggccaccaccggaatgggcatgtggcggagtaccaagaccagcggcccccctttggaccagc

SEQ ID NO: 56591 - DNA, 161 bp, Homo sapiens
ggagcatgagcgtctgagggcttcgtcaggggcagtgaggagcctctaaaggactctacatttaggaatgacagagtcaaacaatttaacaaagccctaaaggtccctgccaggaaagaatgagccccatgtatcaccataagcaacttcttagaaacata

SEQ ID NO: 56592 - DNA, 326 bp, Homo sapiens
aaaagtattcctatttctccctgtcctttccagcatctgaggccatcatgcgcctttttaatggttgccattttaactgggatgagatggcctctgatgctggaaaggacagggagaaataggaatacttttacactgttggtgggagtgtaaattagttcaaccattgtgaaagacagtgtggcgattcctcaaggatctagaactagaaataccatttaacccagcaatctcattactgggtatatacccaaagggttataaatcattctactataaagacacatgcacatgtatgttactgcagcattgttcacaacagcaaa

SEQ ID NO: 56593 - DNA, 595 bp, Homo sapiens
ttttttctgaaatcattcttttattttgcacacacatagctgctatttactgaacactggaaattcatgaatgcgttacatatttaaactttcatagaaggctcagatcaacaaagcaaaacttctacagataataagtagttgtgtatgcttgtcactcttgggcccatcagcacctgttccctatcatattgctgaactctgcaaactccagaaaggaaggtttcttttccaaacttcagagaagctgcagatcaagaatttgggccgttgcatctgattagaaactctcttcttccagtgtgagaacgttggattgaaagcggcataatataaaaagagatggttgtctgtcagggagaggtcagatctgtaggggtctttcacctgtcaccctcggaagaagctgatgagaaaggcgcacagggcctggaagggtttccaacaatgttcccaggccttcttctttgcttcctcattccctccgggcctgggtccaggctgggtaggtttggctgtgggtcgggtggtgggtttggcttttcccagctcttccatcgagtcctttcccagctgtgttgcttctgtgagtttc

SEQ ID NO: 56594 - DNA, 376 bp, Homo sapiens
ccctaactgcccattgggtacttgtgacgtagtacatcaagtactattaatatttccagttttcactcctctttcacctgaacgaacacacacacacacacacacacacacacatacacacatgctcactcgcttgctgtctcccaatccccaccatccaattagtttttcccactcccattctttctaatccaagctcaaaatcctcaaagtcatatctttgacatcctctctttgacattctgttctgctatttaaacgatggtcaattctgcagttcttcttgcataacttcttatatatgtatcttatactcccttttcattcccctacatgccctctaggtaaagcccttatctccaaagagacctcatcc

SEQ ID NO: 56595 - DNA, 330 bp, Homo sapiens
gcagaaaagttaatagtcgtgtgaacaaccatattccttttctttttttatttttaagtttgtagctatctatctatttatttatttattttgagaccgggttataaggctggctaatttttgtatttttggtagagatagagtttcgccatgttgcccaggctggtcccgaactcccggactcaagcgatccaccagcctcagcctcccaaagtgctgggattacacctgagccactgcacctggccaacagccatattcctgagtagctgggattacaggtgcctgccaccacatctggttaattttgtgtgtgtgtatttttagtac

SEQ ID NO: 56596 - DNA, 475 bp, Homo sapiens
tcttaattatcctcatcctgctgttgcctccgcccttaactctatccctattaggaaccttgtttcccaccgaataagagttaaggtaagaggtagctcttcacctgatgacattccatttaagttttggggcatctttcctgccctctgccaacctccctgctggcccaggtgagaggaggaagaggggtctggaaagaaacccagaatgcggcagaactaggagtaagtccatctcaaggtggacttctgatcattgaggatggtgagataaataggttgaaaacaatcatctgtgagtttaggagtcttaagatcctcacagcacgggagcagggagaggctctagaacaaggtttcacaaccgagatgcctttgacattttgggctgaagtgttctttgtaaggaaaacctgtttcctattttgtgcattacaggatatttagcagcacccctggcccactctagttatga

SEQ ID NO: 56597 - DNA, 433 bp, Homo sapiens
attttttatttattcctccactcacacactgatatacctttatcttcttccgtagtcaccatgcacatctgagttcaatttctttattaaaatatgtatttttacattttttgttaaaaactattaattgatagattttcctgctttgaagggatgtaattgatagttaaaatgagaatgtcagatgggcacagacagaatcaagccattatttgaataggaaaaggaaaatatggctaatgggcatggaatacaatctgcccacatatgacccaggctgcctactggcctgatagatgacatcgaatggacaatatggctggggatgtggggatattttttcaaaagtctggcaaatcagatgacagccatgaagatttttcctgccatgttcagggtcattttattcctttgaattacttagatattactg

SEQ ID NO: 56598 - DNA, 428 bp, Homo sapiens
  misc_feature (1)...(428): n = a,t,c or g
ggtgatcgcccccatgctgtcccgccacggcaagctgtggtccaacttctggggcgccctgagccccgatgagtactacgcccgctccgaggactacgtggagctggtgcagcggaagcgagtgcctatgtgatccggggtgataccctgcggatggagctgccccagagggatgtgnnnnnnnnnnncacanacccngacatggncttctgtantanctttcaaaacnggggcntcntnctcnatntgancacntncnatganntnggacgnatcntggnnanttacnaatacaacncgtacnnnnntaancnnaanntctngnnnaacnntaaccnnnntgattantnttaanctatcttnancnnngatnnntatatctaatgcnnnaatggaacaaganatgtcantataatttgtttcctatt

SEQ ID NO: 56599 - DNA, 358 bp, Homo sapiens
aaaatatggtgacttgtttgtagactttctttttcttgctagctttgatgaaataaactgccatggtgtagaggtccacatggcaagaagctgagggtggcctctggtcagcagcctgaaagtaattgaggccctcggtacaacactcaagcaactgaatactgccaataaccccttaattgagtttgagattggattcttccccagttgaactttcaaccgagacctcagcactggctaatagtttgattacagcctcatgagagaccatgaagcagaggatcatgttcagattcctggcccacagaaactattgttttaagctgttaaattttgggctaattttttttttgagaag

SEQ ID NO: 56600 - DNA, 3797 bp, Homo sapiens
gagggaaggcaggaaggaggcagccgaaggccgagctgggtggctggaccgggtgctggctgcgcgcgctgctttcggctcccacggcctctcccatgcgctgagggagcccggctgcgggccggcggcgggaggggaggctcctctccatggtccagaagaccagcatgtcccggggcccttacccaccctcccaggagatccccatggaggtcttcgaccccagcccgcagggcaaatacagcaagaggaaagggcgattcaaacggtcagatgggagcacgtcctcggataccacatccaacagctttgtccgccagggctcagcggagtcctacaccagccgtccatcagactctgatgtatctctggaggaggaccgggaagccttaaggaaggaagcagagcgccaggcattagcgcagctcgagaaggccaagaccaagccagtggcatttgctgtgcggacaaatgttggctacaatccgtctccaggggatgaggtgcctgtgcagggagtggccatcaccttcgagcccaaagacttcctgcacatcaaggagaaatacaataatgactggtggatcgggcggctggtgaaggagggctgtgaggttggcttcattcccagccccgtcaaactggacagccttcgcctgctgcaggaacagaagctgcgccagaaccgcctcggctccagcaaatcaggcgataactccagttccagtctgggagatgtggtgactggcacccgccgccccacaccccctgccagtggtaatgaaatgactaacttagcctttgaactagaccccctagagttagaggaggaagaggctgagcttggtgagcagagtggctctgccaagactagtgttagcagtgtcaccaccccgccaccccatggcaaacgcatccccttctttaagaagacagagcatgtgcccccctatgacgtggtgccttccatgaggcccatcatcctggtgggaccgtcgctcaagggctacgaggttacagacatgatgcagaaagctttatttgacttcttgaagcatcggtttgatggcaggatctccatcactcgtgtgacggcagatatttccctggctaagcgctcagttctcaacaaccccagcaaacacatcatcattgagcgctccaacacacgctccagcctggctgaggtgcagagtgaaatcgagcgaatcttcgagctggcccggacccttcagttggtcgctctggatgctgacaccatcaatcacccagcccagctgtccaagacctcgctggcccccatcattgtttacatcaagatcacctctcccaaggtacttcaaaggctcatcaagtcccgaggaaagtctcagtccaaacacctcaatgtccaaatagcggcctcggaaaagctggcacagtgcccccctgaaatgtttgacatcatcctggatgagaaccaattggaggatgcctgcgagcatctggcggagtacttggaagcctattggaaggccacacacccgcccagcagcacgccacccaatccgctgctgaaccgcaccatggctaccgcagccctggctgccagccctgcccctgtctccaacctccagggaccctaccttgcttccggggaccagccactggaacgggccaccggggagcacgccagcatgcacgagtacccaggggagctgggccagcccccaggcctttaccccagcagccacccaccaggccgggcaggcacgctacgggcactgtcccgccaagacacttttgatgccgacacccccggcagccgaaactctgcctacacggagctgggagactcatgtgtggacatggagactgacccctcagagggcccagggcttggagaccctgcagggggcgcaccagcccgacagggatcctgggaggacgaggaagaagactatgaggaagagctgaccgacaaccggaaccggggccggaataaggcccgctactggcctgagggtgggggtccagttttggggcgcaacaagaatgagctggagggctggggacgaggcgtctacattcgctgagaggcaggggcacacggcgggaggaagggctctgagccaggggaggggagggagcgaggggctcacacctgacatgtatgtcctccagggggcgctgtctccctcctttcagatgcctttgctcaaagcttggggtttctttggtgttaccatcccagctcccgggagcccttaagccccagctgtcggtttttacctgcctgttgtggatggatgggggatacccacctttctgaagtgtcccctttctcccatcttaaggggctctcctccctcaccctcctagagaaaaggtgcacttccttaactctttctactcggggccctaagtgacggtcctaagtgggatggctctccttctcccaagctgcagtactggggaagggctgggcgcttttcctggaaaggaggccacagattctttcccatggggctctcttccccagaccccagatccaaggtccctcaccctgcctgccccttcctcccagcttcctgcagcatcgtctggtcggtgaaagccatagcatgacaccccatggagcttgtcttggggagggttctgggtggaagctggcaggcatacagcaccctctacctccgtggccatggcaacgtccagggcccagaaccctgaggagtgagcggccgagacgctgctccccaccccccacctccatgcctcagcctttgcctaccccaggaatgagcttggcctccaacatcccttgcctgctgccattagtagaggggcccctctgcatctgagccccccatccctgtgcacctgggtgtggagcccatggaacactctggtccgcctcattttaaaccaaaaaactgctccttcaccctcaccctgaggccccaggggagaggacccgtgggatggtgcccaggggttgccttgggacctcggatctcctctggggggcttggctgctgctgttgctgctctgtatttgcctctcgtgattctgtttgttacccatgttcacttcccccaggagaggccttggtaccccctctcccctggggcatccctttgccttggcatccctgtagcccagcaaccctgcccctccccagcatcccagctgggccagagagagccgagtgtgccaacaaggactggggcctgcccgtgcccgcctcagggatggcacctcatgcctgtctcgccacctcctgtgccaatgtcaccctaccctgggggtggggtgcagcttccacttactgattagaagacaccactgccctcccttcccccctccctgtctggtgtcctgtgcccccatctgtctgtctatatttgtctgtactcccctaggagaagtattttgccatatataaaaccactgtcctgtcctttgtggctgcctcccaagcctgcttctttgtcctcgccacatagtcgtcagcgtaggcacctgggagctgctgatatgcacggggagttgaaagggtgggtgcctgaagatgttgtgccctgagtcattgactcaaaagaaaagatgatcctttgattttggccctctgatgtattgctgcccaagccaggagctgccttgggcagtcccagctccacactgccctgagccccttcacttacctgtctctccacaagtagagccaaaggcaatgggaagctcaatgttgctcagtgggtgagatccagacccactggtgcaatgtcttaaatacacatgactgtttttctgc

SEQ ID NO: 56601 - DNA, 385 bp, Homo sapiens
tcttgctgcaccaagtggaggcgctagccgcggcaggcgtggaccacgtgatcctggccgtgagctacatgtcgcaggtgctggagaaggaaatgaaggcacaggagcagaggctgggaatccgaatctccatgtcccatgaagaggagcctttggggacagctgggcccctggcgctggcccgtgacctactctctgagactgcagaccctttcttcgtcctcaacagtgacgtgatctgcgatttccccttccaagccatggtgcagttccaccggcaccatggccaggagggctccatcctggtgaccaaggtggaggaaccctccaagtaccgtgtggtggtgtgtgaggctgacacaagccgcattcaccggttcgtgga

SEQ ID NO: 56602 - DNA, 725 bp, Homo sapiens
ggaaaggggcaaaaagggactgatagcgcaagggccctaagagacacaaaccccaagactccccgggtacccaccggaggctaacatggctggagtagagagaggggtagcagtaagggaagtcatggcaggaggtgatgggagagtactacaggaatttgtaggtttttatagagattaaatgtcactttaccagactgtttttaagaatttaaaagcctgagaggaaaaaaaattctcatagctatggaaaccatcaaagaccactgaatacattcaagcaagtttcaaatattttattttcttattcatacagtatgaagttttctaaagatcccacaacatgacgtatcatgcagaagaaaaactaaacattcaacataaaccatcccctcccttacccacccccacacacaaactaaaaaaaaaaaaaaaaaagaaaaagaaaaaaccctcattccccggtaaggaaataatgtttacactatttttctgtaacgccagccaagatatgcacaagcaagagaaatagaaagcatttgctaaaatatttgtaacaaatacttatgtacaaaaaattcacaaaaggctagttcccccttgaagcagagcacatggcagttgacactgggaacagttcaaaccactggctggggattataagccatgccactgatccagagggaagaaaggttacatggtaggtgggagattttcagtctgga

SEQ ID NO: 56603 - DNA, 420 bp, Homo sapiens
cccacgcgtccgctggaagtaatattctaccagcaggaactcaacagctccagttaaatgctttgatatagtggctcctttgcagagccaaaacaagatttattaaatttccttcaaactgtttatctttaaaacaaatataaggttttaattatactgctgaagcaaatgtgaatgccaaagactacgttttgcagttttgctttcctcccaataaatattaatgtatgtaattctagagggtaaaaatgtaaataggtttggacaatatttgcacccttgtttgtgttatgaaaaaaatttttccaaggtgagctagagagaaagatgtttggcatgccaaattaacttgcatgtttgttaaaaaaacaaacacatgttttgaagagaaaccagatctgaacatgtatttgttgagtt

SEQ ID NO: 56604 - DNA, 395 bp, Homo sapiens
  misc_feature (1)...(395): n = a,t,c or g
gcaggcatgagccactgcgcccagccgtactttcatataacccatgtggtacaggaaagggtggccccttgcactctgaaaacctgtaactggagtatccaactagtctgagaggtctgggggagccatcttgaggaaggggcacttgggctaggatctgaaggatggacaggaggtaagtagacggagggtgggaaggtcccagacctaggacatttgaggggctgaaagaggacctgtggctggactggctacccagatgtctgggtaggtgaaggagtggngntnnngaggggttnggnncangcncancccgnncangggcatanggnnngntggcnnggcgnggcntcgngccngcnatcnncnangccctccangggggggnncccccg

SEQ ID NO: 56605 - DNA, 1209 bp, Homo sapiens
  misc_feature (1)...(1209): n = a,t,c or g
catgattacgaatttaatacgactcactatagggaatttggccctcgaggccaagaattcggcacgaggcctgtgaccggggcagggacatgaggggctttgaggtttgctcttggtccttctgcacagtctgagcctcttatgcccaggcttgggggcggtgcagctgcttgtgttggagacacaggcccagagccactcctgcctacaggttctgagggctcaggggacctcctgggccctcaggctctttagctgagaataagggccctgagggaactacctgcttctcacatccccgggtctctgaccatctgctgtgtgccccgaccccccctaccctgctcctccaccaagcctgatgccaagggctataaaccactggcccaacagaagcttggttcccagagaactgggtccctgcctgggacatgctccttgctacagccccttgtgggagctcagagggcatgggctgctccccctacggtccctcgcccagtggttctgtctctttatggcaggaagcaatgaggctccccaagaacacacctgaggaaaaggacaggcgcacggcggccctacaggagggtctgaggcgggcagtctctgtgccgctgacgctggcggagacggtggcctcgctgtggccggccctgcaggaactggcccggtgtgggaacctggcctgccggtcagacctccaggtggcggccaaagccctggagatgggcgtgtttggcgcatatttcaacgtgctcatcaacctgagggacatcacagacgaggcatttaaggaccagatccaccatcgtgtttccagcctcctgcaggaagccaagacccaggctgcacttggtgctggactgcttggagacccggcaggagtgacggtgcgggaggcctctccgggctctgtggcccctccctcgcccatccccagagggcagagctgtgacctcggtggggacacagcttgttcatgtggggcccggaggaaaccccagggacagcaggaccttcgacgctggaaggatagcctcgcttcccaggtgcagctcccggcaggtctggacagttccacagagcacggtactggccctgtcctcagttcccgtccacccttcaaccagtggctcctgggagacttttcctccctgcctcagctccctgnccagccagcctcctgtctccagagaagttctccat

SEQ ID NO: 56606 - DNA, 251 bp, Homo sapiens
taatcattaagacagtttagaatcctgaaggaatgcttactatatatcaaaatttaaaaagctaagattaaggacaaaatgagaacaggaaaacccaaactgaatttgtagggttaattgattattctcatctgctagcatttagactattgtcattagacgttgctaatgagctcagaagcagacaggtaatttaaactaagagagctgggtataaaacaacagtggccaggtgctgtggcttacacctg

SEQ ID NO: 56607 - DNA, 165 bp, Homo sapiens
ggagaaggagacgacacatttgaaaacctagtatttgaccaaagctttttagctcctcttgttactgagtatgataaacacctaggagaactaaatgggcagctgaaatattaccagaaacaggtgggtgagatgaaattacaacttgaaaatgtcatcaaggaa

SEQ ID NO: 56608 - DNA, 1567 bp, Homo sapiens
ttttttttttttcattttgccattttatccatttattatgtacaatattaaggcacaagtttaagcagcaaaggagaggaaaatctttggctgaccaacagcatcaatatttgctgtgggggacaggcagtgttcttggaatccccacactggtacacagacccatttggctgtatggccatgtacatcacccctcaatacagactggcaatatgaagacgtcaaacgttacagccagataccagtctgctgggaagagccggcacgagcacggcacactgccaccaagcacagcgacacacacacacagagcaggttggagggcagcggcagcaggacagctgaaatcgggtgcccatgcttaccactgtttcacagaattttacacaattctgtaagtgctcatggaggaggaggctccctgttcctcctcaaaaggaaaaaaaacaaaaaacaaaaaaacaccttgattcaaataaaaccaatgtggatatatttgcttacattccgttttgtaataaatacttacaggtgtctctatgtgaacagactcctaggcacaatcacatgtaaacacaacaccgggcatccagactttgggggctgatacaagaaaacgctgtatatgtagttcaatatagagagagcagtattctaattctgtgaagaagcaaagtttcatgacaaagaaacaccccagtcacatcataacatgacaataacatgcactaaagtaaacacagttttacagaatacctaccagatgtttatatgaatgattatgcacttatatctgtagtgtatgcagagatgtgaacacataggaggcatggcaagagaattgatttttaaaaatctgtgtgctaatgaggatgatccccccttgaagtggacactttgagaggctctgaggccaaagactcattccaagaaatttcttagggatttttttagaaacaaaaatggtgtaacttaccttaattgccatcttttttcatccaactgtgctatcaagcacttgagattatttccagaacttaaatccatcctcaaaggaggaggatttctcatctctaagggtaaaccaaaggaacatgccaagcccctgaaggccattctagtagaagagttcccaagatatttttacttggcagcactatagtcaatgagcacatagtctcccaaaagacaccttttaaggagggcggggtgagatgaacactttgatcttctgtatgttaggaaaagaaattcccacaaacaaccctatagtcatacctcatatgtatgcactcacttatacacatgtctttatataccattaaattactaagtgagaaaagggtatactacttaagagaaagaggaaaaattgctcatttgttccaggagaaattcactactgaaatgctaacttttgcatttccccagccgaccaatttctggtaacttcttaattactttgcctatctcccatggagccacacgtcagaggcaaactcattaaacaatcgtcacatctaatgaagacattttaaacactttaattacttaaacaacaagaaaa

SEQ ID NO: 56609 - DNA, 407 bp, Homo sapiens
gatccttcctctctgatgagacaggaagaaggtacacagtgaccaggtaggaggaggagagggagtagaaaggagggatgcgggtggctggtccctgcatttgcctgcttccctgcacgggtgtcccactggccgcctctgctcaccagtgtcatgggattctctcagaagatgaaaacagcccctgcttttttgctagaatggctgagctttcatggaaaggaagctggacccaagcaacagccgactaccgaaggttgcctggagcagtgcagatgtgggaggaagaagggccttggtgcacactggcttttcttcctgactgcaatgtggcattgtgccagctacctcctctttctcggcctcaggaaaatggagagaaagcagccctgaaggtggctgtgacg

SEQ ID NO: 56610 - DNA, 375 bp, Homo sapiens
gaacaggatagtcttgtgaaggaagactcagtgctaggaagtgttggaggaaaggagctgaggtctcagtgaccagagaccagggtgctgctctctgagagaagctaaagtgagaggagacctcggcacagggcctcaccaacgaatgtgtttctgttgttgctgtggtggttagggggaactcaagaggacaggccgatttctggggggattgagggaaaaacacatttgatcctttgccttttccagtctctttatatttactggttaaatgtaataagtttattgggaactacttgtatgttcaaagattgtgccttccactttccaggagctcacaggattttttgttcgctgaaacttttgtaaattact

SEQ ID NO: 56611 - DNA, 415 bp, Homo sapiens
  misc_feature (1)...(415): n = a,t,c or g
ctgctttgctaaatgaaagctgtatggatttcacaatttgaatttctgaatttctgaaatcttgcattttataccagaaggcagtttactcatgtgtctgatcattctaaaccaatggagagttaagaatgtnnnnnnnnnnnnnnnnnnnnnnnnnnnnnnnnnnnnnnnnnnnnnnnnnnnnnnnnnnnnnnnnnnnnnnnnnnnnnnnnnnnnnnnnnnnnnnnnnnnnnnnnnnnnnnnnnnnnnnnnnnnnnnnnnnnnnnnnnnnnnnnnnnnnnnnnnnnnnnnnnnnnnnnnnnnnnnnnnnnnnnnnnnnnnnnnnnnnnnnnnnnnnnnnnnnnnnnnnnnnnnnnnnnnnnnnnnnnnnnnnnnnnnnnnnnnnnnnnnnnnnnnnnnnnnnnngaggagacaa

SEQ ID NO: 56612 - DNA, 1661 bp, Homo sapiens
gtggcgctgtgcgaggcccgcgggctgcgggagtgccctgctctggcctcgcttgttgctcttcggggactccatcacccagttttccttccagcagggtggatggggagcatcgctggctgacaggctggtcagaaaatgtgatgttctgaatcgtggattttcaggttacaataccaggtgggccaaaattatccttccaagattaatcaggaaaggaaacagtttggacatcccagtagcagttacaattttctttggggccaatgacagtgcactaaaagatgagaatcccaagcagcacattcccctggaggagtacgctgcgaacctaaagagcatggtgcagtacctgaagtccgtggacatccctgagaatcgagtcattctcatcacgccgaccccactttgtgaaacagcctgggaagaacagtgcatcatacaaggttgcaaactaaatcgcctgaactctgttgttggtgaatatgccaatgcgtgtttacaagtggcccaagactgtgggactgacgtacttgacctgtggaccctgatgcaggacagccaggacttctcatcttatttatcagatggactacatttgtctccaaaggggaatgaatttttgttctcgcatctctggcctttgatagagaaaaaggtctcttctctacctttgctgcttccttactggcgggatgtagcagaagcaaaacctgaattaagtctgctgggagatggagaccattagccaatcacaggagacccaaatctgcttgttatctacagaactcaaagttgtcaatacgtagaggtacgcttttttcctcaggcttaaacctttgccactgatattaataataaaagtattagatgatttttcagggaagttttatacttaggtccattgtgtttcgacagtatttattaatgcagatatcagtgctacagctataaaatataccctgagcagcttgttaattctataaatgacaaagactatgtttttaaaaagtcacaattttataaaaatggtttttcttacattcttttgagaactgtttcactcatacatacacccacacaccccactcaaccttgtatcaaattccaaaagtgtaactaaagtataagaatatcatgactagttaaaagatagcaaataccataaggtacaagttcaagtattagtataacaagtatctgagtaacaaatgtccttggaaatggggggtaggaggagatatgattagtcacaggtttggttaactgccctcaaaatttacaagttaaaatgttttggctggtgagcacatttcagttcttaggggaaaaaaagcttttaatggcaatttatagaaatcagaatccaggctaatgatttttatccttcacacagtaaatgcagcccatccagaatcctggagcaataaagtaagaagtaattcaaatatctgcttgtgggtcaataaaaagggtttctgaagtatcaagtcttgtggggacagcccccaaccctaagggcaggtagtattctatctcctggctggctcatcacattcaaaacaacctgttttttttgttgttgttgttgttaagaaatatctcaccctcttattcaatagtgtttgaaaacaggcaatctttgtattttaaatattctg

SEQ ID NO: 56613 - DNA, 358 bp, Homo sapiens
gtggcattccccattatctgcggcagactgaggatgtagcagaagttctcaaccactgtgctagttcaaactggtcagaaaggaaagaagggcttctgggcctgcagaacttactgaagagccaaagaacactgagtcgagttgaactgaaaaggttgtgtgagatcttcactcggatgtttgctgaccctcatagcaagattgctgattcagaagcagaatgtgaggataaagaaggaaatttgtttccatcagaagtctcttgtacagtgagtttggaggtctcagtttagttagtatttgttagctgcctgtaagtgaagccaggaatcccacagctgaatgactttttcctgag

SEQ ID NO: 56614 - DNA, 725 bp, Homo sapiens
ctcccaagtcctggaacgggcctccccaccctccggggcaccgacactcacggagtcactccaacttctctgggtgctccgtggacgaagagcgctctaggacaagcaaggattcctcttctcctgtaaatgaccacagaggaagacaatgaatgaggtgaaagaatcccttcgcagcatcgagcagaagtacaagctcttccagcagcagcagctcaccttcaccgccgctctggagcactgcagggagaacgcccacgacaagatccggcccatctccagcattggacaggtgcagagctacatggaacactactgcaacagctccacagaccggcgggttctgctcatgttcctggacatctgttcagagctgaataagctctgccagcactttgaggccgtgcactctggcaccccagtcaccaacaacctcctggagaaatgcaaaaccctcgttagccaaagcaacgacttaagcagcctcagagcaaaataccctcatgatgtggtgaaccacctcagctgtgacgaggcccggaaccactacggcggcgtggtcagcctcatccccctcatcctagacttaatgaaagaatggatcgcccactccgagaagttgccgcgcaaggtgctgcagcacgggacgacttagcttctgtattattgttgcttcctcagggggagacagtcaagaataaaaagtattctaccacctaaaaaaa

SEQ ID NO: 56615 - DNA, 406 bp, Homo sapiens
cggggccgcatttctctgtgctgccctcctggagaaccgggacacggggacgggagggccagcatcggctacggcccggtttcccgtttctttcctctgtcgcgtctgggccctcctgcagcgtccatgatgaaggccaggggctgttgctttcctctcgcccagtagccaacccaagcaagggaattaattatctgaagaaatggatacttctccctccagaaaatatccagttaaaaaacgggtgaaaatacatcccaacacagtgatggtgaaatatacttctcattatccccagcctgggcgatgatggatatgaagaaatcaatgaaggctatgggaattttatggaggaaaatccaaagaaaggtctgctgagtgaaatgaaaaaaaaagggagagcttt

SEQ ID NO: 56616 - DNA, 812 bp, Homo sapiens
  misc_feature (1)...(812): n = a,t,c or g
tttttttctgggtaattataaaagaggtttaattttctgactcacagttccacanggctgggaaggctcaggaaacttaacaatcacggtggaaggcacctcttcacagggcggcaagagtgagaatgagagccagtaggggaaatgccaggcacttataaaaccatcagatctcatgaaagctcactatcatgagaatagcatgagggaaactgcccccatgattcaattaccctaccacaacacctggggaattatgaggattaaaaattcaagatgagacttggggtggggatacatcccaaaccattatcaatccatatatggctgaaatttacatcagacaatggtaaatatctatgttcaaagtccattgatgctttgagattctgagctattttctggtatggaaaacagacttagcatctccatctccattggatgtatgctgcctcctgtgatgatcaaggaatgcaatggttctcccaagtccacagtgcacatttgccttaaagtgcctgctgcaattttctggtcgtcggctccaaccctgggctaagcccaacacaaagtgtctcctcggtaactgctggttcttctcctcgtattctttgattttgaacaatctccagaagctgctgggctgcttggtttacactcatataccgtggaggttcatagatcttccttcccttgattagattttccaaagactgctcctttactttgatgtctagtaaacataatgtgtgcatgccattttgtctgttcttcttcactttgtcaaagaagctttctggtctccaagtgtc

SEQ ID NO: 56617 - DNA, 248 bp, Homo sapiens
  misc_feature (1)...(248): n = a,t,c or g
gagagttctaaacacttgaggaaccatgctttgatattatacctgttgatttttgtgccttttaaattagtactttcaatagtaaagaccaggtgttacttgtgtcaaggttttgggttcctatagaaactttnntgnttanaantanacaactattccatggaantgtgacaatnaccattaaanttccagaattgcttaaatcaacctnnggntccatnngttntctatnttcaangnctttcttg

SEQ ID NO: 56618 - DNA, 474 bp, Homo sapiens
  misc_feature (1)...(474): n = a,t,c or g
gngnntttgaattcgtnnnnnnnnnnnnnnnnnnnnnnnnnnnnnnnnnnnnnnnnnnnnnnnnnnnnnnnnnnnnnnnggcacgagcaggaccagcaggcatgcctccttggtctcatgttgaccttagagtttgggattctggaattcgatccttcatggataggcagctggacacagaggtcgtggctgttctccatagtggtgttcggctccatcgtgaacgagggctacctcaacagcgcctccgagggggaggagttctgcatctacaaccgcaaccccaacgcctgcagctatggcgtggccgtgggcgtgctcgccttcctcacctgcctgctgtacctggccctggacgtgtacttcccgcanatcaacagcgtcaaggaccgcaagaaagcccgcctntcccacatcngggtctcggccttntnggctttcctctggttcgtgggattctgctacctggccaag

SEQ ID NO: 56619 - DNA, 818 bp, Homo sapiens
  misc_feature (1)...(818): n = a,t,c or g
atgcctccttggtctcatgttgaccttagagtttgggattctggaattcgatccttcatggataggcagctggacacagaggtcgtgggtgagctggaggagcaggcccggatgtgagctgttctccatagtggtgttcggctccatcgtgaacgagggctacctcaacagcgcctccgagggggaggagttctgcatctacaaccgcaaccccaacgcctgcagctatggcgtggccgtgggcgtgctcgccttcctcacctgcctgctgtacctggccctggacgtgtacttcccgcagatcagcagcgtcaaggaccgcaagaaagccgtcctgtccgacatcggtgtctcggccttctgggctttcctctggttcgtgggattctgctacctggccaaccagtggcaggtctccaagcccaaggacaacccactgaacgaagggacggacgcagcccgggccgccatcgccttctcctttttctccatcttcacctggagcctgaccgcagccctggccgtgcggagattcaaggacctaagcttccaggaggagtacagcacactgttcccgtgcctcggcacagcgttaggcttncccggcttgcagaggccggcagccctgtatcacccctggcagtgaggtggcaggagcagcctagtgccaagaaatgtccaagatgccagggcatgcagggcagtggaaggctggcttgaggaaccaattcaggttctccactgactcattcattccttcaccgcctccttcattgattcttcatgcgttcattcattcagtaaacatttattgagca

SEQ ID NO: 56620 - DNA, 476 bp, Homo sapiens
ttttcaggtttctaacatttaatctccacttagggaattggaggtcagaaatgaataaaataccatgccccagtaggctccagtctagggaagtgggcagcaggcagaaaccaagacacagaaagcaacgacacataacagatatgctatgatacaaatggtgctgcaggagctgcacagttcggaggccatttctggccagaggatgggatgcgtgaaatccaggaaggcttccaggaaggagtagctggcactgggatgggcaggaacagcaatgtctctactgatggtttcattggagaaagctggcaaagttgagaagtttggagactaaccgtgacaaaatttaaacatcaggtatgtgaaggcaagggggaccaactgtgacaaaatgtaaacgtcaagtgtgtgaagtcaaaggggaaccaggaaagtaaaagagtgacaatcagcagtgcttttggcaaaaaggcctc

SEQ ID NO: 56621 - DNA, 376 bp, Homo sapiens
ggaaacagccctctcaattattgggacagaaaagttatttcatagggaatacttcaaacactgatatctacaacaggcagtaagattcgtcacaacaattggtatactgtcaatataccatacaaagttccatctggtcttgattaaaaattattttagttttctcaggaaaatgatacagagggagaattgcctagattatatgagagaaaaaaaagtagagagaaacataatgttttcttagattattacagcagtgaactatttccacctggtaagaagggtgcacttgagaatggggttcaagtactctaggaacatagatgtaagttctggatgcacgtagttgttgctagcgtaagcggaaatttcaagg

SEQ ID NO: 56622 - DNA, 166 bp, Homo sapiens
caggaacagatgggggtgcaggggggagtgaggtcaggacaggttgacaggctggcagggtcaagaggtagagggactggaggaggcatggagggtctgaaaacagaggggcccccatggcctttcccgcattccaataccatgtgctaaaaatactggatgagca

SEQ ID NO: 56623 - DNA, 1488 bp, Homo sapiens
tttttttttttttttttgccaaggtatatacacgtttatttaaaaaagtttacagttttcattatacacaactattaagaggttatagtcagaggaggcatatgtgtcctgttgacagacgtgcctactagatcatcacaatgcaaggagaaaggtggaagggaggagacagggcgaggaaaaataagcgataaaaagcttcagatttcagttaggggctggcagtcccttttatcttttcaagtatcacacaatatgtaccaaatacaatctgtaaataatggccatttcttcccaagcccacagccaagatgagtgttaggctaaattcagagccctggctcttccctcagatgagtggaaaacctgcgcatgacagggccggctcccccttctcaaagggcttcctcccactcatcccatccctaacagaatcgccgaggtgttcacgggccagagaaagcacaaacatggattcagaagtcccaaagaaatgcagttcgttgcgcccaatcagagatagatgatttcattcaacaaggctggaagcccagttgggaagtcgataaaaaatcttgctaacttttttaaatggcttttacttttctaagtcactgaaacaaggaagggccacatgccatttaaaatcaaacactagttccccagagacttggtgtccagaaacttgacccacagaggctagcggaggatctgtctttcatgattctcagccatcccaacgggaggcctaacataaagcatgtgccaggccaatgccaactaggacttcagggggccctttggagggaaaaattcctttgagaggagacattcctcaggagcttagatcagccagctggcagtcagaacagcttttgaagtggatgagaaatgttaggtactggagagatgatatggcaactcctgataatgacctcactaggataaaatgctggttgaaactgcacagtaacctcaaggagggtgatgaaattgacgacaaagccaaatgtcagtgtctaagatggctaccactgaccctgtgcccaaaagccccccggtgctggggcttccagagggagcccaagggtggtggattcaatgttgccaggttgcaaccatcttgcttgttggtgtttggcaagagcttgagctcagttatgtgaacaggggcaaagaatggcttgtgctggtaaaactcaagggaggatccaaaaactatgggcactaaaaaggggagggaaaccgccagaagtggctctgacctgctgccgctgccaccacctctaaagccaagaatgtagagcctctgcccagggatctggatgctctcctgagtgttggaagggcagcctggaaaggcatttggtggtgaaacaccgctgctccagacttacgctaccatctattgttgggggcccagagtccttggattcactgccaggccttcttccagatctttctgtacctgtgtgtttgggctcctac

SEQ ID NO: 56624 - DNA, 539 bp, Homo sapiens
tctgacccgcaggacagtccactgtaccaagttcatatagttactgtgagcatcaagtaagaaaatatttgttaaggtgctctgttgcaatataaagtcctgaatcctttttaagttccatttctataaagaggcccctcgtttataatggataagagggaaagcacctgatttctataatcactacccctcctctaaaatccttatttattttcaaagagtcactcatctaattctcttccaaaagagtatctcaaattccagcttgggggtatctttggcctttacatagagtgggctgttcaggatccagtaaatgccatcccagacacagacaagttgtttcctttcatctaactgcaatgaaagctcattgcttcaacttaccccttgtgcaccaaattggtgttccacagttcccagcaaagattccagcgggttcctgtctgctacagaggggtagggagtttaaagtctaatattatatctcacttgtggctataaaaaaaagatcttcattaaagtttctggtccaagct

SEQ ID NO: 56625 - DNA, 6511 bp, Homo sapiens
ggcatgcgtgcagctctttggaggcggtagctttttcggcgtcgagactggaggctgagtgctaaactgtgtggggcgcggatgggatccagctgttagtcgggtaggcatagctttgtgttattcttggaaaatttcgcaccacttgtgaattccttgaacctgggcattgcaaacccacttctgttgggcccatctcctttgcactttgctcagattaagactcagttggcgcttcagcagctgaatgccgttgcctcacatggttcaacaccaccttatactttattaaatcaggctttcttgaaaatagccatgtcgagacccaggtttaatcctcgaggagactttccacttcaaaggccacgagcacctaacccttctgggatgaggcctccaggaccatttatgaggcctggatctatggggtctcccaagattttacccagcagggagagcacgtggaattccacacagatttgctggcctggaatcttatcagaacatggggccacagagaatgaatgttcaggtaactcaacacagaactgatccaagattgaccaaagaaaaactggattttcatgaagcacaacagaagaaggggaagcctcatggtagccggtgggatgatgagcctcatatatctgcatcagtggcagtgaaacagagttctgtaacacaggttacagagcagagtcccaaagtacagagccgctatacaaaagagagtgcctcaagtatcttagcaagttttggattatctaatgaagacctagaagaacttagtcgctatcctgatgaacaactaactcctgaaaatatgccattaattttgagggatataagaatgcgaaaaatggggcgccgattacctaatttaccttctcagagcagaaataaagaaacacttggtagtgaagcagtttcaagtaatgtgatcgattatgggcatgcaagcaaatatggctacacagaagatccacttgaagtacgtatttatgatcctgaaattccaactgatgaggtcgagaatgaatttcagtcacagcagaacatttctgcatctgttcccaatccaaatgtgatatgtaattctatgtttcctgttgaagacgtatttcgccaaatggacttccccggtgagtcctccaataatcggtcctttttctcagttgagagtggaaccaagatgtcaggcttacacatttcaggaggacagtcagtccttgaacccataaaatccgtcaaccaatccattaaccaaacagttagccagacaatgagtcaatctctgattcctccatctatgaaccagcaacctttttcgtcggaattaatttcatctgtaagccagcaagagcggatcccacatgaacctgtgattaattcatctaacgtacatgttggatcaagaggaagtaaaaagaattaccagtcacaggctgacattcccattcggtctccctttggtattgtgaaagcatcctggctaccaaagttttcacatgctgatgcccagaagatgaagagacttccaactccttctatgatgaatgattattatgcagcatctccaagaatatttccacatttgtgttctctgtgtaacgtagaatgtagtcatttgaaggattggattcagcatcaaaatacatctactcatattgagagctgtcgacagttacgtcaacagtatcctgattggaatcctgagatcctcccatcgagaagaaatgagggcaatagaaaagaaaatgaaactccacgaagacgttctcattcccccagtcctaggcgttctagaagatcaagctcaagtcacagattccgtcggtctcgaagcccaatgcattacatgtataggccgagaagtcgaagtccaagaatttgccatcgtttcatttctagatacagatccagatccagatcccgttcaccatatcgaattagaaatccatttagaggtagtccaaaatgctttcgatcagttagccctgagaggatgtcaaggagatcagtgagatcatcagatagaaaaaaagcattagaagatgtagtacaacgatctgggcatgggacagaatttaataaacagaagcatcttgaagctgctgataagggacattcaccagcacaaaagcctaaaactagcagtggaacaaaaccatcagttaaacctacaagcgctacaaagagtgattcaaatctaggaggacattctattcgttgtaaatcaaagaatcttgaagatgacactttgtcagaatgtaaacaggtgtctgataaagctgtttctctccagcgaaagcttcggaaagaacagtcattgcattatggttcggttcttcttataactgaattaccagaggatggttgtactgaagaagatgtgagaaaattatttcaaccatttgggaaagtgaatgatgtcctaattgttccatatagaaaagaggcttacctagaaatggaatttaaagaggcaattactgcaattatgaagtacattgaaacaacacctcttacgataaaaggaaaaagtgtgaaaatatgtgttccaggaaagaaaaaagcacagaacaaagaggtgaagaaaaagactttagagtcaaagaaagtatctgcatctaccttaaaaagagatgcagatgcttcaaaagctgttgaaattgttacttcaacttctgctgccaaaactggacaagccaaggcatgtgtagccaaagtaaacaaatctacagggaaatcagcaagttctgtaaaatctgtggtaacggtagctgttaaaggtaataaagcttcaatcaaaacagcaaaatctggtggaaagaagtctctagaagccaaaaagactgggaatgtcaaaaacaaagactctaacaaacctgtgactataccagaaaactctgaaataaagaccagtattgaagtcaaagccactgaaaactgtgctgaagaagctatttctgatgctgctttggaggccacagagaatgaaccacttaacaaggaaacagaagaaatgtgtgtgatgcttgtctctaatttgcctaataaaggatattctgtagaagaagtttatgacttagcaaaaccatttggtggtttaaaggatatcttgattttatcatctcataaaaaggcatatatagaaataaatagaaaagctgctgagtctatggtaaaattttatacctgcttcccagtattgatggatggaaatcaactctcaataagtatggctcctgaaaacatgaatataaaagatgaggaagctatatttataaccttggtaaaagaaaatgacccagaggcaaacatagatacaatttatgatcgatttgtacatcttgataatttaccggaagatggacttcagtgtgtactttgtgttggacttcagtttggaaaagtggatcaccatgtattcataagtaatagaaacaaggcaattcttcagttagatagtcctgaatctgctcagtcaatgtatagctttctgaaacaaaatccacaaaatattggtgaccatatgttgacctgctcattatctccaaagatagacttaccagaggtgcaaattgagcatgacccagaattagaaaaagaaagccctggcttgaaaaacagtccaattgatgaaagtgaggtgcaaacagcaactgatagtccctctgttaaacctaatgagcttgaagaagaaagtactcccagcattcaaacagaaactttggtacagcaggaagagccttgtgaggaagaagctgaaaaagcaacatgtgattctgactttgctgttgaaactttggagcttgaaactcaaggagaggaggtcaaagaagaaattcctcttgtagcatccgcttcagtcagtattgaacaattcactgaaaatgccgaggagtgtgctttaaatcagcagatgtttaacagtgacttggagaagaaaggggcagaaattattaaccctaaaacagcattgttaccatctgacagtgtgtttgcagaagaaaggaacctcaaaggaattctagaagaatctccatctgaagcagaagatttcatttctggaattacacagactatggtagaagctgtagctgaagtagaaaaaaatgaaactgtttcggaaatattgccatcaacttgtattgtgacgttagtaccaggaattcccactggggatgagaagacagtggacaaaaagaatatttctgaaaaaaaaggtaacatggatgaaaaggaggagaaggaatttaatactaaggaaaccagaatggatcttcaaataggaacagagaaggctgaaaagaatgaaggtaggatggatgcagaaaaggtggaaaagatggcagcaatgaaagaaaagcctgcagaaaacactttattcaaggcatacccaaataaaggagtgggtcaggctaataagcctgatgaaactagtaaaactagtattctggctgtatcagatgtatctagcagtaaaccaagcatcaaggctgttatagtctcttctcctaaggcaaaagctacagtttcaaaaactgaaaatcagaaaagttttccaaaatctgtgcccagagatcaaataaatgctgaaaagaaactttcagccaaggaatttggtctgcttaaacccacaagtgccaggtcaggcttggcagaaagcagcagtaaattcaaacctactcagagcagtcttaccagaggaggcagtggaaggatctcagccctgcaaggcaagctttctaaactggattacagagatataacaaaacaatctcaggaaacagaggctagaccttccatcatgaaacgggatgacagcaacaataagactttggctgagcaaaacactaagaatcctaaaagcactactggtagaagttccaaatctaaagaggagccattatttccatttaatttggatgaatttgttactgtggatgaggttatagaagaagtgaatccttctcaggccaagcagaatccactaaagggaaaaaggaaagaaactctcaaaaatgttcctttctctgaacttaacttaaagaagaaaaaggggaaaacttccactcctcgtggtgttgagggagaactatcttttgtgacattggatgagattggggaagaggaagatgcagctgcacatctagcacaagctctagtcactgtggatgaagtaattgatgaagaagaactaaatatggaagaaatggtaaaaaattcaaattcactttttacattagatgaattaattgaccaagatgattgcatttcccacagtgaacctaaagatgttactgttctgtcagtggctgaagaacaagatctcctcaaacaggaacgcttggtaactgtggatgaaattggagaagtggaagagctacctttgaatgagtcagcagacataacttttgccactttaaatactaaaggaaatgaaggagatactgtaagggattccattggcttcatttcttctcaggtgcccgaagacccttctactttagttactgtagatgaaatacaagatgacagcagtgatttgcatttagtgactttggatgaagtaactgaagaggatgaagactctctggcggattttaacaaccttaaagaagagcttaattttgttactgttgatgaagttggagaggaggaagatggagataatgatttaaaagttgagttagcacaaagcaaaaatgaccatcccacagataaaaaagggaatagaaagaagagagctgtggacacaaaaaagacaaaacttgaatccttgtcccaagtgggtccagtaaatgagaatgttatggaagaagatctaaaaaccaatgattgaaagacacttaacagctaaaactccaaccaagagagttagaattgggaaaactctgccatcagaaaaagctgttgtgacagaaccagcaaaaggtgaagaggccttccagatgagtgaagttgatgaggaatctggattaaaggattcagaaccagagcgaaaacgcaagaagactgaagactcttcttcaggcaaatcagtggcgtctgatgtccctgaggaattagactttcttgtacctaaggctggattcttctgtccaatttgttccctcttctactcaggtgaaaaagcaatgacaaatcactgcaagagtacacgtcataagcaaaatactgagaaattcatggccaagcaaagaaaggaaaaggagcagaatgaggctgaagaaagaagctctaggtgattgggggaaaggaaagaattcactagaaatttgtttagggtccagttgatttgtgtatttttgttatcatttaatttgtaattttcgtttcagaagcaaatattcgtgttgtacaaatttctgattgccctaaatgtagagagactgatggggaaagtatgatgggtttgatttttatatcaaatcatcaggcatggagaaatatcttttagaagtgttaaaataaatgttcctactgtatatttaaaatacaaaaa

SEQ ID NO: 56626 - DNA, 371 bp, Homo sapiens
cggacgcgtgggcggacgcgtgggtctgtccccacctggaggcaggtttgtccataaccaggattgggaggcagctcagcgtgtggctgaggctcacgaccctgacagtgtcgccgaggtgcttgtgggacaggcccggggggccttggaggagaaggactttcagaaagcagaagggctgctgctccgggcccagagaccaggcctggccctcaattattataaggaggctggattatggagtgacgctctgcgcatctgcaaggactatgtgcccagccagctggaggctctgcaggaagaatatgagcgggaagctactaagaagggggccaggggtgtggagggatttgtggaacaagctcgacact

SEQ ID NO: 56627 - DNA, 644 bp, Homo sapiens
ctgggtgaggtgagcgagtcaagcccatctggaaatgctaaactcatcagctcagtacctaactgccaatcaacacactgccaatgcgggtgggctaagccgccaggatgcctgcagcagatggacgctgcccatccttgagccagccagctgggggcagagaggtgggtggcgggcacctcatgccagctgagaccaagagtggttgtatacatttctgcagcttgcagatttcatttttttggtcaccctttaagtgtccttctctcccaggatgagtgaggagctgtgctgatgttgggaacttatctttttccaggatccataacatttaggggaattatttgcgggctttcctagtgtattctaagaagttctaactctccatcaagaagcccaagattcctggagtctttttttcctctgccctgatcaactggggcccaggaaaagcaatgtctcttcacgggcctcagggccccagcagatggggctgggtcaggaaccatctctgtcccaggtgctcagccctcatatgcattttcttctggagcctcttagaatctcctccagaggacttcatagagctgcctcccccagggatgggtgaagttggggagcaaaatggggcttctgtaagtaga

SEQ ID NO: 56628 - DNA, 425 bp, Homo sapiens
  misc_feature (1)...(425): n = a,t,c or g
tctcgaggatccgaattcgcggccgcgtcgactgggaacacaaataaatgcatttagggggcttttggtgaaaacatgataaaagggattggtaaaaaattgggagacattctcatccattttacagacatgtaaactttcccagtcacacagcaaggtgatggtagaatgcagaatggaactctagtcccccaattctgtagttttaaaaaatatagtgtatataaaatattttagatacacannnnnnnnnnnnnnnnnnnnnnnnnnnnnnnnnnnnnnnnnnnnnnnnnnnnnnnnnggatnnnttnatncnnnantgnnnnttnnnctgnnnntnnnnnnnnnnnnntnnnttttnnnnnnnnnntttttnanatccnggcangcaggntactnatgcctgaatnccagnntttgggagg

SEQ ID NO: 56629 - DNA, 1278 bp, Homo sapiens
tatactatacatatatatacgttctggttggcaagccctgctgatcagagaaagtctctgcatgttctagtgttagtaactaatttttatatagttaatgtaggataaagtagagtgcattaagacacaatattgtaatccctactctaggcacttgcctttaaactatgtttttcagccccttcagaagggttctactactgtcctatacaatcaagtaactgaaattcttgggaagacactttgctcctcatctttctccccgaaacaatgttgttttgttttgttttttttccttaatttgcacgaaaacaaaaattccatatcaatgtgccttgccctggatagcgattatttgtggaattgttgcacatgctcctctattgaaaggggtttttccctagtcaagcatttggagacactttttgtaaatgtgacttttatgtcagccatcgtcagtttcaacatctagaactaaatagaaagctagttgttccgcagataggagtagtctttattgtcctgtacggtcggtggcagtgctattctgagatctgtagatgcttagaatatcagtattttggatgttgctgcattttacaatttatttggagtcttcctttattttcccccagatatatgaaaatatgcaatacctgcttatatcatgtagaaaagcttagcaattattaatttttcttttattttttttttatttgaccaaagtcggtgctgcacttgacgcagtgtgttttaggtgtttgtctttgtacttttttgtgatttttgaatgcacgtgcgcaggaagggctcctcttagagaagcagtcaaactgtgaagcactaagctgaccctgcttcaagcaattttgtttttacaactgttcctttcacaagcaagccttaaaaaaaaaaaaagacaacttcctttttcttcagctcccacaccccatttttcttagcagactgcagtcaatccacattcaataaaaagtatataatgcccatttttatatgcacgtttttaaacttccaagttctgaaaattgtttactggttatctctatttaaggaaaaaaaaataaaataaaacattttggattttcatatgtgtctgataagtggttgaatagtcgtttggcgctgttgtatggtgtgattgtcagtgtatggtgtcacttcctatagccagccagcatactttgccttcccctatagcacttagctgggcattactttattatgacatatgtgcactaaaaaatgaaaaaaaggaaa

SEQ ID NO: 56630 - DNA, 106 bp, Homo sapiens
ggaccaggggtggcaacctcttttccagaacggggcagaaggtgaatgcagttcactctagttctctgcattgtgtcttctttttaaagaaaataaccctttacaa

SEQ ID NO: 56631 - DNA, 420 bp, Homo sapiens
ccccaccccacttccctggcctgggcctcgaaagatgaagcaactgaatttattcttaaatcagagaccaggaagggaaagtcagctggggccatggctaccttcttgggagagtgacccctgaacccagccaaggccacattcaagctcagtgtcaacactaggcatgaacctccaagggacctgtgggctggggcagaatggcttcagtgacaagactcaaaggaggcactagcattgtgctgctggactgggggaaggacttgcttgggaggagaaccctacataggagctgggggcaggtggacctagatccaaccttcaacccctagtgaggggccaggcagaggacaaggcaacaactaagctaggtaaagttctggaaagtttccaagcccaggaggaacaaggaccactctg

SEQ ID NO: 56632 - DNA, 457 bp, Homo sapiens
  misc_feature (1)...(457): n = a,t,c or g
acaacttccctatagacatcacaaaatggaacagaaaattctagtggatcaccattgtccattcataggcactgcaaatgtgttatatgtctcactcaataaaccaacacagttttgctgaattatgctaagtcaaagttttctttaaattccattatccttatcattggtcttggtgaaactgcaaataaataaaacctctaatgagttatttttagatatctaaatggacacaggaaaatgttaattgactcctcaaatttacagaacaagttaataaaggtagaataaaagaagaactagtctaataactttcttctaagactacagtgaaatttattttatctcataacatcgaatgtcccagctaaggaacatcaaggagaaatttgatgcttttcattctttagaatttcactttgatgcagataatgntgcattagttattcttaatttt

SEQ ID NO: 56633 - DNA, 1051 bp, Homo sapiens
tttttttttgcaaatcaaatcataacattccctactccaccacagcagcaaggaagcagaagccttagttctacttattccttaactgtacctgctttatagattttgaagtaaaatattttggtacaagttaccaaccaattaaattagcttttgctttttcagtcaactttcggactcgtcctctactagaagttccaaaagttaaagaggtgtcttcgaacaacagctgcctttgctcctcttcagagtcatcctcattatagaaagctgtccttcgaccttgatttctagttctcatgtggggttcagagcctttgagttcttcaaactcttcttcctcatctataggatcatctatcttttttcggttacttctccttaacactttgacacttgcagggactaggagatctgcatctaatttttgtgtcttcatcttccttttgggcttcctacctccacgattctttttctgtaacaaatcttcctttacattattagtttcagaaagaaaattgcatgttgaagaaggaagtacttcatctctgatgggatgcacattattttgctctaaatcttctggctttggcatactgtagcttttttgggctttctaccccttttcttgtgtataatttcaccactattggtattaacttctactttaggtttccttccaggtcccctcttcacaagttttgatggctgtcctccatggccatttacttgaatggttcctggtacaagagcgttgttcttacaatctccttgctcaatgacagctgatgactttgaaagagtggacgcctttgggagtacagatgacttcattttacgtttgactggcttttccttttccatgttttcttttgcagaattattcctagtgccatgactaaaactggattgaccaggactggaaagagtattcaaagctttggaatgtttcacagaattctctagtattgttttccctggtattgcagatgcattagcttttgtaataaaagtctttgcagctgaagaagtagatggttgctcagtgaca

SEQ ID NO: 56634 - DNA, 476 bp, Homo sapiens
  misc_feature (1)...(476): n = a,t,c or g
cccaactttgacatctgcaccctcttcatggaagtgatgctgcccagggaggagctctactgcccccccatcaccgtcaaggtcatcgataaccgccagtttggccgccggcctgtggtgggccagtgtaccatccgctccctggagagcttcctgtgtgacccctactcggcggagagtccatccccacagggtggcccagacgatgtgagcctactcagtcctggggaagacgtgctcatcgacattgatgacaaggagcccctcatccccatccaggaggaagaagttcatcgattggtggagcaaattctttgctccataggggagagggaaaaagtgcggccctacctggagaaggattttgacaccctgaagtctatgacacacagctggagaatgnggaggcctttgagggcctgtctgacttttgtacaccttcaactgtaccggggcaagacgcaggaggaacagaa

SEQ ID NO: 56635 - DNA, 420 bp, Homo sapiens
  misc_feature (1)...(420): n = a,t,c or g
cgataaccgccagtttggccgccggcctgtggtgggccagtgtaccatccgctccctggagagcttcctgtgtgacccctactcgggggagagtccatccccacagggtggcccagacgatgtgagcctactcagtcctggggaagacgtgctcatcgacattgatgacaaggagcccctcatccccatccagcttgcagacggtctgtcgagcttggcccccactaacacggcttctcctccatccagtccttatgaggaagagtttatcgattggtggagcaaattctttgcctccataggggagagggaaaagtgcggctcctacctggngaaggattttgacaccctgaaggctntnacacacagctggagaatgtggaggcctttgagggcctgtctgacttttgnaacaccttt

SEQ ID NO: 56636 - DNA, 1268 bp, Homo sapiens
  misc_feature (1)...(1268): n = a,t,c or g
cttttcaagagttgaatgaatttttatgtatcaacacagatggattccagtattcattcactaagcagaaaggaataattaatttttatcatccaagtaccatacaaatatgaagttaaaatataattttcattgatggtcagtactgtagattccatgttatgatgaattccaagatcatcaatttctgcatctttagtagaaagtgtacttttcagtgttacgatgtcttcaaagagtcttcggtttgtctttatcttgctctttttgactgcaaagtgcaaaagattcctgaacaaactgcctgcacattgggcactgctgaaaatacttcacacagccatcacacaggcatgtgtgtctgcatggtaagagtacccagttcacagtcccattctggcaaacaacacagtccttgctgttctcttccgatggctcaacttcactttcagagagtcccaccttttccaacaaacttctgtctgtgtttttttcttctgaagaggaattgttggagggagtgaaattattatttgcagacatgaaaagttgcttaagatcatgaaattgaccttgagccaagagtaaatattgatacaatattctgcaggatagtttataagtcctatcaggaatatgaatcactgacaccatggaaataatatcataaatttcccggtcatcctcatcagctaaggtcaatagcgctaccaatggatagcgagatctgggtactgtaccaaagtcttcaattttagtatctcttggtaactggcaatatatttcttctttgctatcctttttaataaaatactgttcctgatagagatattcactatacagagcatcttctaatgcttggggagtgcttattctgaagcaataaacatgcttctgcagagcttcatataatttttgaacactgcacccccagtagcatgtaaggaggctatcttcaaggcaatctgttgtcaaggttatgccagttgtaattgaagctgaagatggattagtgatctctaagccaaaaggattcttgacttgtctcatttgctttttgaaaactcttgtgctgaactgggtctcttctgaatttctcagaattactggaacatcccaaccaaaccatcccaataccaggccggtggtcacgatgaagcaggtaaagaccaccgcgatgtagaaaagcggcgagtattcataaagcgttaccagaaacaccgcagccatcagggtcttgctctgggtaagaagncnctccagccgcg

SEQ ID NO: 56637 - DNA, 441 bp, Homo sapiens
ggcgtcagacccaggcctgaggcccggatgcccaagggcacccaggcggattatgcagaagtcaagttccaatgagggtctcttaggctttaggactgggacttcggctagggaggaaggtagagtaagaggttgaagataacagagtgcaaagtttccttctctccctctctctctctctttctctctctctctctctttctctctcttttaaaaaaacatctggccagggcacagtggctcacgcctgtaatcccagcactttgggaggttgaggtgggcagatcgcctgaggtcgggagttcgagaccagcctggccaacttggtgaaaccccgtctctactaaaaatacaaaaattagctgggcatggtggcaggcgcctgtaatcctacctacttgggaagctgaggcaggagaatcacttgaacctgggagacgg

SEQ ID NO: 56638 - DNA, 321 bp, Homo sapiens
ccacaaccctgggaatcttccatgtgcaccctgtcactgtgaagactgaattcccatttgggtttcaacatattgtttatcacagattctccaagtcttaaaggaatcttgtagcaaatatagattagggaaacataacgataagaattgttgctccataaaaagtggtttcaaaatgccagttctgcaatttaaaaacaaaacaaaaatgctttgataaaaataaaactcaggaaaaaaatctatagtatataaattgctttactggtctgttattttaaaagccatgcacaggtttcttttttaaatcagttatttatt

SEQ ID NO: 56639 - DNA, 395 bp, Homo sapiens
atgatatagaattcatatagtctattctgttgtgtctaaatctgtaggcattgtgttgttgttctttaggacgtatttatttaacttgcacattttttcagattcttatttctactaccaacaactaagtaattgggaaataattctgtatttcagtttctgagtaaaaccagtctgaaataggataaaagccaccaaatattttcttttttttccagaatttgttttgccattttttagtgctatcatcattcctaacaagactaacttacagaaaaataattatatctgactgatttaaaatgttcaggtttcttatccaaatcccttggaactatggaaaggagtttgatttcacattcacagtgtatttacaaaatacgctgtgtcatata

SEQ ID NO: 56640 - DNA, 349 bp, Homo sapiens
cagagagaagcctggatgttcaggaatgcaaagaagacaggactctcccatttcagaaacaactggagtctcaaaagcgactgctattccaggaggcagctttggtagcatcccaggtgcccataggggagtcagtacagcagaccggagccatcaagttcttgatcaagaacagcttgatcaccatcaaaaccagcttaatctccatcaagaacagttctagttgcagctccatcaagcattaaggacagctcgatcaccatctggccacttccccaccccacatccagccacccacgctttgccaagtgctttctcactcagccctggctcatgtgaccttcacaac

SEQ ID NO: 56641 - DNA, 337 bp, Homo sapiens
gcacaaaatttgtggcacttttttacagcagcaacaggaaattaataaaagtcttccagtggtagggggtgaatctcattacgtttctaaggcaagcattgcttagtatcttgcttatttaaaagataaatttagctagtatacacaatagtgaccaattagattgtatgctataatacttgtaagaaaaatgattgcatactctttgttttcttgtttgagacagagcctcactctgttgcccaggctagagtgcagtggcacaatcttggctcactgcaacctccacctcccggtttcaagctcttctcgtggctcagtctcccaagtagctggg

SEQ ID NO: 56642 - DNA, 181 bp, Homo sapiens
gctggaagactaaataaagtagtgagattcttgcatctatacatggaatctctggataccataaccacgaatacagccttatacaagggtgttatgtcgatgactcattataggcaggattattgtagatgaccttctgaaatgatgacaattcagtaaaatttggaataagactacataa

SEQ ID NO: 56643 - DNA, 364 bp, Homo sapiens
actttttacagtaatcacttatttttttgtggtaattggcattgccccaatttttatcctttatgaattggattcacctctgctggaatgaagtttttataggttatggatcagctttgggtagtgcctcttttttgactagtttcctaggaatatggcttttttcttattgtatggaagatattcatatggccttcattgggatttttaccacgatgacaggaatggctatgaccgcgtttgccagtacaacactgatgatgtttttagccagggtgccgttccttttcactattgtgccattctctgttctacggtccatgttgtcaaaagtggttccgttcgactgaacaaggtaccctgt

SEQ ID NO: 56644 - DNA, 595 bp, Homo sapiens
atcaacatctggtcgagtgtctgggaaatggcagatctaggccttgagcctggtagagctacctcgcttcattcccagcaccccagtaccttactgcctccacctcacccccgtgctccctccttggctgagcgtgagaacagtggcaaaaaaaacaacataaatctaagtctctacatcctcattagatcctagagtcagctgatggtgcccaaattatcatcacaacaatataacgtaacataacataacacaaccaccacgaccaccatttacagttcatgtgaaataggagtgaaccggaaccacaagctgacttggccaagaaccagctttagcattaggatgtcagagagctcagctgccacctgtgagactgaggggaggcagtggagggttctgatggtgagacccaggtatgtgtgtctcagtggaacctccagaaagctcaaggaattcatggcactcggagacatgtagttgggtggtttgcccattgtttagttattgtgcatgtaaatccttttcttgcagaggtggaaatcagcttctaaggagatggagtcaaagtcaagcaacagaggccagaggggag

SEQ ID NO: 56645 - DNA, 1178 bp, Homo sapiens
tttttttttgctaaatattgtctttttttattcacagatgatagtcaatgggcacaacatataagtagttacaatgaaatgagaagcaatatagcagtcaggctatatgcatgatttaacaacaaaattatcacttccttttaatttagaataagggacaatttaaaaagcatctcttggccctatcatttctgttccagtagttagtgttcatatgtgaatactaagtttgacattcctttctcccatagaaccattttggtgatttggatggtggccactacactgctttctgcaagaattcagtcacccaggcctgatatagctttgataacacacgagtcagtgagattccagatacttctgttcaaaatgctatggatctcctgttctatagctgccagcccttttccataccaatacaaaagcgttaagagccaggaaaatggtgtttcctgaacactgcaaaacaagcagtcagcatctggtggtagagttttgcttggtcattaaactcttagaacttacttgcatcattaacatttttatgccttgtgggcatgttatacaacctttcatcttaagataaatctgtcgtccagaagatgggtcttggttcactaaaaaaggcagtgtgaatataatgcaatgctaatggatgcaggccttcaaaacactgcaattatatagtgagttcaggtttcaaaattcagtgtttatcagaaaatatctcataatcatatatattcaacaaattattttccaaagatactcatgaagctaaacaaaaataatttttgttcaaatggctcgatgagtttaagaatatgatttgaatatatttgatataataatttagccaagaagtggtctcttagactaattgtaaaacatgaaaagttgtcagcttcacaatttgaaccccatcctttcatcttctccctgagagcctgctaatggtggtctctttctgaagcacttttagaatcttatttttatatggagtgttttactgactatatatatagcaactgagtccctcggttaaataaattataagctcctttaaccctcttaatacatcactctgtaaagatgtagtttataatgcagttcactttgcaatcatgcctgactccccgcatttttactttaatatttagaatgaatattctcaa

SEQ ID NO: 56646 - DNA, 2487 bp, Homo sapiens
tttcaggattaagcatgtatttattttagttcagttaaaacaaacatacattgtttcattgaaacggtgtagcactctttgccaacaagccatactagaattgttggcctctaacagtacagtggggatatttacactatatacacaaagttaatacacccaggttctcaaaggtcttccattacactagatcacattttatttcattacactaggatcacattttgattactgcattttgaaaatgtattccttatttaaattttaaataagagatctgaatttgtaccaagatttcatgaaaaaatttgatgttgtttattgcaaatacaatttaaacaagttttttttagtgtttgtacacaatttgtcaatttttccaatattcaattttctgtacaggtacttttggggacaattcttatagttacataatgtgaattcatcaaaatgcagttaagaaacttacaggaatatatacacttgaacccaagacccaaacctgacattatatacaacctatttacaaatacatatggacagacaatatatgtacatagattatcataaatattgaaaaataggttagctttaatggattaatgttgttctataaataacattacagttgtaactgaaacatccacggaagacagtaatgcaaaatgaggtgacaagacagtggttttaatactgaagactgctcattaatgggaattcattgttcaggaacctcaaggtagacaagatagctcccagaaaatcatccattggaattttccctaggcacttgattttgaaccttaaatagccagaggattggaggagcttcctcacattaatttgctgtagagaaaagaattttttttccattccttcctggttgccacagtatcttctcccatacaaaaaaaaaaaaaaagtctgtagaaacaactcttggtattccctggcagggtcttagatacaaagtcagcaactctttccaggagctcatgcaaatttgccaattcttggtctcaactagaggtgaggttctgcattcgaatggagtgcctaaagcccaattaaatgaaagcagtgccgtagaatctgtcttcccactgcctttctatttctagatggcccccaattattttatcttcatagaaacagacaaaaatggaccaacggtttcacccaatgtagcactacaagacgtcttccagttccataagggtctttaattacacatgtatcttgtttgtaaatttagtcacatataatacaagaatgcgtaacaaaaaccatgtctccacatttctggcccttgccccaaacaacatttttagttcaagggcaaaccttacagccagatgaccaattgacaattccattatttgcttccttcaaccacttaatggaattatgtatattagattttagacattatgcctgatgagcgaagtaccacattatttaataatatattcaccatacactgtgacgtacgataaatgtgctcttaaagccaagtttcaaagtaattattttcatttctaactgggattgaaatggaagggttgacatgcagttggaccaaaatgactactaacactcagtttgcactgttttccctagctaacccatttgttggatgtaaacaagtaattctacgttgtaacaagaatgagatgacagtcccagtgcaaatgagtttttataaagcttactgcatgagaaacccagtgggcctacgcaaagagaacttatatcatatcaaacataggtgtaacctgtggattagacctctactgtagacaaaacatgaacacaactaagccatacattgtcaagtaattcacacttccagtaggtgagcattttgaaaaagtgtactctctggacacaataattttggcctattgccatcaaatgcccattttccactgctggaagcaatgtcaaaaaagggctggccccaaaaaaagacccagagctgtcaatacaacactggagacagatgcaactgaataaaccctgttttacccaattgcactatttggtacctcaaaattagttattttatttcccacagaaatatctgcattatcttccattctaataagttgaagacacaaacatttcagtctgaatgaaccaaattgtttggggacagagaagaaaagtgatgaacagagttcatctgatttggtatagcaataatcaatcatcttttaagtaatggtgacgtttaaatggaaaaaactatgctcctaattcatggtacaatttttcattacatcattttctctaaaaattattttgggtaaaaaagtatttggcttattatgcctacaaaaaggcaaaccatttcattatattaatattcatttttaaataccaatgacattattttatggaatttattgataactgcttctgaataaagttcaaaaaagcaatttcttaaaagtaaaagagtgcttctgaggtctttaagtattt

SEQ ID NO: 56647 - DNA, 342 bp, Homo sapiens
  misc_feature (1)...(342): n = a,t,c or g
aggaaatagccaatagtgaatatttttattatgtgttagataaagcttctttcttcttatgcttatttaggtgaactagaaatatggtttcagtgaaatttaagttctgataagtacagatacatagcatattttctgaaaaatttgaaaaacacacacaaatataaaaaattaccatatccattctatcaagcaaccagtgttaatgttttaatgcttctttccaatggctttttataaaaatctcattgagactattctatgtatttaatcttactatgtattcttaacaattattttaaatttttgatcaccaacctaaatagtttaatgaaanttaac

SEQ ID NO: 56648 - DNA, 730 bp, Homo sapiens
  misc_feature (1)...(730): n = a,t,c or g
aaaaaacctgttcatacttaatgtctttttaatttcaaattctacttgttcacggctggtatacagaaaagtgattcatgtttatacattaaccttgtatcctgcaactttgcttagtttcttattctttcagagtttttacataaatgattgccatctgtgaacaaatacattttcatttcttccttcccaatctctacaatttttatttcattttcttgtcttactgcactatataggacttccagtatgatgttaaaaaactataacaggggaaatccttgctttcttcctgatcttagtggaaaagctttgcatttctcaccattaagatgttagcagtagattttttgtagatattctttatcatgttgaggaaattcccctgtatttctagtttactgagaattttttatcatgaatgggtgttggattttgtcaaatgctttttcttgatccactcaacagaatcatatctattgatatgatcatgtgatttaaaagaaaatannnnnnnnnnnnnnnnnnnnnnnnnnnnnnnnnnnnnnnnnnnnnnnnnnnnnnnnnnnnnnnnnnnnnnnnnnnnnnnnnnnnnnnnnnnnnnnnnnnnnnnnnnnnnnnnnnnnnngggatttttttttttttttagcccattgatgtgatggattacattaactgattttggaatgttgaaccagcattgcatacctgaggtaaatcccatttgatc

SEQ ID NO: 56649 - DNA, 567 bp, Homo sapiens
tttttaatggttggatttgttttaatgcacaatagtaagcaaaatgtgatcatttactatatgcttgatgttataaattaacattcaatacaaataatcatccttatcttctgataaacaagacatcgggcaagccagataaaagccagctcattggtattatttgggacatctgaatatacatgagatgtgggagcactctcacctctctggctgtgtggttccccagaactgcagcaccaaatttgccctgctttacatattgaccatttgtgtatcgatatgcatggactgctgttgcgaccagtattgtgggagtgctcatggtggctggtgctgtttttggtgttgcctgatttcctgttgctgccgttccctggcctttcttaggctgttttggggctgtgtactggaaaaattcatttccatggccagcagctgcctgatccagtccaaaaagtgaggccaatctggcaccgccgctcggcgaaaggaaatcggtgtcgtcctcgtcccccgcaccgaacattgcgttggctttcaccgggttgcggggaggaagctggg

SEQ ID NO: 56650 - DNA, 892 bp, Homo sapiens
  misc_feature (1)...(892): n = a,t,c or g
ttttttttttccttcactcattcatttattctttcattcacttatttatacaatcaatttttattgagcacatcctacgcacaagacacaatattaggtacagaaaagctataaagataaatgtgacacattctttaccattaataataatatatattatctaaaatttaatttgagctaatatataactgacaatgaaatatttggaccacctaaaacaaggataaattattctgtgacaagtttatattcttgcattatgcaaaaatgattctaaaataaactatttttttcccagaaattgtatgagctatacattgctatgtaacaaattgccccaaatttagcggcgtactacaacaaacacttcttatctcatacagtttctgaggatgaggaatccagaatggtttccttgggttttctggctgaaggtctctcatgaaattacgggcaagctattagcannnnnnnnnnnnnnnnnnnnnnnnnnnnnnnnnnnnnnnnnnnnnnnnnnnnnnnnngttgacaggaggcctcaattccctgctggcatttgatagaaggtctcagttcttcatcatgtaggtctttccagggctgctcaggacatggcagttgacttcccccagagcaagtgatccaagagagagcaaggaggaagccacagtgacttttatgacctacttcaaagtctcacagtctcttccattttcctgtattaaaagtaagtccctaattgctaaaagagtacatttttaaatgttctcaccacaaagaaattataagaggttatggatatgttaattagctcgatttaataattccataatgtacacatatataataatataatatttacccccataaatacatacaattattatttgtc

SEQ ID NO: 56651 - DNA, 444 bp, Homo sapiens
gagcgaaccatgatgccaggtccctaatcatggactccccaagagctggcacccaccagggccccctcgatgcagagacagaggtcggtgctgaccgctgcacgtcgactgcctaccaggagcagaggccccaggtggagcaagttggcaaacaggctcctctctccccagggctgccggcaatgggggggcctggccccggcccctgtgaggaccccgcgggtgctgggggagcaggtgcagggggctccgagcccctggtgactgtcaccgtgcagtgcgccttcacagtggccctgagggcacgaagaggagccgacctgtccagcctgcgggcactgctgggccaagccttccctcaccagggcccagcttgggcaactcagttacctagccccaggtgaggacgggcactgggtccccatccccgaggaggagtcgctg

SEQ ID NO: 56652 - DNA, 448 bp, Homo sapiens
ggttactgaaatctgtccatcacaatccttcaaaatttggaattcaggaagaaaaattaaagccatttgaaaagttcttgctgaagctagaagggcaattactggatggaatgatattccaggcctgtatagaacaacaatttgattctctcaatggaggagtatctgtgtcaaaaaatagtacttttgctgaggaatttgcacatagtattcggtcaatttttgcaaatgtagaagccaaacttggagaaccttctgaaattgaccagagagacaagtatgttggaatttgtggactctttgtattgcactttcagatttttcgaactattgataaaaagttttataagtctttattggacatttgtaagaaggtaccagccatcactctaactgctaatattatttggtttcctgataattttctgatccagaaaataccagcagc

SEQ ID NO: 56653 - DNA, 4705 bp, Homo sapiens
tgttttttacaatttttatttggtgttaactccacaagaaaacaaacaaaaaaaaatcagttactctggtgtacgtgaaatcagaacaatacaaccacgggaaaaacaatctcagcccaggaatggaaactggtacttcagtgctatggaaatgcaatgcgcttcataccacagtgcgtttcagcgtttgccaactttttaaaaatgctttttctttgtgatcatccattcacaaaactaaaaagccacactttcatctctgttgctgaaagcctctgagcttcagctacttaactatgaaaacaaataaatacataatttgtgaatccctttgctcacttcgaatccgtcccattcacctgtggaaggtgctgcatcttctcacctgtgtctgaggaagtgtgcacctttgccacctggagccctttcctaataaacagcagctgtccaaaatcaactgtgctcaaggttgtgtctgaaatctatttatttggtctttgctacacaagcaacgatttctagaataatcgtcactgtagtgatatgaggaatttacaactttcaatccttttttacttttgctgttaaattatatttcagtgcagatgcttatcaatttttaggaagctccagaagaatgaaaaatacataaaaacgtatctgaagttcgtaaataaataacagcaacataaaaccttacacatgcgcgcgcgcacgcgcgcacacacacacacacacacacccacccaccttaaagtgtcaaaagatgtgttgtataaaaataaaccctaacacgtgggaagatcgacccggcgggcacaccaggtccctctcggtgaggacacacagaccctcaatgactccacagtctttgatggtactttcttttctgtgttatcaattaagaaaaaggcaacaaaacccaaatgttcaaagcaaatcatagatttcacagccagttcagctcccagctaataaattatatgtgtgtttactgcctgcccaaatgagtggtgaagctgtctagagcgcatcagacttttctgccattcctgatgctccaggcatgctacgctgatttcacagattaggttttttttgtttttgttttttaaacaatgagttggttaaaaaagaaaaacaatgtaaaaaatgtaaaatgtttcggctgtgcacatactgctcctcctggcctctgcctgtggcacaatgccatgagagccggaggagcggatcgccatgcacagacgcgactcacaagatgcgccggctccccgggctcaccaaggagaaacgggagccagtcccacggagcgacagtcagcaaaaccaccacacagggatgtggaaaactcatgactctacccgccccaacccaccacacacagaacttgcccagaacattctctcaaacacaaaatgagatcgaagctatactacatcacagccaagaagcggctagctgcagcagccaaagatttctctgggtgatgaggtggcctttactgcatgtcaaatgttcacaatttcaagttttgggggtttcaattcaacataggtcaccagaaagtaacaatctgcaactaaggtccttagcacgtatggaacactcaccacaaagaaccctgcatggggttttggtgtaaatgtaactgcagtatgagagcaggtaaggggtggggtatgcacccttaccccactgtgtctcgcatacgaccccacaccccaaatccttggcttcttcagttagcaagaaagtcacgaaccatagtatcttccgtgatactttaggggaaaagaaatcctaagagagaaaacacagtatttggtgagtcttgaaaagcacacctctgcggttcctactggaaatgtacatgagattttgctgaatggagaccaccgctgagtcacccaggcttccctctcgccttcagaaaggcatcaagccactgtagggtaagaatggatatcccagttcttggagaacaaagcctaaatgctccaaagctgaagtctctgaagagcagaagtggttgttgacactgcaatgctagtaaggtcatagtgatataaccgcagtcggaaggaaaattaactgcagttaagatgcaaaaagcagtgatacttctaagacaagcacatgcacacccattcttgatttgacaacacaatctagtctatttcaaatagccaagaatttaacagctgggaaaaaaaatctttaacaggatagctgtcctcaactctaaaataagcaagaagagaaagataattattaccaatctgaatcagttaattgaagaggaaacctaagttgttgttttagattaacaggtctcactgaagagtaattttccatcacatatcatttttaaacaataatttgtactattttgcaggtttagagatgagttcgagaaaagagctcctcttcactagggcccacccactcgcctccgccttctgagcctgtctcttccgaggtggagctggcgctggagcacatctttccgcggaagccatctgactttgctccagaatctctctctcctgtacatcttgcttcataaacagaagacaccctattaaaatctaacaggcgctcttcattactgggtgtctctttagcatctggatattcttctaaaccactctctcccttggcatttgtgtaacattcttcacactctgatgcaggaaaaagaggagagtacaaggctttttcccaccaggtctgtttttcttgacttctattcattccttgtatatcagtgttcaatacagggaactcttccagctgtcccgaagaaactggattatcttcataagcaggaaactgacaacctgctttgcaaccacaaaaattattaatttcttcctcgcattgtgccattattttacaatttgcttctgagctttctaaatctatttccagggattcattcatgctacattccaaacactgattttgctttcctactgaaagaatcccagttgattcctcctgggaatccagtgatgtctgagcactcttttccatcccagatttttttaacctgggaaggaattttccagactcaagctctgattttccatagtaatggccttctttctctgcatcttcttccaaaggtttgagatctgcctgcggatcttcaaatatatcaacttgagaaggaatgggaatatttgcttcatctttctcagattcaaattctgactcgcttcctcctcctggggacagttcggatgcagaaattgggcgaaagtgagtccgaggagagatccgaatagccctgtattgtgttctgtcaacaccacatatcctggggtgaaacacttcactgtctgaatcagaacagaggattgatttcggtttaaaactggggctgaaagatgcaatcccttcaggttcaaatgagcattctacatgaagaacttgtgaaaatggattgcttaagtcaaaggaagaaaatgagtattcaagtccaggatcttcgacttgaaagttgccacaagctcctagtaagtcttcatggaagataaaagaaaatcccttatttaacccattttccccactcttcggctgatcattctgttcaaatgacacgaagggtttccataactgcctgtgcccaggagcaaaactgtttcctggggtcataaagacatctgtaccagctatcgtcacaacatcagaagctgcacactgtaacagacttccttttgtgtgactaggtggtacgactgcccactccccatcactattgaaggttttgagttctccataaactcctccaagaatgaatgtgttttctttatcttgggctacatcccagggtttagagggtgttgtataatcaccaccatccacgtttgatagctcactagaagcaaatgctcttttctccaggctctctttctgtccctcccacagatggtactctgacctccgcacagccttatcaggctcctgaagggtctccagttcagcttcagcatctagacagcagcagtagttatttacatctgccgaaaacaactcagcatcagttctttctatttctactgtagccacagaatttgtgtctgccatctttgtccaaatgtctttaataacccctgagctgtagccatctccatgtggactttcattacatacttgtgtagtttcaaaatttttgttttctgttttttgttctagctgaataccacagacggattctagtttagatgtttttttgaaaactaatgtaggaatctcacctaaagttctactgttttgctggcaagtttcatcttgcaaaaaatctagaagttcttcatctacataatttgacgagactctaggaactacataattaatatcttcggcattaaactgtgtggattcttcaaactgaatatttaatgtttcattgtctgaacgtgtttcttctgaatgggaccatggactacaagttcttgttgaaagattagaacagtgttcattttcttcaaaggcactatttttggtccatattagcaatctagactgtgttttcccaagcatattagcactagaatctgtattttcatttcccaagttgagtgtttcaaaagaaaatggtaaaacagaattactgcattgcacttcaaacactgaaaaacaagagtttataccagatccttcattaatatctgaaaagagctcttgattgccagc

SEQ ID NO: 56654 - DNA, 399 bp, Homo sapiens
ggaaggttaaagtgcaagaatattgtgatgttgtctcctctagtaatttaaatattttccaaagggaatagtgactgatagtaagtgtttgaaagaggaggatatttggctgctagatagaagctaaaagtgtctgtaaaagagtaagggaggaagaatatttcctcaggggagaggaatattttctgaggaggaaatattttatgttaaacatcaaaactaataggtatctagcatacagcattgttaaatacagaattgagttatatgtaatgcagaatattataaaattgttccttgttcaaataacaaaagtagagaacatggtagcttgaatttagctacattagccagagcaaagaaaaattttaaaatgggaaaagacaggcataggtaatg

SEQ ID NO: 56655 - DNA, 365 bp, Homo sapiens
  misc_feature (1)...(365): n = a,t,c or g
tttctattgtgtactttcaaaaatattctttatcttctgtacatttgtactgaaaataatatgttttgatgtaggcctatttggaataacttgtgtcttcatccctaacttttgaataaaaattaccaacagaccaaatttttgaatttatattttcacagtgcctggttattcacagatattaaatttaagtgtgacattagtttagtcattttcaattgtgtgggatgttttcaagttgagagaataattgaaagggattttatgtcagaagtatataaatatttaaatgaagtttttaccaatatatctatgcctagtgaatttgtggntaaagagctaatcttcccangaatcaagaaaaa

SEQ ID NO: 56656 - DNA, 410 bp, Homo sapiens
aaacttgttggactggaaccagtcagcacctactctatccgtgtatctgcgttcaccaaagtaggaaatggcaatcaatttagtaatgtagtaaaattcacaacccaagaatcaggttagatacagtttttgagcctaaaatgtttctttttatatttaacacctttcttttccttttcttagtttatatgataaagtatcattacttaagagtctactcaaagggaaattgcatttcagtgctttacgtttagtcttggtcttgtgtgaaatcatatgctgtatgtgtgtttatacatatattttcacacatggtttttccttttgaacagaggaagttgaaataaaatagtagtttgggaacaaaatagccttctagatatctgtgaaaattacctaattcttagaac

SEQ ID NO: 56657 - DNA, 366 bp, Homo sapiens
gtcaagctgctaatatacaagttgtcatggtaccatgtaacttaaattgatgaatttctatgcaatttactattctctgaagcctatgaatgcagcctcatctcattttcagttaagggtactttatgtataattatgtcattgctgccttttatgtaggaaatgtaaaaaagttttaaaaggcgaaaataacattacagatttcatttttatacaggttacaatattaaacatgaaactaccaaattccaagaatagtaaaattctagagtcagttgattgattgaaactatttgacaaaacagttgaaagctgagctttcagtcaagaagttggtgaaattaatgtccttaaacttttccttta

SEQ ID NO: 56658 - DNA, 154 bp, Homo sapiens
gggatgtgatctgatttaggatttaacaggctccctctggccactgcggaaaatagactgtcagggcgagggtggaaacaggcgaccagtgagggggaggcccctgcagtggtccacgcaagtgtgatggcagggacaggggaagtgattttta

SEQ ID NO: 56659 - DNA, 397 bp, Homo sapiens
aatccttccccatgtttatttccattcactattcttttatatatccagggtggttaaattgcagtttggctctttaggatacatggtgctttgggaattctccttataagtaattgcatgcacagatatcttacttcaaaattacctggcccatgacttctttcattagttcttttggcatataactaaatagacaattgaatatcagtttaaacaagagataaaagtgttaattgcattacctcacccacatagcaattgtaacttttgatgcccccttcaattgcaaatggttagaaatgagggaatttcagaaatatcggtgtgtacaccaggtagtctagtttatggcatgattttaggaatgagaagaaggcaatggcttgccaaattctct

SEQ ID NO: 56660 - DNA, 461 bp, Homo sapiens
cagaaaagagcttcatattccccttttatattactgaagcaataagcaatctgagctgaagcagcaaaaagagtcacatttccatcaggtcatcatattccctgagtctctgcagcaaaagccatgtcagaggggagattataactaggtaactataacaagcacttgagcacttaccatgttccaagcactatcaccaaggtactgttggggtttatggcagtctaacggtaagaaaaatgtggtaaaatgaggtaatcatgctgctatagctttttgctttttttcatatagtatcaagttggtcagaattagctttctctgactggtctgcttccgtgtttctctgtgatggtgttaagattatgaaagaaaaagaagattacctaagactgctacaagtgttaactatatgcccttaagaatgagcttgactttggaagtaaagcttttcagatctt

SEQ ID NO: 56661 - DNA, 698 bp, Homo sapiens
gcgattagagaaaaatgttaaagaggtattggaagattttgctgaagatggtgagaagaagattaaattgcttactggtaaacgcgttcaactggcggaagacctcactcggactcaacactacacaccaggccaccacatggcgccgcacccagcattgacacttcttttaccttgtctgggctctgacatccgtgccaggttgctcttcgtcatggagtcccttttactgagctctgctctgacgctttgtgccagggtgcctctccatcttcatccttcccacccgcttagcctctgcccgaccccagacagattcctttcctcacctggaagccagaccatggcctttgtggagataccctctttaccctggcctgtgcttcgccagcctgcaccaggccaccctcctgcacagatactctcctcagtactggaccaggctaccaacagccccatgtgaacccattgtaacccaggtcaggcattaacacctgcagtaggctaccatggcttccccttcccacccccctagcttggccctactaataatcactttgtcactgtttggggttgatatttggttgtttcttgtaggttcctagctttaagataggattgcatactaaaatttacttagatctttgagaactcaaggaaatcagtgaaacattattgttattaaataaaaataaaat

SEQ ID NO: 56662 - DNA, 411 bp, Homo sapiens
ggagaatagttggccatatggcaaaatgctggtgaatctccacctgtacattttaggttaaaataaaacattttcagatatatacaccatttctatgattacctgcctcgatagactttgtagatcgaccaattatgtgtcaaaattatcttagattgtatttggtattttgcgctctcatttcactcccaagcttccttggcattagggttttatttatgctgttctatcagtctacagatccccttctcttcatttctaaatttttgaaattcaacctgttatgttcaaataggctcaaatgccacattccctatcatcccacacatgtgtaagtgtatataccgcatacacatccatatccacactcacaatttccctttgatttctccgccttgatatgagttcacc

SEQ ID NO: 56663 - DNA, 416 bp, Homo sapiens
cggacgcgtgggatcgccctggcaaacctggtgtccatttgcgtgttcctggtgctggatgcagatgtgctgcctgctgagcgtgatgacttcatcctggggattctcaactgcgtcttcattgtgtactacctgttggagatgctgctcaaggtctttgccctgggcctgcgagggtacctgtcctaccccagcaacgtgtttgacgggctcctcaccgttgtcctgctggttttggagatctcaactctggctgtgtaccgattgccacacccaggctggaggccggagatggtgggcctgctgtcgctgtgggacatgacccgcatgctgaacatgctcatcgtgttccgcttctgcgtatcatccccagcatgaaccgatggccgtggtggccagtaccgtcctgggcctgg

SEQ ID NO: 56664 - DNA, 431 bp, Homo sapiens
  misc_feature (1)...(431): n = a,t,c or g
ctactacgtatttgccatcattgggatcaacttgtttagaggcgtcattatggctcttcctngaaacagnagcctggcccctgccaatggctcggcgccctgtgggagcttcgagcagctggagtactgggccaacaacttcgatgactttgcggctgccctggtcactctgtggaacttgatggtggtgaacaactggcaggtgtttctggatgcatatcggcgctactcaggcccgtggtccaagatctattttgtattgtggtggctggtgtcgtctgtcatctgggtcaacctgtttctggccctgattctggagaacttccttcacaagtgggacccccgcagccacctgcagccccttgctgggaccccagaggccacctaccagatgactgtggagctcctgttcagggatatttctggaggag

SEQ ID NO: 56665 - DNA, 1686 bp, Homo sapiens
gtcgtggacaccacggtgaggcggagctatttagggtggtaaaggaattatgattgttcttgagccaaagtaatttagtttgaatataatgaaacataccctgtaaagactgctagaaagtaaaaggattcgtcttcagaggttgtagaaggtgcccttcttagttaaaaccaaactgggaaaagtaatactggataaaatattcaggataaattttgcctcagcagaatttcaaagggcagttgttcctctgtttcattattgaatcttcagaatatagttaaagccaaaagcttaaaatatgttaaatgtttcacttataaccataatctttttacatagagcatactctgccttcataataactaaatcctctgcatgtggtagatgagtacgtttaggaaatattgtcagtgcaattaaatggcctacactttaaacagtatcataaaaacaaatccttaaatatattctacttgagtcacaaaagctgaacaacagaaaggtgttttgtttttgcctttctcacagtgttgtggtgagaatcagatgagatagtattttgactaaacacttctgaaattgtaaatatatgggtgggcattattgttcttatgtcggcttaggaggataccaaaggggaagttaatggtcacagtgcacttatgtagctttctaagctactcaatgtgattcttgttctctttgctgttctttttctcctcccccatggtgtccttcagagagaaaaggaatgtagataaatgaatccctgcagatgtgtcctgacatttcagggagggacagggtataatgatgccatcctgcaaaggcagcctgtgtgagaaaaagaaatcaaataatgtggattttaaaattacaaaagacattcatttgcagtttatgaaaggaaaatgtagtttggatacaaagctgattaaattggatcaagaaatattagaattaaatgcaaaaaataatccatgcatttatggttttgatttttatatattcccagctagttgaaaatggatgattcccacaagaagcataactcagcttggttcctgcttaccggagtatttccactatggtatatattgatacattccttccattatggtaggttgtataccagagttacagttactgtgggaatcataatttgaaattttgactcctgtgtttctggaatctttacaacaaatgttgcattaacatataacttttttcagttgactttaccaaaattaagccccacctttaagtagatactgttttaacatgtgaaagaaatacgttataaacataccacaagatatggctataaaacaatgagatcagtatccatttttgctttaaagaattggccttattgcttcagtgtcacatctcatactcaagggcatttactacaaagaaagagttctccaatattgctgttctgttgctgcctgccctatttacacatgtacctgctacttaaataggaaagcctttcaattcatggacaatacaccttggtggtaaccaggcttttatttttatttttttttcttagtgtaaaaactgtactgttttggaaatgtgctgtgaaatattaggtttaactgtgtagatcctagaataaggggatttatatagatgaagctgtaaccaagaaactggttattaaaaatttattta

SEQ ID NO: 56666 - DNA, 324 bp, Homo sapiens; identical to SEQ ID NO: 43201

SEQ ID NO: 56667 - DNA, 489 bp, Homo sapiens
ccctgccacagggcactggaatggacagcaggcgcccccagatgcagggttcccggtggtgtgctgtgaagatgtcttcctctcggaccctctgctgccccgggggcagcgtgttcccctgtacctgtccaaggccccccagcagatgatgggctccctgaaactgctgccgccgccccccatcatgtctgccagggtgctcccccgcccatgcaccctcccggggcccctccactgcctggctcagcgggccggagctgatcgctctcactggcctgctgcagatgagccagggggagcctaggcccagctcctccgcggttggccccccagaccatacctctgacccacccagcccctgtggtagccccagcagttctcagggtgctgacctctctctcccacagaccccagacacccattgtccatagccttctcagggcagagtgggctggttgtgttgacaataaaacagtgttggtttgcaaa

SEQ ID NO: 56668 - DNA, 1362 bp, Homo sapiens
  misc_feature (1)...(1362): n = a,t,c or g
cggctgctctgggggattcgtgcgcggtaagaagctgcgcgttaggtnganggtaccactgatgaaattatgaccaggtgggcccgagttagtaccacatataacaagagacccttgcctgcaacatcatgggaggacatgaagaagggatcctttgagggaacaagccaaaacctaccaaagcgtaaacaacttgaagccaataggctatccctcaaaaatgatgcaccccaagcaaaacataaaaagaacaaaaagaaaaaagagtacttaaatgaagatgtgaatggattcatggaatacctaagacagaattcacagatggttcacaatgggcaaattatagcaacagacagtgaggaagtaagggaagaaattgcagttgctttaaagaaagacagtcgacgggaaggaagaagattaaaaagacaagcggcaaagaaaaatgcaatggtgtgtttccattgtagaaaacctggtcatggaattgcagattgccccgcccgcccttgaaaatcaagacatgggcactgggatatgttacaggtgtgggtccacagagcacgaaataaccaagtgtaaggctaaagtagacccggctcttggcgaatttccttttgcaaaatgttttgtttgtggagaaatggggcacctgtctagatcttgtcctgataatcccaaaggactctatgctgatggtggcggttgcaaactttgtggctctgtggaacatttaaagaaagattgccctgaaagtcagaattcagagcgaatggtcacagttggtcgctgggcaaagggaatgagtgcagactatgaagaaattttggatgtacctaaaccgcaaaaacccaaaacaaaaatacctaaagttgttaatttttgataacagctagcactatcatgagttactacctcattgttactttctaaaccaggcccgcttcacgagttagagttgagctcccctgtagccaggactatgctgtagatatcagtatgatctgggtgtggccaaaaacaattttctttattctgtctatcaaatagtacttctaccactgtttggagaaaattgaagaaaagaataagatgattaaatgaattctctaaaagaacatattttaagagacagaacttagacataaccaagtagttgtatacctgattgtaacaatcatcttttataaaagcaaaattatgcataaatgtaaaacacccctaaacaaagggaacaaatgaatttttggttatattgttttcttggctcaaagtatcaatttattattataatagaaatttataagttgctagaaagtctatatttttaaagtacggaataaaaatatgttttctattaag

SEQ ID NO: 56669 - DNA, 1339 bp, Homo sapiens
tttttttacacaccatgacaacttttattgccctcaagagaaactccagtccacctgctccacccaccctcctgcgggaccaaagaaaacacccagagggcaaaacaaaaaggggctcaaaccaacaggaagtcagccccaccgcaagccggactacaactaactcgtgctctccacgctcaggcgtggaagccaaggctgtgccaggcctggccaggccaagcaggatgacagcaaacgcattctgaacgtgtagcaatcaggtcccctgtaatgtgcttggagagtgtggacaagggccgagatgacgagctatgagctgtggaagggaatgggggaagcagaagggcacaaacagaagtactggagggagaggccgggctctcaggaagcagcaggcacgtgccaggtggaagccagctgcaggcaggggaggaaggaggcccttactcttccttcttgtccatgggaccatctactgcagcctgcagctttgcgtgctcctccagcaagcggtcgtactccttggtgaggccctcagactgcttccgcatggccagaacctggttttcagctttctctagtttttgcttagtgctggccagctcgtcctttagcttctgcaggtcagccttcaggctcctgttctcttcctccaacttcacctcaagcattcccgacatccaacttgcctccgtcaacagcagctcccttcttgagctggtcattctcctccatgtacttcttggccgcctcactagcactctccgcctgctttttaaaggcttcattggaggcccagcagcgtggcctgctgcgaaatgagagtcacccaggcgtctaagcaggaaggaacagcagcaaggaaaagcccagccaatgtagagattcctctgggcacggaaaaagcttccatgtggaaagtgctcccatggcccccgggattgttctggaggttcaccttttcccgtcacatcatccatacttcccgaatttcgccgcacggcatcgatgacccaacagcacaaggatgacaatgagaaccacaaagaaggtgttgccataggacactaacaactccaccagccgggacttgaaaatcttctgccatcttttaggagaaatgaagggaatgcagagaagcaacacaacaaagacctccgcatagaggaaggtggcaactgcagtccactgcagactcatcctgttgctagaaggtttcccacaggaagatgtgagcttgtttccgagtttcccacagtcaacgtgcaggccccgccgcagcaaccgaactctcccacagcagccccggccccgcccctcataccgcggccggaaa

SEQ ID NO: 56670 - DNA, 1190 bp, Homo sapiens
ttttttttttggctgacaagacttaactcaagtatttaatagcttcacaaaaaattcctaataaagagcttattctgcataattagaaaagaaagacaccaagccatttaaacataatttatgtacatttatggctttatacaattatagcaaagattgttcttgtgtctgtaagtacatcaacatcaggcacttctcagagtatcggaacaagaacgtggaatctgcactgttactaaactcgggtagcgaaatgcaggaggcatgactacgtcctgatgggacttacatggccacccctggccacactgccaggctgtgccccacctcaaggagaggccaactgtaatgccaggttggtctgttcgcataaaccacaatacattttttttaatgaatgattattcccaaactaaaaccagaaaagaaacttctcttttaaaattagttataaattaagaactcttaggagcttgaatgtaagaattttaagttggggctggggttattggtagcatatatccagcagttgaacaagtccaatttgtatatcgttggagaatgatttccattttaagcatccttatcctcttcttgggatgttccattgatttactgctcactgggatacatgtgctcatttagactttgtcagtttgtcaaagcagaactttccaagtaatacatctattacctaaatatattccatacgtctatattacggaaacaatacatctttatatttaaaatatctgaatagctctataatacaatatgcttttaataacagtacaaaccagagaaaataaatcaaacaaggctgcataggtgatatcatttgcacatttcacaaagcaatcatgtacaataactgatatatactcattactccagaaagtcagtattcttacaggaaaaaaactaccagaggccacataatgtttgctttccagacagaccagatgcctttccctggacttcactgttctcagagagctaccaaggattcatgacaggatttcaacacacaatgggggcttgggagaggtataattacccagactcaggaggaagatatattttcctaagagctactccatgaagtagtaagattttaacagtgattttggctgtagttgcctctttaatgaacaaatgggggctctgaggttccttgtattatgatgcag

SEQ ID NO: 56671 - DNA, 326 bp, Homo sapiens
actaaatagagactgagggaaaataattaaagcaagtgtgaatgtgatctcatgccccacaaaggacgtgcacagagatattggtgggggctccccctgccaagtgggagttgggaggaacagacaaagggattaaaatgccccatctccctcccccagcctctcagccctgctggcctcctctgcctggaccacagcgttgggcttttcccttctccaggcctaattctatgatttaccactctgccttcaaaattccagtcattctgcttttcccttttaaaaacaatctgcattcttgggccaggcgcagtagctcacgcctg

SEQ ID NO: 56672 - DNA, 324 bp, Homo sapiens
gaaaaaaaaagaattgaagccccttcttaccacattgacctcatcttacgccattgtcttttctcacttctatgctgtagccacaccagctgtttctattcctgaaaccgggtctctgtaattgctgttccctttgactggagtgcttttcccccatggtcttctcatggctggcgtcttctctgcaggtctttgctgattctacctcttcaaagaggctttcgctggttgtccttactcataacgtagatcccactcctccaccgtcattccctgtatcattaccctgcttcatgtttcccccaagtgttgatgggtgtctga

SEQ ID NO: 56673 - DNA, 526 bp, Homo sapiens
gtggagcccagtagaattggggtgactgggcataaacctgctgagactgcttccttccctggttgtgagtgatgtgaatgcctgccttccccggacagcacttagaagcccttgataggcagcatttggcgacttgtggggcaggtgtttgggataaatcctaccttcatcctaggacttatttctgcatcagccttttaactcaggcacttcaggtaacgtgatctatgtgtgttttgactgaatctcatctcctgtgtttccctgtgcagtctagggaagcatgtctccagtctttgtccctgtcttgtcccaaccattaattctcatgtcacagcttctcactgcatgtgacaagagccaggcctatctgctagggccctgcggctgaggtctgacctggaccctcatgcccgagtcggaagacccctctccagaagccattctgcatccttgtctgctctgcgtcacccgagaacacaggcttcgcagcctcgctttctgaaatggtgtgtgccgagtcaaa

SEQ ID NO: 56674 - DNA, 416 bp, Homo sapiens
caaaaacatcttcatcttaatttagctctgaagaatgtaattatataaaacaaacacatttttacttgtccctacatgactagcaacactgccctttaagtcagtattttcaactaggaaccatgggacctctctgtgctgtgatgctgttcttccacaccagtgcaacagcagggattttagtggaagttggatttgtgtgtagatattgctttgtgtatttaccctggtgatttgctcttgaaggcaaaaaccatacttgcagtaaaactgccactgattaacaataacaattcaaaacctggaccaaaaagaaatagtaaactgatctctatacatttaaatacatgacatattgtttaggtattcagtaattaatgctttaaaatttctactccaaagctccaacacatcac

SEQ ID NO: 56675 - DNA, 410 bp, Homo sapiens
gttagatataaaaccagtcctggtggctattcctggttattccttattaccatgcttatagaacaatcagtcttttcctcagaatgaggacatttttattgtcattataatgtttaagggattagggatacagtatatacacatttgtttttatatattgctgatgtaattttgaacattttccttaagttttctaattttgattacatgtgaattttagtagatttgaggagattggcatgctaatgttgattacatttaatgaagggttaaataggggccctttttaaaaagatcatttcgttaatcaggtgatgaacaaagcaggagtcaggagccagaatgccatcaggagtactttgggaagttgtgattgtttgttttaattaacactttttcattgactactg

SEQ ID NO: 56676 - DNA, 1858 bp, Homo sapiens
ctcgattggttctactgtgggtctggactgatctccatgtcctgttgtggggcttttacagcctttggattgtgaaaactgctgagagagacttgcaatccagtcacataagtataataaagaaatattggtcctcatggaagaagagcaagatttaccagagcaaccagtgaaaaaagccaagatgcaggaatcaggagagcaaactataagtcaagtaagcaatccagatgtcagtgatcagaagcctgaaacatcaagccttgcttcaaaccttcccatgtcagaggaaattatgacatgcaccgattacatccctcgctcatccaatgattatacctcacaaatgtattctgcaaaaccttatgcacatattctctcagttcctgtttcggaaactgcttaccctggacagactcaataccagacactacagcagactcaaccctatgctgtctaccctcaggcaacccaaacgtatggactacctccttttggtgcattgtggccaggtatgaaacctgaaagtggtttaattcagactccatctccaagtcaacacagtgttcttacctgcactacagggttaaccacaagccagccaagcccagcacattattcttatcccattcaagcttcaagcacaaatgccagcctgatatctacttcttctacaattgccaatattccagcagcagcagtagccagcatctcaaaccaggattatcccacctatactattcttggtcagaatcagtaccaggcctgctaccccagctccagctttggagtcacaggtcagactaacagtgatgcagagagcaccacattagcagcaaccacataccagtcggagaagcctagtgtcatggcgcctgcacctgcagcacagagactttcctctggagacccttctacaagtccatctttgtcccagactacaccaagtaaagatactgatgatcagtccaggaaaaacatgactagcaagaaccggggcaagaggaaagctgatgccacttcttcccaagacagtgaattagaacgggtatttctgtgggacttggatgaaaccatcatcatcttccactcacttcttactggatcctatgcccagaaatatggaaaggacccaacagtagtgattggctcaggtttaacaatggaagaaatgatttttgaagtggctgatactcatctatttttcaatgacttagaggagtgtgaccaggtacatgtggaagatgtggcttctgatgacaatggccaagacttgagcaactacagtttctcaacagatggtttcagtggctcaggaggtagtggcagccatggttcatctgtgggtgttcagggaggtgtggactggatgaggaaactagctttccgctaccggaaagtgagagaaatctatgataagcataaaagcaacgtgggtggtctcctcagtccccagaggaaggaagcactgcagagattaagagcagaaattgaagttttaacagattcctggttaggaactgcattaaagtccttacttctcatccagtccagaaagaattgtgtgaatgttctgatcactaccacccagctggttccagccctggccaaggttctcctatatggactaggagaaatatttcctattgagaacatctatagtgctaccaaaattggtaaggagagctgctttgagagaattgtgtcaaggtttggaaagaaagtcacatatgtagtgattggagatggacgagatgaagaaattgcagccaaacagcacaacatgcctttctggaggatcacaaaccatggagacctagtatcccttcaccaggctttagagcttgattttctctaa

SEQ ID NO: 56677 - DNA, 422 bp, Homo sapiens
atttacattaatgcttaagagtgaactttttaagtgtgggtaaaaacgaaataattacttacaaagtttaattcttccatttcctttgagagaggaaagttatggaaaagcagctcttatctaaagcaaagagcccacagattgatttcattggccctggatgtatttaatggatttttactatgcacataatttccagaagcattgttatttatttattaattataaatttagtgtaaccatttcatagggttacacagaactacccagttgtgcatgtctgatgtaatttcacatatgaatgtatgaattacttgtcttattcatgttgatacagcctcagtccatggcgcatccgtgtggggggaccccaacatacccagaatcacagatatttttcccaactattcatgaacgtccag

SEQ ID NO: 56678 - DNA, 911 bp, Homo sapiens
  misc_feature (1)...(911): n = a,t,c or g
ctcgcggtcacctcttgttactgttttcattttccctttcaatgaaatggtgtgaagatgggaggcacaagagagggatcctgttttttctgcgggacacgtcttaatcccatcatgcgtgtttcttcagctatgtattctaataatctgctaaagtagaaagtaaaagacctgctattttatctcattgggaccgtacgttttagagatcgggaagtaaacagtccactaaccctgccgataactatcatctggcccggaggagaaccctgcaggtggttgtgagctccttgctgacagaggcagggtttgagagtgccgagaaagcatccgtggaaacgctgacagagatgctgcagagctacatttcagaaattgggagaagtgccaagtcttactgtgagcacacagccaggacccagcccacactgtccgatatcgtggtcacacttgttgagatgggtttcaatgtggacactctccctgcttatgcaaaacggtctcagaggatggtcatcactgctcctccggtgacccaatcagccagtgaccccccaaggccctcactgcagggcagaaccgaccccacccgccgcacatccccagccattttcctgagttccctgatccccacacctacatcaaaactccggtgagtgatgaagcactgggactgcgcgtggtgtaaagcacggagtcagttcctactgactgtcacgtggcagagtccagtccaaaagcttgttgatgaaagagtggttcaaaactcagannnnnnnnnnnnnnnnnnnnnnnnnnnnnnnnnnnnnnnnnnnnnnnnnnnnnnnnnnnnnnnnnnnnnnnnnnnnnnnnnnnnnnnnnnnnnnnnnnnnnnnnnnnnnnnnnnnnnnnnntttgaaaaataaataaat

SEQ ID NO: 56679 - DNA, 489 bp, Homo sapiens
  misc_feature (1)...(489): n = a,t,c or g
gcagtgacagcagcaccagcgggagtggcggggcgcanaaagggagctggagcgcatggctgaggtcttggtcaccggggaacagctacggctcaggctgcacgaagaaaaggttattaaagatagacgtcatcatctcaagacctacccaaactgttttgtcgcaaaagaactgattgactggctgattgaacacaaagaggcttctgacagagagacggcaattaaactcatgcagaaattagcagaccggggcattattcaccatgtgtgtgatgagcataaggaattcaaggatgtcaaactcttctaccgctttagaaaggatgacggcaccttcccattggataatgaagtgaaggcctttatgagaggacagaggctatatgaaaagctgatgagccctgaaaacacactcctgcagcccagggaggaggaaggggtcaagtatgagcgcaccttcatggcatctgaattcctggactgctg

SEQ ID NO: 56680 - DNA, 841 bp, Homo sapiens
aaaacagaaggttcatgatactaatttggaggttaacaagctgaagaatatattaaagtctgaagaatctgagaaccggcaaatgatggaacaacttcgaaaagccaatgaagatgctgaaaactgggaaaataaagcccgtcaatcagaggcagataacaataccctcaaactggaacttatcactgctgaggcagagggtaacagattaaaagaaaaagtagattccctcaacagagaggttgagcatggccatccagagtagagatgtggcccagttcagaaatgttgtcacacaattggaagctgatttagacattaccaaaagacaactaggaacagagcgctttgaaagggagagggccgtacaagaacttcgccgccaaaattattcaagtaatgcttatcatatgagttctacaatgaagccaaatacaaaatgtcattcaccagaacgtgctcaccatcgatctcctgaccgaggcctagatcgatcattagaagagaatctttgctacagagatttctgacacctgaaatgattcttcacatccctgagaaaggtcaaagttacaaactgatttttttttttttttgctacatgagtgcatttatcttttaaatgcttggcaatgttaaatgtatttattaactttgtgtctctgaatctctgttctaatgtgccatgttgcagtgatctgagatgacttataaaaacaaaaatgtatatggctctttctatccatgcagtgatagtgagtgtaaaatctgcttacttcactattgaacactattctgttcactatctggagtaaataaagaagcttattaaaacaggaaa

SEQ ID NO: 56681 - DNA, 226 bp, Homo sapiens
gagaatgtagttcaaaatgaaataattgtctatccagagaacacagaagacaatatgaaaaatggagtgaagaaaacagaaatcaatgtagaaggtgttgccaaaaataacaacattgatatggaagttgagagaccatcaaactctgaggcacatgaaactgatactgctataagttacaaggaaaaccatctagcagcttcatcagtaccagatcaaaaactgg

SEQ ID NO: 56682 - DNA, 468 bp, Homo sapiens
  misc_feature (1)...(468): n = a,t,c or g
gntngnnnnnntnntttgannnccntttggananccgntatgacatgattacgaatttaatacgactcactatagggaatttggccctcgaggccaagaattcggcacgaggccctgggtcctctttttgatgggcaccggcccctctgaacgtgatgggacctgccttctccactagtagctgggcagctcacaattcacacctgtgtacctgccacatccctcacttggtggaaaacacccagaaggtcttgagtcccccacccctgggtgtcagtccaaatgactgtataggaggcccttatttttgtcacagagcaagctggccatgaacgaaggagagaagacgccacagatttccttccctctcctccaggagaccataagatagatcccccatcctctcagccctattcccatgcctccctctcattggaggagctgaccaaagcagccctaacgggccat

SEQ ID NO: 56683 - DNA, 357 bp, Homo sapiens
gaaaaatgatttacaaactaatgaatagcaagacaaagagtagctaagagctaatgatgcgacacaggctataagcactgtaggagttcagacaggattgctgctccagtctctactcaaattgtatagaccaaaattgcaaacgcgtagctggcaggctgaaaatctggcttttctggcttcaaccttaaatttgtttttctaaaaaagacaggcatggtggagctcacctgtagtcccagctactcaggagactgaagcagaaggatcatttgagcccaggagttcaagtctggcctaggcaacatagcaagacccccatcttaaaaaaataattgtagaaaaaaatattttttt

SEQ ID NO: 56684 - DNA, 338 bp, Homo sapiens; identical to SEQ ID NO: 43394

SEQ ID NO: 56685 - DNA, 1715 bp, Homo sapiens
ttccaagcagagaagcaattgttttatgtttaatttacaaaagagaccccaaaataataataataataaactatctagggcaagggagtagggtcaggtcctccccagcccagctgtaccctccttcccctctggcagggagagaaggggcctcccagggacttcccctcccccttagaacaggggggtgcgagctggtatggatgccctcctgggcttcctgggggctctgcccactccagactccagtttgtccaccccctgcagggtcctacatgcctaagagagcccttgtggtagaggccagcttgctaggcagctaggcaggagacccctacaaggtccaggtaaaggccagggctgccagagccagcagactggtgaggtgggacccagcccaggcctcgctggcacctccagctgcctgcctatggtcccactggcattgctcaccactccagcccaagtagcactggcagcggaagtgtgtctgcaggtggtcaatgtcggcccaactgagctcccccacaggtcgcagctggggttcaccaggtgcatggccaggcactaggcggaaactgttggtgctgagatgcaggaaggtactggcactggggttgcggcgcacacagcgcccatggccatggcactgggcccggctgcaatattgggtggcccaggacacattgaccacgtaggggaccagcagccgtgtcaggtaatctttgaggtactggcaggtctccgtgcttgtggtgtaccccgcgtcaccccagaggatgacaccagctgcgcccagggccgcactctcgccaatggtagagatgaggtccatctcactaagccccgtgagcctgcggctgtaggtgggtcgtgtgaagacgtagactgggagtgccatggttggcatggtgggtgcgagccacacgaagggcctcctgaacacggaagctcacaaagttgcggccatggcgggaggaagcaagtgtctcgtccaggtagacagacgggaagagggccgtgctctcagcccacagccaggccagctggtcattgcgggccacctcaacatcagggcagcggcctgtgtagctctcccagttctgcacataatcatgattgtagcagtcaggaaagaggtagaagccccagaggtgccggggccgcactgccttgacataacgcagtgtctccagcatgaactgctgtgctgcgaactcaaactcatattgtgcctgtttgactatgcggtctggaggccagtcagggtgacgactggccactagctggcgtgataaccggcgatacacatctttgtcctgccagttgcgcacccacacaggtcgccagtcctcccagtcgatgaccgccagccccgcagactcctgtgtccgaatgtagtgctccacacgtttctgcagcatcttccggtgtgcccaaaggctgacattctgtggcacaccaccatgcacagaccttccggcagaatcgaagcgtggatacaggcctagacggtcgcggtagaagatggtaatattctggttcacaaaaccctcattaggtgaggcctgcacatcaaaggcattcaggtccagtggcaccttgaggcgtgggccacagtcctgtgtgggcacgtcccacgctaccacaaagggccggccagtgaagatgggtggtgctgtgggcttgagctccatggcccatgccaccgccag

SEQ ID NO: 56686 - DNA, 492 bp, Homo sapiens
  misc_feature (1)...(492): n = a,t,c or g
cagaaaaaaaaaagtaaactaggaaaacacatcagcagcctgccaacagactcccctagcctcggtgagggccagtgttctgggaggcagatctgaattctagtcctagttcacccactggcaggctggtgcccttggnaggatcgcttctctggggctcagtttcttcctctataaaatgagatcaaatcccatgttctaagagtttgtgctctggagtcagacagatctgggttctaccactgccagctctgtgatcttgtagcttcagtctcgtcatctgacatggagataacagtaactgtctcactgtgttgttagggtttaaaggagataatgtatgtgaaatgttagcaaacaagtgttagctaccccgattttccggttttcagagttctgtggtcccagtttatgccacatgcagtgacgttgtatggtaggctgtggtgtggcaccacttcagaactcagcgcatgcacagcttgcagaaga

SEQ ID NO: 56687 - DNA, 410 bp, Homo sapiens
gctctctcctctcttctctttcaggctccagggagcagtgtcagggccagggagacgatggtctccgtgactatggccacttccgagtggatccagttctttaaggaagccggcattcctccaggacctgccgtcaattatgccgtgatgtttgtggataataggattcagaagagcatgctgctggatctcaataaggagataatgaatgagctgggcgtgaccgtggtgggtgacatcatcgccattctcaagcatgccaaagtggtgcaccgtcaggacatgtgcaaagctgccactgagtcagtaccctgcagccctagcccccttgcaggcgaaattcgccgtggcaccagtgctgcctcccgaatgatcaccaacagcctgaaccatgactctccacccagcac

SEQ ID NO: 56688 - DNA, 721 bp, Homo sapiens
agctttcctcttaggaaaaggtaactcacagtaaaggtcagaaaagttcattgacttttttttgtgtatagatttagtgtatattaacataaagattgtttttaacattaggaatttagaaaacctatccaaccacaaacctaccagatatatatatgttttaaattagcataagaatttctgttggaatggtttaaatgaaaggcaacttttttttttcctattaggtaaaatatttacttgtattgcttcttaaatgcatctttagttttaaaaatgaaacaatatataagaacagctggtttattcttttgatttattgtaggtattaaaagtttcttttgtgagatggcacataggcaggtttggtgtttcctaacactatgaatatcttaaattgcttttgaaagttttatccacaaagaaagaaaaataagggtttcctcacagttgaaaatagtttttgaaaaaaggttaagaggaaaaaaatctaaataccatccttgataaagaaatggaacttcaagttaaaaatacaaatttaaatgaagttttataaaatattaaaaactagctaaaagtacatggcataggcatttaatcaaggtaagaggaacagcagtggaacttaaatatgatacaatttatcaacaataaataaacatttcagtgcaaatagtgcagaaaaatttctcaaagatcatagcaatcattctaatcg

SEQ ID NO: 56689 - DNA, 1113 bp, Homo sapiens
tttttttttttcatagttcaaagtttcctttaatagaatacccagaatacataggaaatcaacatgtgctagacatagaattagtatgttcactgaagcatggcaaggtcacataaaatgcatatagctagggtcccaagcaggggtgtgttactgttagatttttttgaagtttaattttgttcagcagaggaatatactctaggagcatttacagttcattttcagtcatcaaataacatacatcacttccaaaacgtagcctcttgtgtgcagagaaattgccttcccacagcattcacaatgtaaaaagaccttttggattaaagggtcagactctttctatgtaacaaaaagtggaatgcaagtgacagatggacttattattgtgcagaaaaaacgtctgaatgtatgctaagaattctccgccctcccagctctttacatgctggaacctaactcagatgctgggtcaccagcacaggagggcctctgataaggaaaactgtttaaagagtacctggtggctaaaagtcaggtcattcatcatgcaaaatgtcaccacttcttaaactgttctgtaaattcatttcattggtcaacttttaacgtgcatatgacctttaacagttctgaaaaatagccttggccagtaacacgtacttctagttcacatatgacatcatgaatgttctctgcctaaagcacagagtccattcagggttatacaaagaagcagtgggaagactttagagtccttcagaatgacagctttcacagatgacttcagtctctccagactaatgtcagctgaggcaaacaagcgctgcacaatcccaaacctttctgtatctttcaggggagtcaaggttgggtcttcaagatcagatactccatcatcagacagagcacgaagcaagtggcacagtgtgggaatgatctggagtttgcagcaagtgccccagcagagctgctgcgctatctggcatttctgcgagggcactgaccaagaagtaggctgtcataaacagctgcttgctgcctgcatcctcggggcccggacacccaccctgtaagctgcaccccaccagctgcaggaaggccacaaggtcc

SEQ ID NO: 56690 - DNA, 1019 bp, Homo sapiens
  misc_feature (1)...(1019): n = a,t,c or g
caatgtacttgcaaatggctccagttctttgatttttgtttctcctagccagagttgctacaattgttcaaggaaaatacttggatttctttttttaaagatgataaatcattaagtttataacacatagagagtataaaccaagaaagtaaatttatttaaattactaaaatagcttttaaagtcatttacagatcagctgctataattatttttcctgaaagacataggtaacatattacttttaaattacttgggtcaatgaaacatttaataaaaacatttgtttctctatataatacgtatgtataaaataagccttttcaaaaactctggttttcataatcctctataaatcagatgatctgacttctaagaggaacaaattacagtaaggggtatacatttatgaatactggtagtactagaggaaagacgttaaaccactctactaccacttgtggaactctcaaagggtaaatgacaaagccaatgactgactctaaaaacaatatttacatttaatggtttgtagacaataaaaaaacaaggtggatagatctagaattgtaacattttaagaaaaccatagcatttgacagatgagaaagctcaattatagatgcaaagttataactaaactactatagtagtaaagaaatacatttcacacccttcatataaattcactatcttggcttgaggcactccataaaatgtatcacgtgcatagtaaatctttatatttgctatggcgttgcactagaggacttggactgcaacaagtggatgcgcggaaaatgaaatcttcttcaatagcccaggacagctggttaacaaatggtttgtcaattcctgaaactcatttcttaattcaaaacaaaagcttcagggtgtgtccaaaataaactgttacgaattgacctacnnnnnnnnnnnnnnnnnnnnnnnnnnnnnnnnnnnnnnnnnnnnnnnnnnnnnaagcatggtctcggcttactgcaacctccgctccnggg

SEQ ID NO: 56691 - DNA, 244 bp, Homo sapiens
cccacctggaccccctggaccaaaaggacagcaaggcaacagaggacttggtttctacggagttaagggtgaaaagggtgacgtagggcagccgggacccaacgggattccatcagacaccctccaccccatcatcgcgcccacaggagtcaccttccacccagatcagtacaagggtgaaaaaggcagtgagggggaaccaggaataagaggcatttccttgaagggagaagaaggaatcatg

SEQ ID NO: 56692 - DNA, 418 bp, Homo sapiens
ccttcactaggtcaagctcatcagataatctgtctatcttaaattggaccgatttgggatctcgattacatctgttaacttgtttttgccataaattgtagcacaatcacaggagtgacatctcctcagtagctttgtctacactcaggaggaagtgattatataagagcaaagatcactgggggtcatcttaggattctgtctaccataatattataaagacacagtaattaaaagagtataacagatttctgcttctgtctgttagaataaatcatatcagactaaccctgcctccataaacaaacgtaaaattgttttcagcagtgttacaacagggcagtccaggagaaaacttaagggggaggccccatggttttcctagttgtttggggagaatttctcagcagctgcatag

SEQ ID NO: 56693 - DNA, 337 bp, Homo sapiens
cccaaccttgctgctcatctttaaaggaagttcttattataaggtcgcatgtttggaatgagggttttgcttaaacttttcttagatagcccttaaatttttaagaactggaaacaatagggttcatttaggcagcctgatacaaaattgttgactttgatttttgttatatgaaaatggccagatcagttccttaccacaaaagcattcagtcagtccaggtcatctgtgaccggcagagaaataacaagcaaattgtagcaaaggaaaacagaaaagacttttgaaggcctggtctaagctacaaactccagagattacttagaaagttctgttc

SEQ ID NO: 56694 - DNA, 305 bp, Homo sapiens
tttgataataaaaaacaaattttgatggccttatcattgttactagctttctttgttaaaggctttacttcaagatcactagtcagagcaagtaagatttttccccaaatctctacaacaaaggtattccaaagtttcttaagttagttcaactatctcattattaaccatcagggactgataaaacccacacttggccagaaatgtatttgattaagtattcagaatcttctcttgtagccctgctttagacaaaagagaaccagtgaagacacttttaaaaaagtgtcatctagctcaaccct

SEQ ID NO: 56695 - DNA, 483 bp, Homo sapiens
  misc_feature (1)...(483): n = a,t,c or g
tcccctcagtttagtatattgactttgtactgtaaatttttctgcttttcttggataatctcaggattttcatgaggatagggggaactcaactttatttatgagacaaaatttccatacaaagctcaatctcctttatacacccacagacataatattagtttttaaaaagccaatttcttcatagttttttcccattaaattctcaaggaacacttggatctttaagcacggaacataatcatgatgttaaaaacagagaaaataaggctttataaagttaatgattatcatcagtatgaatttaaggtttgttttaatttcaagatttgattttttatacgtgtnaattctattatctacccaaggcaggatctgtagtggttccaattaggacttctccaaacagccaaatttatcccggattttatttggaaaagccncttgggattggatagntatagtagcnccgggcttgggaaa

SEQ ID NO: 56696 - DNA, 1066 bp, Homo sapiens
gagacttttaaactttacatgttagcataaaacagacttctctctcattgcatgcactagatcaatattatcatctgtattaagctatctgaatttattcgagacattaagaaaaagacagtacatggtgggaaagctgcacatttctcacaaggaaaaaaacattctatatttgtagcagaaatcagtggtttgaaaagtcatactttgcagatatgaacctgaaaatcaaagtgccattgttaaatcatcctaaagtgtactgtgggtattcttctccagcatacttgaaaatgaataaagttagattgctcacattgaagctaatggttgagacaagacacctgccagagtgaagtttgattcctatgggtgagaagatgtagatgactattgttctcactaaagttctaaaataatagcaagtgtagagaagagccgttgctttgaaaatacataccacatttgttataaagcatttgtttgttagtatcaatcacataggtagaaagagtttgagttttactgtggattaaaaagccttccctaaaaagagagcatgccagtcatagagacactaatttggcacttttcctccttcttaggtttaaatgttataccaatgcatgtgtttgaaatatccattaagatgatttaaaatttgtcttgtattttgagtttcttaaatgcgtggattcttgttcatttatctctgaatatgtctcttttatattttggcacaattatacacattggaaagggccaacctattagggctcaagtatgtatatgcaaaaaaaaaaagttatatcaaacaggcacagttattacaactagagagaaattccagaaatatttgtttttttaagagaaagtaaattttcacattagatttctattcaaagtactaatatctacatggtccacacttttctattttaaaaaattgtgttctcttgttaaatagattaacatttccacttctgtttatcacaaaagactgtatttgaaatatgcatacggaaaattgaaattatattagtaataaatgtaacttgaaaaatca

SEQ ID NO: 56697 - DNA, 379 bp, Homo sapiens
  misc_feature (1)...(379): n = a,t,c or g
atttttttttttaacagagttgaaatgtttggatttattgtagcattactatcaggaatacacattgattatggtattgctatcaagaatacatataaatacatgcctgaagctataagtgagataagagatattccagggttagtcaaaagttaatctttgagttcccagaagtctggatgaaaatgagatgagactgcaaattttgttgttaggcagtcaccatttatgacccttggcagggagggcaggaatggtggttatattgtgaactgaatgaaaactgaggaactaatcagcatcatgtggggcctgaagcatttattgctaccagtgattaggttgtaagaccntcggactatgtaactgtaatgaacta

SEQ ID NO: 56698 - DNA, 79 bp, Homo sapiens
  misc_feature (1)...(79): n = a,t,c or g
cattttcacttttctgtccaatttcagagtgcatgtgtttgngagtatttcacttaaatcagggacagctctttatttg

SEQ ID NO: 56699 - DNA, 626 bp, Homo sapiens
ctgaactcaaaacttttagctgttcattgcttcatgatggagatccaacttaccagcgtttatttttggactgccttctacattcattgcgggagcttcatacaggagatgttatgattttgcctgtactttcttgcttcacaagatttatggctggtttgatctttgtactccacagttgttttagattcatcacttttgtttgtcccacatcctctgatcccctgaggacctgcgcagtcctgctatgtgttggttatcaggaccttccaaatccagttttccgatatttgcagagtgtgaatgaattgttgagcactttgctcaactctgactcaccccagcaggttttacagtttgtgccaatgggaggtactccttaagggggccctgcttgattttttgtgggatttgaatgctgccattgctaaaaggcatttgcatttcattattcaaagagagagagaagaaattatcaacagccttcagttacaaaactgaacatatgctttctgagattcaactttatgatttcttataatttgcccagtatttgcatcctgttgctctattaatttaaaaaccttttattttggggaaaggccaacaatttgcatcattcaaag

SEQ ID NO: 56700 - DNA, 835 bp, Homo sapiens
tgcgttttgggggttcctggagtatcaatcatggatcaagaaactgtaggcaatgttgtcctgttggccatcgtcaccctcatcagcgtggtccagaatggattctttgcccataaagtggagcacgaaagcaggacccagaatgggaggagcttccagaggaccggaacacttgcctttgagcgggtctacactgccaaccagaactgtgtagatgcgtaccccactttcctcgctgtgctctggtctgcggggctactttgcagccaagttcctgctgcgtttgctggactgatgtacttgtttgtgaggcaaaagtactttgtcggttacctaggagagagaacgcagagcacccctggctacatatttgggaaacgcatcatactcttcctgttcctcatgtccgttgctggcatattcaactattacctcatcttctttttcggaagtgactttgaaaactacataaagacgatctccaccaccatctcccctctacttctcattccctaactctctgctgaatatggggttggtgttctcatctaatcaatacctacaagtcatcataattcagctcttgagagcattctgctcttctttagatggctgtaaatctattggccatctgggcttcacagcttgagttaaccttgcttttccgggaacaaaatgatgtcatgtcagctccgccccttgaacatgaccgtggccccaaatttgctattcccatgcattttgtttgtttcttcacttatcctgttctctgaagatgttttgtgaccaggtttgtgttttcttaaaataaaatgcagagacatgttttaagctg

SEQ ID NO: 56701 - DNA, 3266 bp, Homo sapiens
ttttttttttttttgacaggaggaaaaaaattttaataacatatgtttgcacaggagtcccacaaaatatgagactccgagaagagtcagatgatggacactcatgcaccaccgtgagctatcgaaagaatgtgggcttagggcttctgcatggaggtggccacggaagtgggaaagtgaaggcaagaagtgtgtcctgaataaagcttggctggttttcagacaaaaggtcttctgggtaataaatgttgtctggagcagccctcaggagaagaggtaagagcctgtatgggatggtgtcgctgccaacatccttccctgtgatcccacttactcttccctggctgatgagatacttggggttgtgattcatgatgattgaatttccttttgaggatttgtctttgggcagatgaaggaggctcagagaaaagcccctccctgcatgtgctgtgcccaagtgacctcattttgaagtcagtggcaaaccagcggcatattttagggtgccatttgctgaatgctttcagcatccactaatccagtcaattgttcccatttgtttccctgaatagcaaacacttccttgaaattcttctcaaactcagcctccagtctaaatcccatttggccaaaacccttgtacttgtaagaggccctgtggttctggaagatgaggcgcatgtcttgtacaaacccctccacttgggggtaaccgtgctcattcagccttttcttgattttatccaaccacatgggctccttcaggccttgacacgcctctctaatataataatagtatggaatcttggcaaaaaaggagctctcagaacagcaatagactttcaagaggaggaactcacatttcaactgttcctcaggacacatctgcctctccaggacctcagattcctgacaacactgttggcttcccggagactccttcatcctgcagaagatgcaattccacggggtcctctcagcttccacaggcgggatgtgacagtcctcatggaagactcttgaacaagtgtcgcaacagaacagctcccctccgtcccggcacacctcacactcatccaggtttctcatacaagggtcaactgagctattgttttgagacttcagtattctcttttttttcctgtaacgtattcttggaggatcaggcagaaatccattctccatcagccatcgtaggggccacccgccacagcgcacactcagcctccagttctttgatcttgcatggcctcctttgatttcaaattccgtgggggtgaaccattttccatcctcagtctgtatacacttcaccaagattccttgctgcaatttcttcttatgtaaaattcccttcaccccaccacaggtcactggaagcaaaggagccttaaaatccacagtttcatctttgtgctttcttgaagctcttgatcggactcttttctgtgcagctctgtcactctgagtgaagcgggttccaggtttgcctctctttctccccctaatcttggaaaggtctttcagattcacgttcgccttcttttcactggagaccacctggccgtcggctttgctattatcattttgttggctgtttttctgccttctcattctcattctgctccagccatgccccctcttttttcttcttttcctcttgggttttcccaaagtggagttgtttgcaatatccacagtatccattgtgccacacgcttgatcactttccgtccttgcttctgggcttcctggcacctcttctgagaaacacatgacacaggaacacttctcattttcatatgctgattgctccgctcctggtacattatcatatagcaggctagaagcaagctcttctgattctccttcttcattcattgggtgattttctagttcactagacactgacccacgtcttgctagggagctagaggcttcctggcgctcttctccatcacacatttccgaacagtcatcactgccctcttctccttcacctggtagtagactgagctccttctctggttctccttcattagtgacttggggagtctttagatcaaaggtctctgtagagaaacaagaaactgacccacatcttgctagggagctagaggcttcctggggctcttctccatcacacatttctgaacagtcatcactgccctcttctccttcacctggtagtagacagagccccttctctggttctccttcattagtgacttggggagtttttagatcaaaggtctctttgtctcttccctctggactctcttggtacttctccttgtcttggtttctttttctgggactgttcctgccttcctcctctccctgtttctcccctggtgctgtgctgtatgtccttgccgcatctatcatcccgttgctttctagaacttctgtatcataaggcagtaacttgggcatttcttctgattctccttcatctatttgtatagcaagtttacaggacactcccccacctggtagtaggctgggtgcatcttcagcatctcctccaccagcctttgggagagctaactgctcacaagactctgaagagaaacctggctcacaccttgccgaggagctcaaggcttcctgaggcactgctatatcatccatttcatgacaggcattgctgttctcttgtttaccatatggtagtaatctgggtctatcttctaaatcgtttacattattcatttggagaggtgagtgttcatagcatacattctggaagcttctgtaaatctcgtttaaatcaggataggccatcaggttaatcctgctgaacaatgcttccagatgtgaccagccaaatgtcttctccagttcactgagtacacaatacatcactcttgtcactgggaccaggtttctaaaagcttcttgaaaatgttcatacatctgctcggagatgaaggagcggtctcggaggcccataaggaaaggaaatggccttgttattgcacttgcaatctccaccttgttttctctgaagaacctgaaaatgggctcagggcaaacctgctcctgcaggttctgaccctctacgttctggatctctgcgaccatcctgaagttgagattgctgtctccacttgccatctgcccctgctggccctgctgggccatgagcttggcctaggatcacacccgattcgattttcactgccccgttccttcctgcagctctgaggtgaagctgccaactgcccctcggtgctcagtcaaagaggaaaaggaaaaga

SEQ ID NO: 56702 - DNA, 347 bp, Homo sapiens
tgcctggggaattaacaaggtgtgaagcccactgtgaaccagcctgacttcaaatcctgtgttgaatagaagtagtgagagcgggcatccttctcttgttcctgatcttggaggcaaagatttcagtctttcacctaaaatgactgaaagactttcagccatgggccttgcatgactggcctttattttgttgctgtacattccttcttttcctggtttgtggagtgttttaccaggaaagggtgttcaggctggggcaccgtgggcctcaagccttgcaaattgcccagccacttttggggagggccaagggtggggcgctcgtgcccaatttcttgggcctcgat

SEQ ID NO: 56703 - DNA, 1095 bp, Homo sapiens
caggagcaatacaggagaaaggagcaatacaggagaaaggagcaatgacaaagaggatctgtgtcgtgaatttcgaagcatgcagagaaatggaaagcttatctgcaccagagaaaataaccctgttcgaggcccatatggcaagatgcacatcaataaatgtgctatgtgtcagagcatctttgatcgagaagctaatgaaagaaaaaagaaagatgaagagaaatcaagtagcaagccctcaaataatgcaaaggaccagtgcagacaggttcagaatgaagcagaggatgcaaaatttagacaacctgggcgttccttggcctctgttgccaggatgagtacagatgagtgcagtgaatttcgaaactatataaggaacaatgaactcatctgccctagagagaatgacccagtgcacggtgctgatggaaagttctatacaaacaagtgctacatgtgcagagctgtctttctaacagaagctttggaaagggcaaagcttcaagaagagccatcccatgttagagcttctcaagaggaagacagcccagactctttcagttctctggattctgagatgtgcaaagactaccgagtattgcccaggataggctatctttgtccaaaggatttaaagcctgtctgtggtgacgatggccaaacctacaacaatccttgcatgctctgtcatgaaaacctgataccgccaaacaaatacacacatccgcagtacagggaagtgtgaggagagcagcaccccaggaaccaccgcagccagcatgcccccgtctgacgaatgacaggaagattgttgaaagccatgagggaaaaaataaaccccagttctgaatcacctaccttcaccatctgtatatacaaagaattcttcggagcttgtcttatttgctatagaaaacaatacagagcttttgggaatggactcactgattttcagtcttttccatctctttcctcctagactctgtgatctgagggtataaagacatctccaccaagtctgagccctcaaaatgtcctgattacaatgctgtctgtccaactgcctgttcaataaaagtaaactcagcagaa

SEQ ID NO: 56704 - DNA, 410 bp, Homo sapiens
catcagaatgttgacggtgattaccctccagtaagccttagaagctgctgaccatctttctcaacaaggtatttctgtccgtgtcatcgacctgtttaccattaaacctctggatgtcgccaccatcgtctccagtgcaaaagccacagagggccggatcattacagtggaggatcactacccgcaaggtggcatcggggaagctgtctgcgcagccgtctccatggatcctgacattcaggttcattcgctggcagtgtcgggagtgccccagagtgggaagtccgaggaattgctggatatgtatggaattagtgccagacatatcatagtggccgtgaaatgcatgttgctgaactaaaatagctgttagctttggtcttttggcctctttaccctgtgtttatgtt

SEQ ID NO: 56705 - DNA, 434 bp, Homo sapiens
agaacgaaggaccagattcttttgttgatcgacattgagcagtcctacatcaacacgaaccatgaggacttcatcgggtttgccaatgcccagcagaggagcacgcagctgaacaagaagagagccatccccaatcagggggagatcctggtaagtacatgcttagtgtggtagcaaacattagagaatctagtggtgatggagaccccgcccacccctaatattccctgttccccatcccctccaaataacaaaaatactaaaaatcgagctaacctggaaaccccatgccgcagccggcgctggactgcacgttgccctgggtataagtcgactcacacaggcactaactggaccgccacccttgaaggcgcacttctgcagccagttcctggcaggttttcctggtttcctgtaggtcagggatggcaaat

SEQ ID NO: 56706 - DNA, 424 bp, Homo sapiens
ggaagctcagatcattgattttaaaatttacttatttatttatttatttatttaattcaacactgatcagaaggctttttgtgcttttctaaaaaaagcatttaatgctataaatttcccatttgctttatctcacaaattttattgtgttgtaattttgtgttcaatttagaatattctgatttttcttggtattactataattttcaaatatttagagtttttttcagttatctttctgttactgattgtaatttattgttttttaaaattatagttctttgaatagttttgcagtatttgctctagggattactataaaacatacttcactttttacagttcacttagaagtcaatattttaccagttcaagtggaatgtagaaaaatcttaccactgtttacattcctttaccctctccc

SEQ ID NO: 56707 - DNA, 303 bp, Homo sapiens
tttttttcgggtaaatgaatatgtttatttaaatatgtatacaagcatggccctaggagcagcagatacactttcccaaaggtgggtgcttcctttaagatattgcacaatagaaaataaactcttgtcaatccttaaaattagtcttcaatgctatgtattttagctatgtaacttgtactgtgtcaacagtgaaccttattagattcacggtgtcatcgaacttatagcaagataaaaatcaatcagtaggaatgtcattttaaaaagtaaaatagtgggacggttgtggtggctcatgcc

SEQ ID NO: 56708 - DNA, 630 bp, Homo sapiens
  misc_feature (1)...(630): n = a,t,c or g
agtgagctctgtgnatatatgagaatgactattaaactctatagccatactactagttccttttatcaattaaagatagtatgaaagggggaaaaaagcccccaaattgttaatagcatctttattgtttcactggtgcaaaaaaaaaaatcataattgtgatgcatttcctgctaaatttacaatgaaggtgatacataaattatatagatcacaagttttcttttatactatttaaaacccaattatattgataaatatgtccagaggacaacatgggttcttaatggatggctgagtccaaatatgcaaaatatagcttctggttttgaccatggtgctttaaaattctcaaacatgcattaatatattctagttttagggaaaatcttacacatggccttatcttgcaatttaggggaaagcccaagatgaatttcacatacagtattcctttcttctaaattaatctcaaactggactagaaaacaagagacagacgcttttgggttagtactccccaggaatgaagaaaatacacaatcaacaatgaagcaaacaaacaaacaaaaaaaaggagagcttcattagtagccaagataagtgcctgtgggttttgttttttttttt

SEQ ID NO: 56709 - DNA, 611 bp, Homo sapiens
acgacatccatatttctgcaatagttagataaaagttaaagaactgttccttttgtgaatattcacagtccactgcatataatcgtttatgaaaactgaaccctataaagagcgagagtagaggactgtggtgagaacagagggatcgaagggaatcagctcgcttgaagagctgtccccgggcggcggcaggagtacctggggataagcgtgattgcattctccaggatccaggggattgatgtcacagttctcatagtcaaaggttccattccataagtgctttgccagctgaaatgctatttttcgttgtgctaatgtgacttctttcccatgccatacgtaaacttcactaccaaaatcaaacaccagtacctctttgggttgcagaagggagcacttcggaattttcccccagtagtcgtcatcaggaacaagtttgtcatccatgagacggtaaatgcagttagtttctattatggctgcttcatagagttcatcttcttttgggtctccagcagcttggggataagaagaacaggagagcatcacattttacattgcaaagtagctgcaatgtaaaatgtgaatgaatgtcgacggcggccgga

SEQ ID NO: 56710 - DNA, 314 bp, Homo sapiens
  misc_feature (1)...(314): n = a,t,c or g
ggtttttttaactgtttctacctcatatatgaggtctcttctgtattttactttgcatactagcatgtgattgcctgccttagaactatgtagaggaggggaaatcgatattaccttttaagaaatttttgattttatgaagtgttttcattaatactttttttaatgtttgagaagtaaaggggaaagggtggcaaattacataggttggcaacacagagtagaagtcacatagtactatttacagatccgtccccgtttttaagatttggagaattgtggaacagggtgggagccatnggttccccaaacct

SEQ ID NO: 56711 - DNA, 471 bp, Homo sapiens
tcgacgtaacctggcagattgtataatctctgtggtcctcgttttgctcatctgtaggatggagtgataaaagtacccacttcatatggttgttggggagattaaatgaattaatacatgtaaagtgcttacaacaggagctggttcagagccagcgcttaatacattgaaataattatttttacattgtggtgcttttatgatggtttctgcagcatttaccaaatgccagggaaattattggcttgctttctgtgtgggttttgtcaaaatgattatggatttcaacaggatatttcagagaagaaataaactgctgaacagaaaccattgtgagcttgatagtttgcaggacattgtagaaaagagaatccagcacagtaattaagggcctttttaagtagggaagttgtagcttcttgcggtaggcaatacttagagaggcattaaccaccgctagccaacaagtat

SEQ ID NO: 56712 - DNA, 290 bp, Homo sapiens
aactccttgcagaggagagtttctccaggctcttcctgggcccttagatctgcagttccgacaagctttggctgcaggaggttttacccatgaactggccatcctactaggaccacaagggaccaagggaatcagggacaaaggcccttcctgccagcccatgatcccgggattggctctcttcccctacttccacttattcttggactctgagaacttttgggaacccaatgggaatcagcatttcaaggtcaaggatgaactgaagggggaagagaagtaaaacttgc

SEQ ID NO: 56713 - DNA, 997 bp, Homo sapiens
tatgaactttacttgagacagaatatggttaaaattaggaacatctactttgaatgaggtttatttttctattttgaatttgccttatgtatattcaaaggcttatggaaatactgtaaaggaacattaggaaaaggacaaataggctataaccatctatcttaaaatcagacccttagtataagcacctctttttcttttcctctttgacaatttagtctcttatttaggtccatgtaattaatttcattccattattttttagctgtttattctaaaaaacaaaaattttcagccactcccatttattctcccatgacatggtcctatatagcagtacttaacacagtgccttgcaccatagtaggcattcagtaaatacttacatgcatgaatgaataatgtattttcagtgtaacaaatttattataaaagtgtagttcgactcttcttggtcttggagtttgagagtacagaattacagggaatgaagagaggtataagtagatattttaatggaaatgaagtataaattaataacttgacttacccctccataagttactgctaactggagatacccttgtatgcccaacctgtaaaggaaaaagttctatttctatatttataggacattcttctcagtcaaggaacagtaagaaatatgtaggtttcaatcagttgctctcaaccctgactgcattttagaatcatttggagagtttttaaaaatatccatgcctgaatcttgattcccattttcatgtaatttgagacaagacctggtcatcagtattttttttaaagttctccaggtaatttgaatgtgcaggaaggattcagaatcactggtttaatttgttattgaaaacagtaccagtattaaatgtgtttcctcttccttcttttctgtatgtatgtgtggtttttgattttttgttgttgttgttgttttgtggccaccctttgcactagaccatccccttttatttggtgg

SEQ ID NO: 56714 - DNA, 338 bp, Homo sapiens
accataatcttgattttcgcttatattatttaagtattcaacatgactttttggaagtaactttttaattggactatgttaaattttttgttttgtgggaaattagatacctttaagtctgggttaccttttgcacatttgtttcctgcaggaaccctcttagtcccttgccagacccaaaggagtgatgaatggaagggggggcctctctgtctccatcatggagccgtagtaaagccatttatctctctcagtgacagcaaagagaagggccgtcagagagccagtggctttcccaaggcaggccttttgagcgtccacttatttctgtcattgtg

SEQ ID NO: 56715 - DNA, 6419 bp, Homo sapiens
acctattcaaaattttattaaaaaccagcaaattaattttaatctctagccataaaaacataagtaatagtaagctcctaagcttggacaaaggctggattctcttcactataactgagtggtaatttaaagacaacaatttaatgtcactaattttcaaaattaaatagtttaagctcaatttaattttgctagatatttaacaaaacatacggctcaacctcataacctatatgtgtgtatgtctacatctgtgtatatatcataggatttgagaatcttaacacatgtataaataagtatatataaactccaattttaaatcttaaaattgctgaatttaccctcatattctttaaaaaacttaaagcattatgaatgtagagaaattcaccagagctcactgcctatttgatggctgtaacaagtcttcaagtatatacttttataataagttgaaaatttcatataattttatttattaagaattccaatctaagtataaaggtacaaggtagtgagaaggaaatactacagttcggagaactgcttatttccaagtatatttaacttataaagttaataaatagttaaatgaaacaaagtttataggtgacctttagtaaatggggaaattaacaggactttcttcttcatcttcaaactcttcagaagcagcaacagggctagttaattcaactcccaattgttctgaaagtttttttaccttctcttctaagagaatattcttcttcacttcttccttgtaattatacttaagatcttcaatttcttcaaaaaatgaaggatcaaaattttccagttcttttttcagcttctttatttcctccttcaaatgctgcttttctagatctgacattttgagctgtgtctctagatcttttattttttcctttagttgatcagcatcaggtatggtgctttcagctccactttggtccttgttagcttctatctgatggattaattctgctttctctttatccagctgatgattagctaatctaagaacttgaagctcccgtttaaggccttgctctgtctcagcaccttcaggaacatgtttaagaatcttaatctgttgttcaaggtcttcattgtatttgttaactttttgttctctctctgttgcttcttttacaagctgtttaaggtcagtaatgctttgattttttttggcaatatcagtttccaattcttttaacttggtttcatacattcttgtaaccacaatggatttccagctcttactgtcagcaccttcaagctgtggacctctgctttctgcaaactgcaatctcttaccagtctcttctagttgaactgtcatcttctcatttaatatctctaaattattctttgctatccgtaatttctctgcagcatcagtttcttttttaagttctttacgaagcctttcattttcagcaataattttttctgtgcctttggtcttggattcatagtgcatgctcaactgatgcccaagatgagctttaagtttttctaattcagccttcaatttttcattttcctgctcaatattagccattttttcactagtcaatattcctgatgcttttttcaactgttcattttctctctggactttttcaactacttttttcattaaaccaatggttttttccagttctgggattgtctttccacttctaccagaccctctaacatggccaagtttccgctgaacttctgctttttctttcttaagaaattcacacatttccttcaaatctctgacttgattctttaatcttggcaaatctttatttgcttgttcaagctgaaatttcagttcaatattttcagatgacaacttcaagttttccttctgaagctcctgttctctctgacaatgatcatctgactctattcctgaaattgaaggcttagaatatgtatcctttgaaaactgtttttctaaagcatgaagtttttcttggaggtatctattttgtaaatgtaaatcttctacaacagaatctcgaggaagagcttggtgggccctcatatacaatatatcattttctaagtcaagatttctcttttttaattcttccaattctttttctgactccaaagctcgtattcccaaaacctgatcaacagtcatgccagttgtttttagtttcctctgcaaagtaagtttctctttatcggctttggcaaaaagatccttcaaagtattcaactgctttgttaaagtaaagacttccccctctttctcttttaacttgtttcgaattccttctattttggcttgccactttttaccttcttcccacctaattaattcttctttagcattcttttctttcataggttttaggtctacttcctccacctttccctctaattggttctctagttttttaactttcctttggagttcttcaattagactttgtttattatctgtcaggggtttgccctgtaatccactggttagtcttttaatttgccttttcagttcatcattctcttgatcaatttcctctttctctctaagtattttattataggctttttgtttcttttgcagttcattatttaagtcattcaaattatcagttagtgagttttctctgtttttacttgttttaagtgcttctttcaattttaaaagattttcatttaaatcttcaacttgtgtctttagctctctagtatgtcgatcaacgatttgttgaacattgagatgggcctctttttgagaagttgcagaaataatacgttcttcagcagctgctgtcatttctgcccggagttctaaaagtgcccgactaagtgctttctgttgtttctccttcaaggctaattggctctttagccgttctactagatttctcattgtagttgttggagctcttgaatttgcttctttttgagcctgaagttcagattttaaacactgtgactccttttgtgactggtccagaagatactttaaatcctctacttccgcttttacttttttcacttcatcttcatggttttcttgaagctgtaatttgatattttcaaattcttttacttttaattcagtgatttctctttgtctctccaaatcttgtgatactttctttagtttgaccaagagtgaggaaagagagtcatcttgttctgctactgtctgttccatctcagccagacgaataaaatgcttgttggtaggaactggagtgggagactgtttcattaaatcccaagccgtttgtttgaatttatttagtgaactatcagcctgtagttctaatctgtgatgaagaatatgaaggtcttcctcatgtttcttcacaatttctctttgctcctctctggctttttctagaagacgttgatacttctttaatacttcttctttttgatttaaccttgcttgcatgtttgcaatggtttgatgagcaattttcaatgtgtggtgagattttggttccatctcttttctgcctagctcagctatgagcttttctctttctgcagtggcaggcaatcgaagcctcagttcattgattactttgtctcttgacagtatattttgttctgctaaccttaaagcagattctttctcttttagtttctcttctagtgatttgcaagttgcccgtgtttctagaattattcgaatgttctccttaattttccttagagcgatctcaagttgatttggaaggggcaaactagggtcagggattgatcctgtagcttcttcaaacttttgtgccgcatttagtatttcattttgctgacggtcaaaaatgtctagttggcgttccaggtcaacttctctttgatcccaggccatttgtctttcttcatgaaacttgttctgttgcacaatttcttcttcaagactgctgattgtacgttcatattcagaaattatgttattcaaatattttatttcttctttatccttgactaattcccgatttagtttaagttcttgaagacgaagttcttctattttcatatgccagttgattaccttttgggctcctttggtatcctttaaagtgcttattaactcttccaggccctttaattttaattccatctccaatgttttgttctccatatttctatgttcttgttgagaatttttcatttcttgcattatcttaagtttgtcattttgtagttgaatcattgttttggagaacttttcctgttgtgccaagggtaaagctccactaaactgtcgtcgtagagactgaattgtttggcgcagatgttttgctctgtttcttccctccaaacgagcataatagagagcctgttctttttcatcaagtttctgctctaagcgcaagttgtaggcctccatcttctgcagtttagatgtaattgactccaacttaccaagagcagtagcctcactcagttgaagagagacattatgttggtgcaacttggcaatgagcgacttttcatcagactgtgcctgatagtctagcagttgcattctgagggactctacttccttgtccctagattgttgttgtgcattcaaaatttcaacttgtcttctggcaatatcagaaatctctctcagttttgacacttcaacttttagttccatttcattcttctctaattctagaatccgttgcctatcagcatcacttactgccttgctcacactatcagctaattcatctcttaacatctgttccaccttctgtgcatccaaattgattttggtaagctcagcaaatttggtttccaattcaaaattacgttcctccatttgctttaacgaagtccgtaagtgttcatacattttttgacaatgttcagcccgctgcctttcatttaattccttcatttccagcatagttattttttttgaaatggaaacaatgtcactgttggttattgatttctttgccttatccatgctagattcattacctaatttagtttcctgttcccaggcttgttcaatagtgtgaagtttttccttggtaatctccagttctttatttatagactccacttgttcttttaaggagatgttttcacactccaggtgttccaagttacttgttctttgaacaagcatattatctttttgcaagatgtccctgtacttagcagtcagttcattgtactgtttattagccagttctagttcagacaaagaaacactattatctacaactttttggagagctgcaatcttgaaaatggccatttcctatgtaaataaagatacactgagttatgctggtgtctttttttctggtgaagcactagccacttttgagaaagataatacaacttaaagtaaaacgaattttaaaatcatttttaaaatatatgatttcccatgtaagaaaaacatgcattaacataatttctttcatataagaaatgttactttgaaaatcttaatcataataaaaataaaatactttaataactcctgtcattgtaaaataaaactcaattaatttgagaaaacataacaaacagcaggaatatatcactcggaatttatctttggatggcttttctaaatttcttatgatcggaaaacaacttgccttttaataaatgggaaaattagcattatcacaggtaactttcacagcttagctatttatgcttattgtaagttaaacggactggctttaataacaagaaaactttttgtacacatgatggaaacattagcgggagagcttctattatagttctctgtaataaataacatcaaggactttaagttacttggttcatggttctactcatcaactatagaactattcaaagatattctattatcaacaccaaaatgaaatgtccaaacttacagttctcttaagttgctgtataataggcaaacattacatagaaaagtacaataaagaatgatgaaagctgagaagtggtataaggaataatcaaatttatgaatgaggaagtaaaaaaacttacggttgtaattcattctgaagtacagtaatgatggaaatatttgtaatagcgcttcagatctcattttggcagcctttcttctccatctaagttaagtacacactattctatcttacccttaagattcagtttcactgttctgagggaaacaggggtagatgagattctatttcccatctcttaagaatctccctttttcttggctcttcaattgttgggagaaaaaaatcaagttcatgagcaggtagaagaggaagaaaactaattcttttctctttctatctcaaacactaactgtatttataaaactctaacaaaagtagattctaaaaaaatctaacacaaaaataagacatgaacatttccttattacacgtcttaataaatatcacttatatttattaaagaatttcttgatgctcagtattaagctt

SEQ ID NO: 56716 - DNA, 2392 bp, Homo sapiens
  misc_feature (1)...(2392): n = a,t,c or g
gcccctcataatttggagaaaacttgatacaatagaagctgactcttaaggcattggcttttaaattaatacatatatccaaggatatgttatagctgcagtgtttgaaagccaaaggatttaagagttttgttgttgttaataaaaggaatactccttttccttttggatcatagcttaacaaggcacaggaagggaagggatcttgactaagattcatgagacattgaattaaggagaatcatcttcatgcctgaaaatttagcaaaattccgactatggcctccaggggcaattcctaaaagctgaatggataataaaattggactgggaaagtaagtaggtggctggtcctcaccctgttgggaatgggctatcctactatgctgttctttggtaatggaataaattgacccaagggaccgaatttcatttggatttcaaattgtccagagtggaaaagccttcaagatgacatgatgaattactcagttcatctgatttctggtccctcctttctcgacaactataatactaacccttttctcaggataactgtctacacctggcagttttctctgacgtgctgttcactcacatccctaccttgcatggtaatataaaggactaggaagcagtcatacttccaggaaatgcttggattcatgtggacattcaggaagcttattctcatataatactaatctaaacagtactagaaattacagtgccaagagccaccaggaggcccagccaataagcatagatactatatggtatcatgggacccatctattttttaccagtggactacaggattacttgagagttatcagggctgcctaacagaccaggagatctgggggttgcaccagggaatcgccatatttgaccagcatgttttaaaagctcttggtaggattagttggttctaaggatccctctagggacctcattatttcaagaggaacccaaagtccagcctcctacatagatgctgccccacgaaggacccacaaaactaacctagttcagggttctcaggcaggcagttctgcttcagcttagagcagaacccataaaatactcaagtactgggataggcaagcatgtgtgtttactgtggattggtccctgaaggctcctttgggtgagaacatgtgaaccaggcaccctggtttgtttggagcattgctgcccagaagcttctatgggataggtggtgcttgggattgatgtgttgtggccatgcagccctccctgaggattgacttctgcactaatccagtgaaggaggctgtgtcaaaagaagggctcagaagccctcttttcagaggcaatgattcctgtcagtatgaggtcccttagttactaaaaagggacatgatttaactccagtttgatgaacctcctccgagtttactttattgtcttcaaatcttttgttttcttcctttttgtgagatttgtgggttttgtgccttataaatggaaatgtatgaacacaatatatgctcatgtagaattttctgttctgggttattgggataagaaaaaatatatattgctcttcaactagtgaatgaaagaaacttcagaaagctagaattgcttatcaatcaaaagactttctcaatctattttggccacaaacaaacatattcaactgaagctttccaataatctttatatcaagaaagcatgcgtcttgtcagctacattgttttcttagatggatttctcctgttaatcctcaaatatctgaacttctgtgttacccaagtgtcttatacaagcttctggtgtctaggacaaatttatggcaaataaaattagcaaaactgaactgggttgaactgaacaagaggatgggggaattgtgcaaatacattgttagtagaaggtcaatttaaaatagggactagaaattatttgaagttttctttattacggattcaaagacttattttgaaagttggaaggagaagggagggaagagagcagaagggaagaaggtgtaagtcaagctcttgaatataactggtggtattgtgggcagagatctttagttcaaatccacgtattttttaaaagagagaaccggagtaggagcaatgatcagatgggtgcacagaccagtgccaatctgaacattgttaatggcctgtgacatgatgagcacaggaacaggcatgaagatattgccatacaattttaatttatacaagtattgggcccctccaagtgggttgggaattttttttttaatctctttttcttgagacagggtcttactctgttcgcccgggctgggagtgcagtggntgcattcacgggcttcactggcagccttcgacctcccccagcttccaagcattcctccccaccctca

SEQ ID NO: 56717 - DNA, 217 bp, Homo sapiens
ggcacgaggggattacagttgtgagccactgcgcccgggctgcttatttggaaaggaaaatctttccaagatggccctaacacatactcccttgggtctcattgacctgagctggtccatcctcaaaccaattcctggtgaaaaagggacaggcttgctgtggttggcgctggttggctttggccagtcttgcatcatctgccaggactgggtcctt

SEQ ID NO: 56718 - DNA, 331 bp, Homo sapiens
  misc_feature (1)...(331): n = a,t,c or g
gaaaatatataaatatataatatgtaaattaaaaattaaatacacttgattgttctaatatctaaagctgttgtgactaattttacttattccatggtggaatattcccttctgttttataatattggttacaaatttcagcagaccagtttttgtagggtttttgtacagattgggattgaaagttcattcttccactactctattgcaattgccaatcatctacagaggaaatactgggttcagaatgactgtattaatttcttcattggattttcggggtaactcgagtagttactaaaacccaattcatggggggntgggggagtag

SEQ ID NO: 56719 - DNA, 572 bp, Homo sapiens
  misc_feature (1)...(572): n = a,t,c or g
gaaggtaaggaactggtccccaggtagacagagctcgtttgctggtatcaaattgttgtgtgaaaaattcctggagcttcattcctatttttatcagatctggtgtggttgaccttgatatcattacttggaaaatatcccacttcaaatctccatggacgaaaatctcacttttatcagttatgcttgaatccaatgtattatacaagtttactttccattcatcctgaagcttaagatcagcattactgaagatgcccatgaggatacttgagcccatgtaatcaacacgagcttcagtagaacccatagatgtcaatgctttggagatggttgctcatatttctgaacatccaaatcagcaacccagtcacaaaattcagattactatgggttctactgaagctcgtgttgattacatgggctcaagtatcctcatgggcatcttcagtaatgctgatcttaagcttcaggatgaatggaaagtaaacttgtataatacattgggttcaagcatanctgataaaagtnagattttcgtccatggagatttgaagtgggggtattttcca

SEQ ID NO: 56720 - DNA, 815 bp, Homo sapiens
gctttaaatgattttattaaaaattgtaccaattgatggggggaaagatatacacacatacacacatatgcatgtgaagaacataaacacataaagccaaaggtcctgtacagatttttaaaaaatggggcccctttcttcttcctctctcccagaggcagagtgcccagaccccagggcagctaccctggggatgaacaaaatgctacattctcactgggtctcctcgatagcccctgtggatccagggatggggtagaaggctgccagtggcccagactttgaaacaggccaggcagaggccaggctgagtcctccaccctcattgcaggagtccagcgtctggcctggggacttccctcaccagatctgttgaccaacttctagaaacccctgctttggggttgtgaattagaagggctgttttgaccctgaatatcaggcttcccttcctcccaggcatttctttcccgaggaggaaggtttccagtccctctcccaacccccaccctcagcaagccacaaagcctccaccgtcttcagctggttacaggtcaggatccaggtcagactctccctccctctaaatctgattctccacccctcgctagagacagccaggctcctgggggtgggggatggagtctgagggggtggaggtcggggcaccgaaacaggtctcctgaggctagacttgaggaatgtttaggccaactcaccaggcagaggaggaaggggccagtttagatcactaagccaattaaaaacaaccagccagaaagaacctttctccttcctgacagctactctgccag

SEQ ID NO: 56721 - DNA, 267 bp, Homo sapiens
caggcgtgagccccgtgcctggccaaatctttcatactatgatttttatggacagtagtccataaactaggaaacgcgatgatttatttaaccaaggcctactgttgggcatgatcgactcttgcactttgaacatatcaccccatgctttcctgctaagaagtccacttttaaaaatgccttgtaatttttaaaaattcctctattttaacattctgctattgagtttaaggaaatacagtttcctcatggatgggggatcccttg

SEQ ID NO: 56722 - DNA, 360 bp, Homo sapiens
aatatgacaatgttgacaccataagttgcagtatttttaataataggtaaaaaatcagtatcatttgtgttattactgctgagctttttaaatgtatttagcgatacattcctttagtaaattatatttttccttaacctatatttctcgttcggatcgttggaatttcttactaatttctaaaaattctttatattgagaaaattagcccttcaaattaaagagaaagtatgttgcaaatgtattttctcattttactgcttagtgtttttgccacctctaagttttctttttattgccaaatccatcttcttatctttggtttcttccttggtgtcatgcttagaaaggttttcatcc

SEQ ID NO: 56723 - DNA, 1815 bp, Homo sapiens
tttctttttaattggggatacaacccaattaatatggataggtgcagattatgtttctccaccaagcaaaacctagcgagcagctttcagtggccgttagaattttcacttatttccaaagggaattcaacaatagaggtattgcattactgagtaatgaatacatcaaagctggtgaacaataaattgcagcttttactctgagtgagaacaaaatataaagcaccaatttaaaaaataatcaaatgactacaatttacttttttgctttgtttacagatttgaaaaactttaattcagctctattaagcacctttatgataacatgtatcaaaagtgccattcttaaaatgtacatcaatgcagggagtgtttccagttccctaaagagtaaacaccgtattttcttctgtacacttatcctgaatgtgatcagagtatacctgcttcctatataatattgttcctagggatacccgccttggtagactatacaaaatgagtgcagaatgtaccactaaaaggaaatctttaacatacggagggaacaaatacacatggttttcattattcagggaggaggagagagtatacattattgtcttccatgtccttctctgagcctctttgttcatacatttcacaggaaagccccaaaataacttttcatgaagtttgatttctgctattctcctaaggttttaatccacctccacattttaggaacttatcaacaaatcaaagttattttagttttatcgctactgacacatatttacagtttttcaacacacacacagctaatcaaaatgtttatgggtttgtaaaagatgaccacgtggtaactatcttatttgttcttacattttcagaaatgaacataaaattctgattcttgtagctatttcatttaaatgagacttctttttaaaccacagtttttaaaaaaaaaacaaaaactgatacaatgtattaaaacacataataacaagagtctacatgtaaaaatataacttttacatacacaatttcaaaataatgatacgtttgccatttgttgcataaaatttacaaatgtatttcattactatataactggcaaaacaggagaacagatggaacatttagaccatttcaatggatttatggcatttactcagtgctgataggtggaaaaactacttgaacagggatttttttttttcttaatacatgccaagaattgtgtggctgtaaaaatagaaacaagttagagacaaaaggatgctgacaaatacttaactaggagcactatttgtttactgcactatacaccaaagtcaatcattataaagattcacgatggaagttggttcaattgtgcccagacgtcaaagctagctatctgatgagtcgctgtgccatagcttgatctatgtttctatcaaatatggtaagtataaacttcattcatactggccagagaaatactgcactacccctcctcaaaaaagtgcaacttaatgctttaggacttataaggcttgttataatgctgcatgatgattgaatattggcatttttcagacgaaggaggaggcagttaagtcatctacattttagtaaacccattttgaaaaaaaaaatcaagaaagcaacaaaatcaatcagctctgtcacactacttgcaattttctcatttgacgggtttttgaactttacttgttttttttgtttttgtttttttccaaaaatctgaccatgtattcagaaacgcctcactgcacactacttcggctacacaggtaggtaacactttaatcattttgttaaatc

SEQ ID NO: 56724 - DNA, 272 bp, Homo sapiens
gcgagcatttccaggctcttgtttcccatcagcctctgggtccaaactaaccacaggtctctgggtccttttccggtgtccttaaggttcttggactctgcatgtgctgccaggttgccagatttctaagaaggagtttgaagaggagaaaaggatttttgcatgtttagaaatcaaggttcaggagaatcttgacagtgaatgtgtctcattacattgaataacagctacaggatgttccgagagctgatttggagtcaaaaacgtatgag

SEQ ID NO: 56725 - DNA, 376 bp, Homo sapiens
cccagtctctcgtagtttcatcctttgcatacagatctgtattcagccaatatttcaaggcccctttgcagatcttcagagctctatctgaatttttttctcttcactgttccacttcataaattctggtcaactcagattctccaatctctgacctaaactcagcaagaccacaaggctctgtttggaatccctcctccatccctgctcttgacctggaaaatgcctccaggcaggaagctgggacaatggtagagttcatgtcatttgttttcccaatcatgatcctaaactcctggtagaacaatatctgaaaataatttttcagcctgatttgccttgttatagcaaaatgtcagttcctgtagctgttgac

SEQ ID NO: 56726 - DNA, 250 bp, Homo sapiens
ggtatttctttgctccataccaaagtcttcctcccccaaaataaacaagtgaattagaattaaaaaagaaaaaaagttaataatttcttctagttctcagagttttatataaaactgtacaaaattatcatcatttagagttgatttttttcaccagccctgaattttcaaacttgtaatatgctgtttcacaatttttttattaaattacttaatgattccagtctgcaaatgagcacccacgcgtccg

SEQ ID NO: 56727 - DNA, 374 bp, Homo sapiens
tttcctctgcgttcgctccgcgctgctggaggctgtcgtcccaatgctccccaaacggcggcgagcgcgggtcgggtcccctagcggcgatgccgcttcctccacgccgccctcgacgcgcttcccgggagtcgccatctacctggtcgagcctcgcatgggtcgcagccgccgggccttcctcacaggcctggcgcgctccaaaggcttccgcgtccttgacgcctgcagctccgaagcgacacatgttgtgatggaagagacctcagcagaggaggccgtcagctggcaggagcgcaggatggcagctgctcccccgggttgcacccccccagctctgctggacataagctgggtaacaaagagcctgggag

SEQ ID NO: 56728 - DNA, 772 bp, Homo sapiens
tttttttcccaacgttttcaagttttatttttaaaatatattacaacatcacattaaaaacagtagaggaaaacaagcaaacatgatagaattacttttttccaactcaatagtacttagctttacctagaattttcatacagttgatgctaacttcttctgaaccctttctgactagtattttaccttatgtattctttatagtatttccatataatctttaccgagacctattcagagcataacatagacagggcagcacaagcaactgacacctttgttggtagtacagtgttttttcaaccagtttatgagagaatgaaaagaatgaaagtgaaaattttacttaacttagggttatgtagctctaggtaatctcttcagaactcccctgcttcaccttctcaagttaatcaacagtggctagtttataactagaaaccacttaccaaattgcctaaacaagaaaactttttaaaataacaatttgctgatctgtccaataactccaataaagttgaatttgctttatttttccaaaaattatgttgtctagataaagactctttgtaagtgtaaatgtatgatatattgagttgatttttagtccctattagagagttgttagacaagttattaaagtttaagaaaatttggattctaaatttccacctgataacatatatgaaatattttatattttcaatatatacttacttatattttgcacactgtatataaactaggagattagaaatgttttaagtccctt

SEQ ID NO: 56729 - DNA, 151 bp, Homo sapiens
gacctggccaaggtacaggtcagttcaccgggacctggaggcccagattgcgatcgtgacggagaaccagggccctgcagcagcagcttcagccaggagcaagagcagctctacctgaggtcaggtgtggtgtcctctgccaccttcgcgg

SEQ ID NO: 56730 - DNA, 982 bp, Homo sapiens
  misc_feature (1)...(982): n = a,t,c or g
gaaactcggcnactttttttttttaggtgtttaatatttatttatttagttcataaacaggcactgccacctccagtgttcatccatggcactttcatgaccgcttcctgttctgtggcttcttttagtgcccaagttgtatcacatttcttgctgaagttcagacaattgaaaacaaacagactcacatctagggaaatcaacagaccaacaatggcaaaacacaatacaatgaaatggaaaaataatgtttgttacaggagtgcagcaatttagagagtgtctcaggagtgtggctcactggcagctgcagctatgttagtgcttctttctgcctcaagttcagaaacaagctggactatctcagggtgattgaattttcctgctgtggaatcatagaagtcttgcagtctcccaggtttgtgttcaaggtcttcatattcagatgcttgaagaatcatttcacattggtctagctgcttcacaaatttggcttctgcactagattgggtctcgtactcttcccaaagttcatagagctcctttctgaagtcctctggtaagagctgggttatctgcttcatagcttccggtctttgttaagacggtcatctttgatcaccatagccataactgccatccggtacatgtgatctgaaacgctctccggcctctggacatttctgtatacccagccagttcgtgggactctcttgagctgccctaccagccgcaggaactgcagtagggaccgagccccgtggcccgagaaggtcgcagaggagaccgaagccatgcggccaccgaccccggctgggcggagcaggccgcggcgaagctcctccccgtcctcctcctcctccccttccccttgtctttcttccccctcctcttactcttctatctctttctcctccccctcttcttcttccttctgccccctcttcctgctccccctcttcctcctccccttccaacgcct

SEQ ID NO: 56731 - DNA, 287 bp, Homo sapiens
cagatgtgagccaccgagcccagcttgatcaatgtaattttaagattacctaaaaattccattttgggataatatcccacttcatcagaaatattagaatgatttaagtgttaggtcctttcccttatctgtaagttaatgaatgtattaatgagcagtaaaatggttgcaaaaaacctgaacctgaacaatctgaatgtactccttaaaggtatctgagcaccttttcaacctgaatgactactcatttatctgataaagtgatgtagtttggatattcaaccctg

SEQ ID NO: 56732 - DNA, 684 bp, Homo sapiens
gcagttctgaaatcaatggagttaatttagggaatacaaaccagccatgggggtggagattgcctttgcctcagtgattctcacctgcctctcccttctggcagcaggagtctcccaggttgttcttctccagccagttccaactcaggagacaggtcccaaggccatgggagatctctcctgtggctttgccggccactcatgagagtgtttttgtgtaaagtattttttagaatactgttgacttcttcatgatttaataaccatcctttgcgaagttttatgaggctttaggggaatgtcaaccctcaaatttttgttatactagatgggcttccatttaccccacccacctattttaagggtcccctttatttttaggttcaaggttcatttgacttgagaaagtgccccttcctgcagccttcattgattttgtttatccttcactattaattgtaacgattaaaaaagaataagagcacgcagaccctctaggagaatattttatcccctgggtgcccctgacacatttatgtagtgatcccacaaatgtgattgttaatttaaatgttattctaatattagtacattcagttgtgatgtaatatgaataaccagaatctatttcttaaaagttttgagtatatttttcaactagatatttgtatagaaagactgaat

SEQ ID NO: 56733 - DNA, 1525 bp, Homo sapiens
ttttattatgtatacttgttttattcataatttgtcatgttctgggataccaaaagtaataatggctgaacttaacaaaatttgtaacctcatcttaatatccactgatccatctcattcaatggtaacagtcaatgttttctaaaggaacataaaaacaaacatgcacacaattgcacagttttcataaaggtctatttcattattggtgggtagcgcatttaacagttaaatacatttaaataatgtataggtgactgcaggactgcagcattggtaactagataaccaactagaaaccagctaacaaagaactgtctaaatacttaaaatacagctcttgttgagatcatcctttgttttgatcatcttcttgggggaaaaaagcctgctgctggtcacaatggaaatatattaaggccaaatcttctgatatcccattcccaaaggtttctttcagctgggattaagcctccaactccagggcgagcccaaccttgtggcctccagcattaatgctcttcccatctaccagagcagagagtgtaagcttcacaccaggcctcagagtctgagtatagcctactccaattaagctagagttgttgacttttgcagaaatggaagcagtgggatccaactgatatttagctgcaatgccaaaacgagtgcagttggtacctgatgtccaagcaaggtttactgaagtgtcaagatcttcacaaactttctgataaattgatcctccaaattctgtcccatcattgacattagtgtgtagctggaagtccccagtcctgtagcccactgcaaagttattccttgtcagctttgatttggcactgtcaaaggtcatctggtagccagcaagccagccctcataaccaaagacaggctgaaccatggattgcaggtccagcaaaatcaaagtcaacatcacaaccaaggtttatacactccctcttgtaagaagacttgattttaccacttttctttcctgtgtttggtgagaaggtagtatcaaatgtcagtttcaaaccttgacaaatctggtcttcaattgcgatttctgttccccagagtgttaatcagtgttccaacttttctgtgaaaagtcaagacccatactcaacacccacttgtatttggtctcccaaggtccccagtaactttaccagtgtctgtaattagatgaaccggacgttgaaaattccacgccactgcaagactttgttttcacatccagtttcaccaacccaaaaccaaatcctttgttgaaaatatctctggcagctttgccaaggtcagcatatgatggaggaatacacattggacgcgcgcaagtctgtccgtgggtcgccatggcgaggccgcgggaagaggggaatctggtggtgtcctgaggggggccgccgctcaaactccgctagctgctgaaagccgcttggcacgctcgcggtcgggctgcagctgcagcagctggagggcgaagtgaaggagacaccgttccgcccgccgcaaccct

SEQ ID NO: 56734 - DNA, 268 bp, Homo sapiens
tttccttagtggccagtgtagacttggctttagaatgcctgtacccgtaagagtctaacggtagccaaagttgggccccaaaggccactttctaagagctgccatctctcatacttctaatggggtggtccattgggaaggacacaggtcatgtgtggctccaaggagctttgtagcatctatatcagtgtgaacacatagaaggagtccagggcttgggggaaccacatggcttcttagataaaggaagcccaattttaaaatgaag

SEQ ID NO: 56735 - DNA, 1406 bp, Homo sapiens
cgaagaagctggcaggggcacgagccgggggcgggtttgaagacgcgtcgttgggttttggaggccgtgaaacagccgtttgagtttggctgcgggtggagaacgtttgtcaggggcccggccaagaaggaggcccgcctgttacgatggtgtccatgagtttcaagcggaaccgcagtgaccggttctacagcacccggtgctgcggctgttgccatgtccgcaccgggacgatcatcctggggaccctggtacatggtagtaaacctattgatggcaattttgctgactgtggaagtgactcatccaaactccatgccagctgtcaacattcagtatgaagtcatcggtaattactattcgtctgagagaatggctgataatgcctgtgttctttttgccgtctctgttcttatgtttataatcagttcaatgctggtttatggagcaatttcttatcaagtgggttggctgattccattcttctgttaccgactttttgacttcgtcctcagttgcctggttgctattagttctctcacctatttgccaagaatcaaagaatatctggatcaactacctgattttccctacaaagatgacctcctggccttggactccagctgcctcctgttcattgttcttgtgttctttgccttattcatcatttttaaggcttatctaattaactgtgtttggaactgctataaatacatcaacaaccgaaacgtgccggagattgctgtgtaccctgcctttgaagcacctcctcagtacgttttgccaacctatgaaatggccgtgaaaatgcctgaaaaagaaccaccacctccttacttacctgcctgaagaaattctgcctttgacaataaatcctataccagctttttgtttgtttatgttacagaatgctgcaattcagggctcttcaaacttgtttgatataaaatatgttgtcttttgtttaagcatttattttcaaacactaaggagctttttgacatctgttaaacgtctttttgtttttttgttaagtcttttacattttaatagtttttgaagacaatctaggttaagcaagagcaaagtgcccattgtttgcctttaattggggggtgggaagggaaagagggtacttgccacatagtttccctttttaactgcactttctttatataatcgtttgcattttgttacttgctaccctgagtactttcaggaagactgacttaaatattcggggtgagtaagtagttgggtataagatctgaacttttcatctgcagaggcaagaaaaatatttgacattgtgacttgactgtggaagatgatggttgcatgtttctagtttgtatatgtttccatctttgtgataagatgatttaataaatctctttaaatactta

SEQ ID NO: 56736 - DNA, 172 bp, Homo sapiens
gccaacaacaactaaatccccggcggttcgactttggcttttctatcctagtccccattaattgacagttgaactcacattcttccagtctctgagattagaaaccttgcagacatctgttaactcttttctcttcatcaaccccattttcaatctgtcatgaggtcttttg

SEQ ID NO: 56737 - DNA, 382 bp, Homo sapiens
aaacaacctcttcaaagtacccttgggaaattggaagttcaatcttaagttttttgctgtctttaatttactagaattgcctaatttttagttgatttctctacagagcttagcttgtgtagttatttctcttttactgttgctttggtgtgtcttgaagtttgattgattatttttggtcattgagttcttagtgtagtttgctagatgattattaagattcttttgtgtctgacacttgtggtgagttgcttttgaaatctgttgagatttccatgtgagaactgataatcaggctcttgatctgcttccctaaattacttttttagagcccaaaccccaggtttagggtgagggtttgtaatacaaagaaacacttcca

SEQ ID NO: 56738 - DNA, 296 bp, Homo sapiens
ggtaaggaaaaaggggtgtctcatgggaaaagggactaggaacaagaatctaaaaggaggcccttttggtctttctcagaccataaaatctctcatctctacttctttgcatgacttgcattttttttttctttctctcagcctggcttgctcagtttgcctggaccacctggtcagaaggtagctacctccattaggcattctaggttatggtatcctctttgcagtttcaactaaagagcccagacagaaattaggaattctcttcagttacaatttccgttctcacagaaaag

SEQ ID NO: 56739 - DNA, 465 bp, Homo sapiens
  misc_feature (1)...(465): n = a,t,c or g
ggagtcctttactatgtattacgaacttatagcattcttccaaagtttagttgagcataaaacatttttttcacaaaagactttacaagtcaagtattccagagaactttaaggagcacttttctaagtaaatcttttggaccttaaagcgatactccttgactgcttttatctacccctgatatgggacactgactgtcacctaagagggtggtgtgtggtaagggcacagccagggaggcatggattaggttctggttgcagtgtcccactgaacatcaaaaggaatacagcagacatccctgcaggagtgcccttggccggcggagggagtgggcctgggaagatgcatttagagggcatattgagatgcatgaggagtaggtgtggagaacattcaccagtctaagactgctgttctccatttgagacagcgttttcttggggtgtttganaatgggatgg

SEQ ID NO: 56740 - DNA, 601 bp, Homo sapiens
gcaagaaagcacctccgttgtggacggtcctcgggcacaggggatgagcgctaccagtttcatttgtaggcagggagttctccgcggatgcatggtggcagtctgctttgatggcagcagtttctgcttaggtgacctagaggtcctcagcagtatcctccacacctatttattgaggtgcacctgctggggattcataatgagaatataacaagaggatctcggtgaaaggccttagtgggtgttttgtgtgaggtggcttgtagctagctacttccttacagatggtagagtattccaatcctctttgtgttagggttcttgcttccagtttgggatgtattaaaaccaccatttcactgcttcccttcctcaatatgctctgcagcttttcttgctgtttaaacctctcgcctcagctttatttatttgtaagctgcattactaactgcccagtgattcggtgaaagctttttactgaaaaagttaacatttctagtcatcccaatcaactggcttttttcaaccaaaattttatatcattctttgtctatcagatacgagaggaaggaagataatacgaagacatgttgaatagtga

SEQ ID NO: 56741 - DNA, 4091 bp, Homo sapiens
cggccacataagatattatctacacaaaagcttatttaggaatgaccaatgagctcaacttaaatttattagaaatctgattagcattataaatcaactgacttttaggagcataggctttggcgctacagggatctggcttgaacctcattgaggccactgattggtgagtgaccttaagcaagtctctttaccttgttagggcacaatttcctctcggaattgtgaaatgggtttaattacaccagcttacatcccaaccatcagcaagtcctcttgtatgtaaccatctccaacacagaaaggggatctgcccatgttctaccatcctcacctttctccaagccactacaacctctcacaacagccttccaattggtctccctaaactcttatcccccctacaccccgttctcagtcctcagtccttgccctaggctggtagcccactccttgcccgccccccgccttcctcccatctccccctcctctccccggcccccagcaccttctgcatcccagcctacctagcctactcctcctcttcctggccctcttccccaggctccaggctggggggtgctcgcgtctcccctgtaggccagagcagccccaagttctgggggcggtggggctgctgctttatccccatggcgctgccatcacttctgctgttggtggcagccctggcaggtggggtgcgtcctcccggggcgcggaacctgacgctggcggtggtgctgccagaacacaacctgagctatgcctgggcctggccacgggtgggacccgctgtggcactagctgtggaggctctgggccgggcactgcccgtggacctgcggtttgtcagctccgaactggaaggcgcctgctctgagtacctggcaccgctgagcgctgtggacctcaagctgtaccatgaccccgacctgctgttaggtcccggttgcgtgtaccctgctgcctctgtggcccgctttgcctcccactggcgccttcccctgctgactgcgggtgctgtggcctctggtttttcggctaagaatgaccattatcgtaccctggttcgcactggcccctctgctcccaagctgggtgagtttgtggtgacactacacgggcacttcaattggactgcccgtgctgccttgctctacctggatgctcgcacagatgaccggcctcactacttcaccatcgagggcgtctttgaggccctgcagggcagcaacctcagtgtgcagcaccaggtgtatgcccgagagccagggggccccgagcaggccacccacttcatccgggccaacgggcgcattgtgtatatctgcggccctctggagatgctgcatgagatcctgcttcaggcccagagggagaatctgaccaatggggattatgtcttcttttacctggatgtctttggggagagtctccgtgcaggccccacaagtgatacaggccggccctggcaggacaatcgcacccgggaacaggcccaggccctcagagaggcctttcagactgtattggtgatcacgtaccgagaacccccaaatcctgagtatcaggaattccagaatcgtctgctgataagagcccgggaagactttggtgtggagctgggcccttccctgatgaacctcatcgctggctgcttctatgatgggatcctgctatatgctgaagtcctgaatgagacaatacaggaaggaggcacccgggaggatggacttcgaattgtggaaaagatgcagggacgaagatatcacggtgtaactgggctggttgtcatggacaagaacaatgaccgagagactgactttgtcctctgggccatgggagacctggattctggggactttcagcctgcagcccactactcgggagctgagaagcagatttggtggacgggacggcctattccctgggtgaagggggctcctccctcggacaatcccccctgtgcctttgacttggacgacccatcctgtgataaaactccactttcaaccctggcaattgtggctctgggcacaggaatcaccttcatcatgtttggtgtttccagcttcctaattttccgaaacctgatgctggagaaggagctggctagcatgttgtggcgtattcgctgggaagaactgcagtttggcaactcagagcgttatcacaaaggtgcaggcagtcgcctcacactgtcgctgcggggatccagttacggctcgctcatgacagcccatgggaaataccagatctttgccaacaccggtcacttcaagggaaatgttgtcgccatcaaacatgtgaataagaagcgcattgagctgacccggcaggttctgtttgaactcaaacatatgagagatgttcagttcaaccatctcactcgcttcattggcgcctgcatagaccctcccaacatttgcattgtcactgaatactgtcctcgtgggagtttacaggatattctagaaaatgacagcatcaacttggactggatgtttcgttattcactcattaatgaccttgttaaggggcatgggcctttctccacaacagcattatttcatcgcatgggagtctcaagtcctccaactgtgtggtggatagtcgttttgtgctcaaaatcacagactatgggcctggccagcttccgatgcaactgctgaacctgatgacagccatgccctctatggccaaggaagctgtgggactgccccagaactgctcagtggggaaccccttgccaaccacaggcatgcagaaggctgacgtctatagctttgggatcatcctgcaggagatagcacttcgcagtggtcctttctacttggagggcctggacctcagccccaaagagattgtccagaaggtacgaaatggtcagcggccatatttccggccaagcattgaccggacccaactgaatgaagagctagttttgctgatggagcgatgttgggctcaggacccagctgagcggccagactttggacagattaagggcttcattcggcgctttaacaaggagggtggcaccagcatattggacaacctcctgctgcgcatggaacagtatgccaataacttggagaagctggtggaggaacgcacacaggcctatctggaggaaaaacgcaaggctgaagctctgctctaccaaatcctaccccattcagtggcagagcagttaaaacggggagagactgtacaggctgaggcctttgacagtgttaccatctacttcagtgacattgttggcttcacagcattgtcagcagagagcacccccatgcaggtagtgacacttcttaatgacctgtatacctgctttgatgccataattgacaactttgatgtctacaaggtggagacgattggggatgcttacatggtggtatctgggcctcccagggccgaaatggtcaacgccatgcaccagaaattgctcgtatggccctagcattactagatgcagtttcttcctttcgcatccgccaccgaccccatgaccagctgaggctacgcataggggtccatactgggccagtctgtgctggggttgttggcctgaagatgccccgttattgtctttttggagacacagtgaacactgcttctcgaatggagtctaatggtcaagcgctgaagatccatgtctcctctaccaccaaggatgccctagatgagctaggatgcttccagctagagcttcggggggatgtggaaatgaagggaaaaggaaagatgcgaacatactggctcttaggagagcggaaaggacctcctggactcctgtaaacccccattctttccaagtcagatagtcttctgctgctggtacctgggtgggcaatggccaccatgtctgcacacaccagaaatggacattttcatatgcaatggaaaacagccacaaaaaaacctaccttatatggaagttgtagccctctgcagctcagccctgtacatatacctgtccctctctggcttggtccccttcctccctactttctgtaaatatctgtatctaaaccagaatattttggtcaaatataaaacaataataaaaaaagttctgatgtcat

SEQ ID NO: 56742 - DNA, 640 bp, Homo sapiens
  misc_feature (1)...(640): n = a,t,c or g
gttaaataaaacagcaaattcttaaatacattatgagtaaagaaagattaaaataagggaaacagtacttactgtgcaactttaaattataccaagtaaagtacaccacctattcactgataacattttccctacgttgaaaacacaaaacctacttatcgatatttttgatattaaaaaaaaggacattcactattgtagccctgacaactcttccagtatttttaaccattcagatgtattatgtgggaatatttattaacataattttgtttaacacatttctttctacacaaactgaatttaaaagtgtctataacattttcaattacagtaataacacatgaataaattataaattaacaaaatcttcatatctactttaaaaaatcatttatcaaatgctaacctccagattatctggaaaattaaagttgcaaattgctataaacctgggcatcccaattaaattacagtttttaaaggtatataaaatctccctcaaattccaagttcctctccagaaaattttattttacccttttcttaaggtttacagcctgctaaacattttacccaaatgtgaggggaactgcccggggggatgccaaagcnccaattaaaataattaaggtggaaa

SEQ ID NO: 56743 - DNA, 347 bp, Homo sapiens
gagatgaagtggagaagtacaaccgaaatggagtcaatgctctgcagctggatccagcactaaatagacttttcacagccggtcgagactctatcataagaatatggagtgtcaatcagcacaagcaagatccatatatagcatctatggaacaccatactgattgggtaaacgacattgtactctgttgtaatgggaaaacattaatatctgcttcttctgacacgacagtaaaagtatggaatgcacacaagggattttgcatgtcaacattaaggacacataaggattacgtaaaggccttagcatatgccaaggataaagaactagtagcatcagctgggttg

SEQ ID NO: 56744 - DNA, 573 bp, Homo sapiens
ttccccttcccactgtttattttatagcttttgcatcaggtagtcaactgaaacacttcaacatcagaaagctggcagaatgttaaggaaaaggagtgattatctctccaacagatgtgacaaaatggtttcaagttggaaacagaatttgcataaatgaatcaactgaatggagtaagggagggcagggagagagaagagagaaagtagtgagcatcttccaacaggactatgagggaaaaaaaaggcactgttgagctgtgtatttataaaataaaagtcaaaatacacaatccatgtttccgaaaattacattcaacactgcttcagagatgctcacatacctgactctcaatagaaagctacaaaaactgtctaaaaaatgagatagacagcatcaatgtctcaacacaggcttaacagtaatgcgttctaaagagttcatcaccatcagggtccattttataaatagtactgcaaaggccacaaagctgcatgaaattacaggataaatctgactaaatgatcattcatttcaatctctaaaattcctgctccaagaaatcagaaagc

SEQ ID NO: 56745 - DNA, 633 bp, Homo sapiens
  misc_feature (1)...(633): n = a,t,c or g
ggccttccagacactgtttttgaaatcacagagttgcaatctctaaaacttgaaatcattaagaacgtaatgataccagccaccattgcacagctagacaatcttcaagagctctctctgcaccagtgttctgtcaaaatccacagtgcggcgctctctttcctgaaggaaaacctcaaggtcttgagcgtcaagtttgatgacatgagggaactccccccctggatgtatgggctccgaaatctggaagagctgtacctagttggctctctaagtcatgatatttccagaaatgtcacccttgagtctctgcgggatctcaaaagccttaaaattctctctatcaaaagcaacgtttccaaaatcccctcaggcagtggttgatgtttccagccatctccagaagatgtgcatacataatgatggcaccaagctggtgaatgctcaacaacttaaagaaagatgaccaatctgacagagctggaagctggtccactgtgacctggaagcgtattcctcatgctgtgttcagcctacttcagcctccangaaattggacctgaaggaaaacaatctgnaatctatngaagaaatcggttngcttttcagnccttaagaagttgaagtgctaaa

SEQ ID NO: 56746 - DNA, 561 bp, Homo sapiens
atttttgtagcatgtcttaggatctccaggagtccaagaattattgtgggtgtcctccaattcatcactcttcacttaacagcttttaagtagacacttggaatctttagaggtctgtcgccctttgattatccatacattcgaagtaactagccaatggtgaaaaattcctcaagatatcctcagttgcaatcacattactggaagatgaatagaataaatgtattaggctggtcttaatttttgatggaaatattctgttgtcccgtacttgccattggatttgataaagttagtggtaatttggaaagaatcggggacttgccaatatatttgtgggttttagcttatacccctaggatttcttggttgcgggacgagcagttttggccacttccatcaggacaagactttttaggtcacttagtgcaggttttagtttctattttggattaacaacatttatattgattatcgaaaagaagctttcatcatttcagaacagtcctggaagtttgactttgagtgtgggagaagtcctaataaaccattttggaaatt

SEQ ID NO: 56747 - DNA, 149 bp, Homo sapiens
  misc_feature (1)...(149): n = a,t,c or g
ttttaagagtgaagcaacaaaagcagagatttactgaaatcgaaagtacactccacagggtggcagcaggcctgagcagcggctcaagggccagatacagaatcttcttgggtccaaataccccctagaggtttcccattggncacttg

SEQ ID NO: 56748 - DNA, 391 bp, Homo sapiens
actgactagaagtctaacttaggactattcagtatttttgtaacaaatagctgccaatcacagcagcctagcttcaatcaatcacaggtggccatctgattagaccacattcaaataaggcaaagccgaggtgtaaccagtcaagctgtctctgtacctcacttcagttttgcccctaaatgttgcctgcccagaatgtggactggagctgtctgaacctcgtctggttctgagggctgcctgatggatgaattgttttttgctcagacttggctagatttaatttaacagcagagaccttctggcccacagtgcctaaaaatatttactctttggctgtttcctgaaacaaattgctgatccctgatttaaagcataaatgctaagtcag

SEQ ID NO: 56749 - DNA, 417 bp, Homo sapiens
ggcccctcctgtacagccctccaccgcccagagccttccagcgccgtgtcttccccttggagcatctggaggccccagacagcacccgcctgacgttcagcagagggggagaccgaggcctgcagcagagtgttttgtcagatgctgctccctgaccgggagtgagagggaacccacctagaggtgccagatggggtgccagggcagcgtggcctgcaggcccctcagctcctcacagcccctgcccccagccttcctgggcccagagatccccttgtttaccctagtccagggacagaggctcagatgtcatgcttgaccccacagtttctgcagatcctgctttgtgacttcgagtgaagtgtggaagcgctggaagcacttagaccctgctgtgccgaaacccctgggaggacc

SEQ ID NO: 56750 - DNA, 379 bp, Homo sapiens
  misc_feature (1)...(379): n = a,t,c or g
gtccacagccagagtggacagtagtacaggagccttctcattctgcccttatccgggaataaccgtcagcagctccagcaacctcccccctgtctctttatagagtggggccacgtgcccactcttggaccaggccctggcaaagggggatgggtcgactagtgtatcccctggcactgagcacacttgcccttgagctggggttttgttagtagggaggaagctggagtggcagttggatagacaattcatagtagctgctgccatgttcaaaaaatgctgcaatgtaaaatcataaagtattcatctaggcataactttttaaaatattcagtcaccttttattctactaaaatcaattttaacattttagngtata

SEQ ID NO: 56751 - DNA, 702 bp, Homo sapiens
caggacccaatagattttatttcaggtggggataagggacaagcaatgtgaagacagggaaggaaagaaggaagtctctatgttctgaaggactgcctaccccactgttgagagtgccacattctgcccttttagcaattttaattaatttttactaggactttggtaacaccacagaaaccctgtggcttcctgttaaaatgactgtgttacatgccttatttttattaaagtggaatttaacaaatacttttattattttgaagcatttcatcaattctcggtggaagcactacatcatcgaatgggaaatcaacaaatgaaaaatgaaaaaaaagattatccattcacagtaagcaccattttactagaaagagagataaacttcaaaaagacagaactaaaagtctttaaatataagactgtattcttctatatactacacatcaatttgtagtgggcaccaaagtgtcgcctgctctgcctgaggggagcactccccctagtgattttccataggaaataaagttaaacttttattaaagtaaaaattcctgggtcaattagaacacaaataaggaggaaattctttataaaataagtaccttgatgttagggtgacttagaaacaattcattagtctttgaattctaaatagctgaagacatgcagctaaaacaataatttttattttaatttttt

SEQ ID NO: 56752 - DNA, 509 bp, Homo sapiens
tttttttttttgcacatagaaacaagacatccatgtgtacagtatcaaaaaatatataccaaggttactggtattgcagttcgtggaaggggaagagaggggagaaaatgaaatcaaccgaaatactggatggaggggaagaaaggtcaaaagaaaatagtttgtctgatatagaatataacatgatctagaggaaactccataaatctaggtttttatatttcaatatataaatacctacaaataaatatatatatagcagcccgaaggggggtggtcgggccttttgagctcaaacaatacatttcaataataacaccacgtacaaacgggagtagagtcagcacttgacaagttagcacggttaaaatataatactagaactctgaggccgggcgcagagctgccctgtccgttccgggggtccatctccagcggggaagggcaggagagggcgagcccgccggcaccgcgtggaaggggcctccgccagggtctgacagccgccg

SEQ ID NO: 56753 - DNA, 265 bp, Homo sapiens
catatgcaggtgaattaaatttaactacagacttaatttagcagtacagaaacatgtcacacatccattcttttcacaatacaaaatataccaccccttatgggtatacacatttccttgtttaggatgtccttaacttcaatcgagatgtgaattttccagtaaaagagacactaaactgtcatttctttaaaggtttcacacactcaaggggcattcagtgcttactgtctactaaagacaaagtcactgccaacaaagccca

SEQ ID NO: 56754 - DNA, 475 bp, Homo sapiens
  misc_feature (1)...(475): n = a,t,c or g
ttttttttttttttaacaatgtatttcatctatgtttttattaggtaaaaattaaccattccatataacaaaatagtaatttttaattacaatcttaaaacagaaggaagttaaacaactcaagtgaagttaataacagcagtttttgacaatattagtccttaaaagaaacagtaaaatatttggtttctataacagtcaaaacaattagactgattaaaccataaaaattaataacttataaaagaatccattatgattcatgcattgtatgtattataccactttaagttataccatattgaattcaaacggtatagttttgaattaagaaataaattctttgctcttatttacttggttatcataacaatttaaactgtgttacaactaaaatgggtaaaggcagttggtaataaatacctggaggaagattttgaaaggttttcccccnctaaggaattaacnggattat

SEQ ID NO: 56755 - DNA, 761 bp, Homo sapiens
cggacgcgtgggcggacgcgtgggcacgcacgtggaggttggttaaagggaagacctgggttttagtcctgtctccatcaacctcaagaaatgggacctcatggattggaggggaggcaatgccgagcgatgtgctcctgagcaggtgccacaattcttcacctgtaagattgctgacagaaaagtgagacctcctccaccccaaggtctcctaagagaatgctgctagccaaaaaaagatctgctgataattgaggaagagcatctttaaaaagacactcaactacatttcagaaacataaagatctaagtgttggctctacaagggaagaaataaagagaaagaactttttttcctcctacaacaggtctagacaacgtcatacaaggagttgcacgcatatccaaaacaaaagcaaggcaaaaacaagcaaaaaagcaacaaatgccttcccaaaatgatgtccatttatcagcccagaaatgtactggatactggtttagttcagcctgtaggtgctgggaagaaattccgacaaatccaagtcagttgcaaaaagggaaaactccagacatatcacccaatgaacttgtaagaaagcatatgagcttccctgaacagattttactccaggtttgcagccccgcaagatttaagatggggccatgaggttaaatcttgtaaactcagaagtgttcacgctactgcatccctaaactctgtaactctctacatactctttaaagcagtgtttctctgc

SEQ ID NO: 56756 - DNA, 179 bp, Homo sapiens
agatgttacccattttaagacacacctttttaagggtaactttaaggggaaaaaaagcctgcctattatgatattacactttctcatcaaataaagagagcttttgaattatcatcatcatcattattttttgagataggctccctgtcacccaggctgcagtgcagtcggtgcagttg

SEQ ID NO: 56757 - DNA, 223 bp, Homo sapiens
  misc_feature (1)...(223): n = a,t,c or g
agagatggcctagaagacttgaatgtaccccaaaggattcttgaatccctctgggaaatttagactatgattttcagtaagaattaaaagccccaggatannnnnnnnnnnnnnnnnnnnnnnnnnnnnnnnnnnnnnnnnnnnnnnnnnnnnnnnnnnnnnnnnnnnnnnnnnnnnnnnnnnnnnnnnnnnnnnnnnnnnnnnnnnnccatctcaatttaaa

SEQ ID NO: 56758 - DNA, 565 bp, Homo sapiens
gctcttgtatagaaatatagttgattttgaatattaactttgtacctgcatcttgatgcagtcagtggttctagtagcttgtttgtagaatcctttggatttttctatgcacgtgatgatagagtctataattaaaaagttttactttccagtagatatacctcaataaagctgtttaattgacatatgaccagctatcatatgtcaattaaacagctttattgaggtataattgacatatgatagctggtcatatagatgaagtgtaaagtttgattagttttggcccacctgtaaaaccatcaccagtcaagataatgagcatatccctcatccccgaagtttccctgtcctccttggtaatccctccttccttcgtctctctttgcccacatcccatccctaggaaaccactaatattctctggtcattatggtttagtttgcattttctagaattttatagaaatagaaacagagttggttctgtgcctaggtcttaatttatgcggttgactgagtgatgacacagatcagtgccactgaaagaagaatttatgactaat

SEQ ID NO: 56759 - DNA, 818 bp, Homo sapiens
tggaaagccaacaccatggtagcattaatgaaagtttaccaagaggaagatgaagcctaccaggaattagttaccatggcaaccatgtttttccagtacttactgcagccatttagggctatgcgagaagttgcaactttataattccttggatgaggatgacgtaggtcctacgtctccaggatagttgccctggagaaagaagctgaagaatggaccagacgggctgaagaagctgttgtctctattcaagatatcacagtgaattattttaattagacagtaaaagcattagcaggaatgcagaaacgaaatggaacaggatgtgaagagatttggccaggctgcctgggccacagcaattcccaggttggaaaaacttaagctaatgctagctcaagagactctgcagctcatgagagcgaaagagttatgtttaaatcacaaaagagctgaaattcagggaaagatggaagatcttccagaacaagaaaaaaatataaatgttgtagatgaattagaaatgcaattttatgaaattcagttagaactatatgaagttaaatttgagatattaaaaaacgaagaaatactgcttactacacagttggactctcttaaaagacttataaaagaaaaacaggatgaagttgtctattacgatccatgtgaaagtccagaggaacttagtcattgactgtggtggggctgcaggacgataagaattcagaagtgaaagaactcagaaggcagtgccagcagctggagtctgttaaacggggcagtctgtgtcaaaagagcttctctccagagtagaa

SEQ ID NO: 56760 - DNA, 288 bp, Homo sapiens
aagccggcctccagcctgcgtcgctggctggccgtgtgcggcatcatcctggtgttcctgttggcagaactgaacacgttctacctgaagtttgtgctgtggatgcccccggagcactacctggtcctcctgcggctcgtcttcttcgtgaacgtgggtggcgtggccatgcgtgagatctacgacttcatggatgacccgaagccccacaagaagctgggcccgcaggcctggctggtggcggccatcacggccacggagctgctcatcgtggtgaagtacgacccc

SEQ ID NO: 56761 - DNA, 462 bp, Homo sapiens
ttttttttttttttccaattcagcagcatacactttatttctaaataggcatccagtgacacgactgttcatacatctattcctgactcccttaaagagtccaacgagatgacgcaggggctcctgcatggcagccacaggtcccccatctctgacccgccttcccctcccagcccaaagccccaccaagaagagcagcacatcactgctcaggaaacaggggcctaacaggggcctcttgcagctcacttgggggagaaaaatgagtaagtctggccttcataatgcttcttaaaacaaaaacccagcactcgtcatttttacaaaggaaatgatgaaaaggaatgtaagattcacatccatcttgaggacaattcaagcttcgtcattttgaggacgattcaagatttgcagatccttacttggagaaacctttaaagcctttggtgtaagccatgcgtc

SEQ ID NO: 56762 - DNA, 1714 bp, Homo sapiens
tttttttttttttacactgtctaaagcatttaatggtctttctttaacacagccaactcccccgggtttgaaacagtgttaaattctctcttgcttgtggcaaaagaagctgtcaagtccaacactgaaaaattggtaccatttcctggccagtaagcacagaacagaggggctaaatattttatggttttattcatttactgtgttctcatgctgtgtttttcttttctctgtctctccctcctgctcgtgtctgcccagggctgattgttgtgacattggccgtatgctggatgcccaaccagattcggaggatcatgggctgcggccaaacccaagcacgactggacgaggtcctacttccgggcgtacatgatcctcctccccttctcggagacgtttttctacctcagctcggtcatcaacccgctcctgtacacggtgtcctcgcagcagtttcggcgggtgttcgtgcaggtgctgtgctgccgcctgtcgctgcagcacgccaaccacgagaagcgcctgcgcgtacatgcgcactccaccaccgacagcgcccgctttgtgcagcgcccgttgctcttcgcgtcccggcgccagtcctctgcaaggagaactgagaagattttcttaagcacttttcagagcgaggccgagccccagtctaagtcccagtcattgagtctcgagtcactagagcccaactcaggcgcgaaaccagccaattctgctgcagagaatggttttcaggagcatgaagtttgaatgtcaagcgagggagccttgagtgggaactggccctccagccctaagaaaacgtcactctcactctgcagtctcaaactatgccccccatcagggatggaatggacactggaggctttacaaaaggcagatgccccacctcagtgaacttcctaaggactgactcctgccaccctggccttgactccggttacacagacatgggggtgaactttcactccacctccttccttcaagtacatactgaaaattcagtcaagctgaatttattcagaatgctttaccgagctctttcattatttgcacaggaacaaaagagaacacggactcccgctccctacccagaataaaaggacacccagaagaaactcactcagggaggtggggggttgggggcgagggctggaaagaacaatgcaggagggggtggcatctccttcagcttcagcagtgtgccgagaagagggctaatttgaggaacaggatggtggtgcggagcacctgcctgagggccgaggcagaacttccccttttcttgggccttggcccgttacaaagaggggtgttgcagcagctgatgcaaactgagttcagtttccctggggagcagaaggactggtacccggcagaggcgatgagacaggccgctgatgatgcacaggacttgcggtacatgatccctgtaacacagacccaaaggagctgagttaacgtgcaccggcaaaagaatagctgtccctctcagcccaaatccaaacggacagctcttccttactcctcccacagcccagagactaggtgaggtcagggaagtgcttcggattgtctcattgatattcaagatagatggtgaaagagacaggcactatttcattagttttaacaaaactgttccaaaagcgatttgagatgccaatacctgtgaatacctgttaataaagagctg

SEQ ID NO: 56763 - DNA, 237 bp, Homo sapiens
caagggaagacagcatgtaagaattacaaaacagggattactaaatggtcagaaaacaatgaacaaaatggcagtaataagttcttgccaatcagtaattcttttaaaaatatataaagatttagttatccaatgaaaacacattgctatagtgtgagcatcccctccaaaattcacgttaaaatttaactaccattgtgagaaaattaagaaatgaggcccttaataagttattag

SEQ ID NO: 56764 - DNA, 575 bp, Homo sapiens
gcttcccggatcatagatagtctgtttaatacagtaactgataagaagatagctattttgggatttgcattcaaaaaggacactggtgatacaagagaatcttctagtatatatattagcaaatatttgatggatgaaggtgcacatctacatatatatgatccaaaagtacctagggaacaaatagttgtggatctttctcatccaggtgtttcagaggatgaccaagtgtcccggctcgtgaccatttccaaggatccatatgaagcatgtgatgggtgcccatgctgttgttatttgcactgagtgggacatgtttaaggaattggattatgaacgcattcataaaaaaatgctaaagccagcctttatcttcgatggacggcgtgtcctggatgggctccacaatgaactacaaaccattggcttccagattgaaacaattggcaaaaaggtgtcttcaaagagaattccatatgctccttctggtgaaattccgaagtttagtcttcaagatccacctaacaagaaacctaaagtgtagagattgccatttttatttgtgatttttgttt

SEQ ID NO: 56765 - DNA, 1444 bp, Homo sapiens
tttttttttttttgagattgaaaccagacatacttattttaatcatattttatataaaatagacatttacataaatttaattttggaaagacctaggcaaagtatacatcattagactcaatgggagaaatactttatggaagataaattctaacgggcacagccaaagtaacaaaaatgtacatttacatacaactgatccaaacaggaagtaaaagcattatgaaaaaagaacatgatgcaaatcatttccccctgacaaaaggagggatctgcgtgaattacagcaaatcaaatgatttccacattataaaagcaagccatggcttctacagatattttaattccttgggaggaagtttcacctcatctttttttccccagtaaagtaacaatcactgtaggaatttttaagtgcacaaactgcaaaataagagtaactacctctgccatgttcaagcacttgggcaattcagtcacttttagggttgtatcatttaaaaaaggggcaacatttatgaattatctcatcagatgcatggtgtttttcaatccagattcaagagtaactattagagttactcattgagcttaatggaaacatcaaaccgacgagtcctttcatgggtggtaaacatgactgggagacaatggctaacttgccccagggtaaggtggctcttcagtggcagagctagaactagaactagaactcagatgtcttgattcttggggtagtgtacccctcctatggaccagcaagataaataacccccaaaggacatcacacatactgaaaactaccaaatttgttacatatatatatatacaacgtgtactactgagaatgcaaagaaactactggatttttagaaatagacatgtctctccaggtaggagtcaatggtgatctatgcttacaaaccaataatgaccatatattgtggtggatgctgattttatgagttacaggccctaaagattttaattgaaaagatcaattaaaatcaatattttaatatcagccaattgattgttataaagatcttatcaattctgttgtgccactttgattgatattaaaccatacttttgattgcagttattttctgttctctttaaattacatggctacaaataaaatattgagggaaataatattttttggaagaactattcagcatattttccttttgcatcaaaaacttcaagaataatcataaaatcttataatatttctctatattattttttgacatcctaagcttttatcttattcaactgcaacctcaatgcaagatttgacaggtacttaattctttttaaatgtcaaaagataccatttaaatagctaagttaacctatatttgggagataccaacatataatcaaatcaaagtaaacataatttggaaaccaggaacaaaaatttttaaaaaatcac

SEQ ID NO: 56766 - DNA, 2765 bp, Homo sapiens
gacccgggagcagcaggatgcaaagttgtgcgagcgacaccgagagaagctgcactactactgttgaggacgacgggaagctgctgtgcgtgatgtgccgggagtcccgggagcacaggccccacacggccgtcctcatggagaaggccgcccagccccacagggaaaaaatcctgaaccacctgagtaccctaaggagggacagagacaaaattcagggcttccaggcaaagggagaagctgatatcctggccgcgctgaagaagctccaggaccagaggcagtacattgtggctgagtttgagcagggtcatcagttcctgagggagcgggaggaacacctgctggaacagctggcgaagctggagcaggagctcacggagggcagggagaagttcaagagccggggcgtcggggagcttgcccggctggccctggtcatctccgaactggagggcaaggcgcagcagccagctgcagagctcatgcaggacacgagagacttcctaaacaggtatccacggaagaagttctgggttgggaaacccattgctcgagtggttaaaaaaaagaccggagaattctcagataaactcctctctctgcaacgaggcctgagggaattccaggggaagctgctgagagacttggaatataagacagtgagcgtcaccctggacccacagtcggccagtgggtacctgcagctgtcagaggactggaagtgcgtgacctacaccagcctgtacaagagtgcctacctgcacccccagcagtttgactgtgagcctggggtgctgggcagcaagggcttcacctggggcaaggtctactgggaagtggaagtggagagggagggctggtctgaggatgaagaagagggggatgaggaggaagagggagaagaggaggaggaggaagaggaggccggctatggggatggatatgacgactgggaaacggacgaagatgaggaatcgttgggcgatgaagaggaagaagaggaggaggaagaggaggaagttctggaaagctgcatggtgggggtggctagagactctgtgaagaggaagggagacctctccctgcggccagaggatggcgtgtgggcgctgcgcctctcctcctccggcatctgggccaacaccagccccgaggctgagcttttcccagcactgcggccccggagagtgggcatcgccctggattatgaagggggcaccgtgactttcaccaacgcagagtcacaggaactcatctacaccttcactgccaccttcacccggcgcctggtccccttcctgtggctcaagtggccaggaacacgcctcctgctaagaccctgagccctgacatctgcccccagccccaaccctcagatgcttcacttctttggaattccaggactctcaatggggggacgggatgcctggcctaagcacctggagcaggggaccccatatccactggtagccacctccccattgctgtggccccctgaaatctcactcagtgctgttgctccatctactgccctaatggggctcttttcccacctcctgctggtttcccgagggaacttctgaccctggagtccatgagggctcctttcctttttgaccacgaccttggccccagctctgcactctctggaataagggcccgatgcagcattttcttgcccagtgtggcaagacctcagaaaaaccagtcaattacgcctaagatcattttgctgtccttaaaccccccaggttccttcttgcacaaatccactctgctgcccaccttccctggcattttaaacagacctaccccaccccaactcagagttaagcatacatggcaatgctgaaaataaacaaaatccactgaggcttcccaggccatttaaagcctggagtaccagcgcatatcatctcatggggtccagagtggagtccaggcttctctgaaaccaggggctgagcatatttccatagccaaggaggtgggactccctggagctatctgtggtcttagggaaggatccagacatacacggctttggggtacaagctgtgatcactgatcaataaattatctctagattggtccttgtgaggggagttttaagaatccagaacatcttgctcttgatcagcacatccaaaaacaccaagacaaacatccagtggagcagaacctctcctgcctcgggagttctgaccgggttccccagcagggtgttaagcctctgtctctggccctaccagcatccaggttccactttcctaggagagagtggagatgggaagacagggaaaggaaggcagcaggaggcacaagcccaccaggtcttcatgtcaagagagggagtaacatgtcttctcattgcccacggacccaacctctgtccaggtgcccctcatcatcacagtttaacacaagctcccctgctccagccaaattgatctcccagtcttgtccttacccattccaagtgctctgccagcccctgttcatccaagttttaagtcctccaccctgttctaagagactgttccaacggctctgggcctcagtggtcacttgaccaccattgtctcagagctgcccactttgtgtgtgtcacatgctgcctgagtcacacgtacatcttatttctgcctctagttttgtaagctcctggagggcggataacatcttatactactcttgtattctcatggcacctagtgcagtgctgggcacagagtaggtgctcaataaagacttgttgaatg

SEQ ID NO: 56767 - DNA, 1235 bp, Homo sapiens
attacaagatttagcacttggttattttatttcctcaaaaataaaacagaaaggaggcggggccccagctcagcaccaggtgggcagctcggagttgtggcctccctcctccagggctcgcctccgcctttcctcccgcccctactggcagccaacaagtcaacggaattcctggcctttgagatgtcaccccaaatgccacctgagttgagtgaagaaacactctcttggtgaaagcagaagcggagctaccaggccaggcattgctggtggccggcatcacctgagctcgcctgtgtcctgcccagcttcagtgggtcttcccccggccctctgagatgacatcctcgggccgggcgcgcatgtaccactccacccaggagccatcgtagatgggcacgtctggcttgccgcagaggtaggcccctagtgccacgtggcaggctgtgacgccagagccacacgtggccaccagtggcttagacaggtccactttcttctcctggaacagatggcggatctcctcagggctcttctccagcccctcctggctcaggaagtctgtgaaggggatgttcacggtacctgggatgtggccaggttcaatgccgtctcggggctcgggctcggtgccgcggaacctgccagtggctcgggagtccaccacctggaagcgccgggattccaggttctccttgatgtcctcgtaggtcttgatgaaggcggggtcgagctgagcgcggaactcggcgggagcaggttggctcttgccggagctgagcgggaggttctggcgcagccagtggcggaggccgccatcaagcagtgacacggcgtggtggccgaaggcgcggaacatccaccagacgcgcggggcggagtagaggccctggtcgctggcgtcgtagatcacgacgtgggtggccgcgcccacgcccaggcggcctgcgtactccgcgaaatgctcggccccgggcagcatgtggtcgtagggcgaggtgcggtcgctgcactggtcgatgtcgaagaaagcggcgcccgggatgtggcgctcctcgaactgcgtcgcgtcgcgccccagcttcggcaggtaccaggaggcgtccagcagctgcagaggctgcccagcgcgcggggcccgcagcgcctccgccacccattgcgccgacaccagcgcgcggcagagctgcggcgaagccatggcggcgacactcgcgccgcgggggccggaattc

SEQ ID NO: 56768 - DNA, 752 bp, Homo sapiens
  misc_feature (1)...(752): n = a,t,c or g
ttttttttttttttgcagatcatagaacttttatttagatggaatcattgcgaattacatagaagctaccagcctaagccaaacccatgaggttcatgtgaacttacagttacacaaataagaaacaaatggtacatccaaaaccataaggaaatattctgatgcccagatgatgaagactggggtgaattaagtccacacatttatttcaagttgttaaagagtttgtgggccacgcaatggtccctcgcatgcaagaagtcaaagagctcctccgtgcaatcctcttctgtatgtgatcgagagggatacacgctcatcacagagctctagccgctcccgggcctttacacatttctccaactgctcgcattgctctctcactgttgttaggggatccactaattcctcctnnnnnnnnnnnnnnnnnnnnnnnnnnnnnnnnnnnnnnnnnnnnnnnnnnnnnnnnnnnnnnnnnnnnnnnnnnnnnnnnnnnnnnnnnnnnnnnnnnnnnnnnnnnnnnccacaattagctgtcctttaacaccgcagaaccccctcccagaagaagagcgatccctcggacggtccgggcgggcaccctcagccgggctctttgcagaagcagcaccgctgnctgtgggcccggcccncagatgtgtacatatacggctatttcctattttactgttcttcagatttagtacttgtaaataaacacacacattaaggagagattaaacatttttgct

SEQ ID NO: 56769 - DNA, 326 bp, Homo sapiens
gttttgctctcatccctggaggtgtaacagccttttcccattcagtactttatttttccagatagttcatatggagtagaaggaacatactatatctgtttctgtactgatggatcgtgttcagttgtgtacatttatctctgaggcctgctaatgccatctgagtttctaaaatccttatttttgcaaatccatttgtgtcctggggtttagctcctgattttagggattaggcacagattacaggggtctgtctgatgccttctccaaggctttgtatcaggatttatgggctatggaattgaggaagcttgcacataggatag

SEQ ID NO: 56770 - DNA, 283 bp, Homo sapiens
  misc_feature (1)...(283): n = a,t,c or g
ttttttttttttttgaccttttaaattagaattttataaagtgcttttcataaagtcttatatattatagtaattaagtggatataatttccttaacaaaggcaccttgaaaagttattggcacatgagattttgtctggtcttttttttttcttttgataatttcaaagtctcttcacatgtgttctcttccactttaagttttccttaacaattcatcatatgaatagccagcccttttagagaataaggtcaactttnnnngntttgaaacagagtctcg

SEQ ID NO: 56771 - DNA, 402 bp, Homo sapiens
aaactattttaaatgtttttaaagtatcgaatagaaataaatctcacaaaatatgcttaagaactttaagcaaaaaccataaaatactattgtgataagttaaagaagacctaaataaatggagagatctgtcatgctcatggattggaagattcaatactgtaatgatatgaatagttcccaaattgttctatagattcaaaacattgccagttaaaatctcagtggactttgtttttttgaaactgacaagctgattctgccatttataataatattcaaaggggcaagaataaccaagacacatttgaagaagaacaaggaggaagaagaacgtatttgaagaagaataaggaactctattaagtgtatatctcctatatattgagatacacatttgaa

SEQ ID NO: 56772 - DNA, 907 bp, Homo sapiens
attcttccatatgatcctctaaaaatggacacttcctctgaatgctgtatctcatggcacctggtccaactagaaatggtcaaggaattcatttggctccttgatacatcagtcctcaatattactttctaggtattttatggccagattgcttatatgagtggtcttttggtttggtagtaggtttttatttttaatttctgtactaatgaaattcctgactttaatttctgaaaaccaaaaactctccaagtgtatttatttatattttttttaatagagacgaggtcttgctatgttgcccaggctggtcccaaactcctggcctcaagcagtccttccaccttggcctcccaaagtgctgggattatcagtatgagccaccatgccagatttgttcatttttaaacatttttatctcttcaagtcatcttttgatcttttaaaaagcaccttcaaacagctgcaccttccatttgcactaggaaatgaaggtagtgatgggattggcaatgttcctggcagatgtttcagcccaaaagctcttctacagaccggtttagagctggtgccctatgagaatattagggagcttttattttaaattgaactttacccttgtccatgcaaggcattcctcctgaatgcatccatgaatttgtttacttttgcgtcaaacatatgagccattgtcatgctcagcctgtgccaccattgctctgtctgatgtatgtaatcatacaagacctgattttggttctaacacagtggtctttgactatcaacattgatgtttttagagatgggttcttctggttgatacagactatgcattgcgtttagcagatggggtaaaactggcctaaaacaagtctttgcagaatacatgccaatttccaaaaaaaaa

SEQ ID NO: 56773 - DNA, 958 bp, Homo sapiens
ttttttttttttttttttgcagtgagaataatgtttattgagaatggctcattacaaacaaaatatatataaaatctctgcaatgcaaaagatccctttcatccccgtggctagaatgaacaaagcccaactgtcccacatggcttcaggtgctgtgctggtccccagcatgtgaacaggctgggcagctgtcggtgtcatgtgctgtgggcaaaagtccctgatgtccaggctctctggctccattttcatgacttgtgcaagaatgcaacacagtgtgtcttacatcctgcctctgtgaccctccctaggcagatgagtcttgagaatgggcagctttctcattcatctttcaggaaggtgacctttaacttgtggcatgccctgagaagccatcctctgggaccagagactgagtgtttctaaacattttggctggactgaggtgctgttaccaccctccatgaaggccactccctagtgacagccctaacagcatgtgcactgtctaaatcacatcccaccatcctgaaaacttcatttcctcccactggtttccttcatacagctattctaacgattttaccagaacaccacctgaagatgcccacacccccacagctgctgtgcatgggtactcctgggccacctggcattaaggcaatggagatgagaccagtctagagccaacaccggtctctgaaacccagaagggctgcccaactaacagcacctccctcttggccaaaggctttgtctagggttgagaagcaatttggctgggtggtctcactgccctcctaaagcagagcccacctctgcccccagagtcatctgtgctccaaagcaatgggcgggggcacagctgccaccatgcccatgccttgggcattggaagagcaggacccaggagtgcagggatggtatcactgttgcccctttgaaaatgacccatttc

SEQ ID NO: 56774 - DNA, 695 bp, Homo sapiens
gggaggcttcaccctcatgacctcatccaaccctaattacctcgtaaagaccccacctccacacaccatcacattgaagattagggcttcaacatgtatgtttggtgtgggggcggggggcaagatacagacatttagtccatagcactgtatgtcttaaaattattgtttaaggcaccgttcacctctggaaaaggattcttcacctggaagttcatcaacaagcttgttgataaaaaagcaaagagagacttcagacacgccgatcatgagagctttaaaagaacttgatgagggaaaaatatttaaaaattgggggacacagacagagaaagaggacacctcaaatataaatcctcggcaaactgaaacttcagttaatgcaagtcgttctccagaaaagtgtgcccaacagagacaaaagagacttaattcggcctcacagagatcatcatctttaccaccttcaaatcgtaaatcaagtactccaagtaagagttagatgtgtacatctcttgggttcaaaagcgtgatctctgagtcaaatctatttgtgcccgctgcttgcctgtttctggtttctcttgtatcctcagcacctagtagagtactctgagcagaggacccctaaataagatcttgttcataaataaaattgctgatcacatagatactacaaatgtaaatgaagaaat

SEQ ID NO: 56775 - DNA, 511 bp, Homo sapiens
  misc_feature (1)...(511): n = a,t,c or g
cttggannccaacagctatgacatgattacgaatttaatacgactcactatagggaatttggccctcgaggccaagaattcggcacgaggaatctttatttttcactgccagcttcaagggaagaaaactttttctacaatttgcatgagggatttttttaattgtatgtactcatggttgtaaaccaaaacgtactgtaccgtacagagaaaaggagcaaaaaaccaagtcttctgtttatcctgaggctttccacaatgttcccctcctgtgagccaaggaggcaaactgcacaagcttgtaaatggttcgtctttaaaatgtacataagtggaacatttaataaaatgaggggaaatggatttataaacttgttttttttctaggtgaccctgtttaataggctttcacagactggggaatgctcaagatgtgatgggcctggtggtacaggtgtgacatttgttaccacccatttctcccaccccaccctgcttttttgttggttgt

SEQ ID NO: 56776 - DNA, 1283 bp, Homo sapiens
  misc_feature (1)...(1283): n = a,t,c or g
tttttttttttttttttttatgacaaaaccagaatgttgaatgtttattgcatcaaacaacttgatcattatcattagtagcaagctgccacacaattgcaaccgctgtgtttttgccataggcgcccgctgggacaccccaagcaggaaccattgttgaagcccgtctcaaggagctggcatgccctatgccggtcatctttgcaaaagccacccccgtggacagacaagaaaccaaacagacctacgagtgccctgtgtatagaaccaaactgagaggccccagctacatctggaccttcaggctgaagagcgaagagaagactgcaaaatgggttctggctggagtggctctgcttctagaagcgtaaggtaacactggcattcctctagcctctgctggagtgcagtgaggattttctagcatgttgctgcactgttcccatgcacattattctgactttttagtaactcacacgtgcattcttttttcaacgctatccttagagtgaaagtcagaaaaaaatactagaaactaactcagggcttnagctggtgacacacgacttgtaatcccagttactccgggagtaggaggatcactttgaacctaggaaggcaaaggttgcagtgagccgaggttgaccacttgaattcctcctgggnaacaggaacaagactncatctccaaaaaaaaaaaagtncctcntaaaagtacatcatatgtgaacatgcaaaagcaatgcagccggaaagaacggagattttaatttttaacaaacaacaaattaaattattagcccttaaactctttcaaaatataaaagcagcaggccccaggtgagtcctgaaggaagaggctagcactctgtaaggcctccagtgtctacaatgttgatggtccccttttgttcagtcaagttttaataaaaataaaactgttctacagttaattgcactttgttcagtgtaaatttccaatgaccaagagcaggttaaacgatgtgtgtggtctattaaactgtggtcactcgtgctaaggcacacttggcctggagtgagttactgtttgggaagccaaagatagatagatcaagtgcaggagctgatcatacaatgttttctctctaacttacttacctgaactttaaccccaccccatttaaactgtgctttttaataactggcagatatttttaacaaagttcagcatacagacaggtctgtgcatacatctatatagattcctctgctctgctgtcttcctgagaaatctttgttaa

SEQ ID NO: 56777 - DNA, 886 bp, Homo sapiens
attcggaacgagccggcgtggctactaggagaaggacgtacggtccgtgctagtagagggaatatgtcgagtttctctagggcgccccagcaatgggccacttttgctagaatatggtatctcttagatgggaaaatgcagccacctggcaaactttgctgctatggcatctataagacttcagggattacataaacctgtgtaccatgcacctgagtgactgtggggatcatgttgttataagtgaacacaagacacattgcattttctggaaacaaatgggaacaaaaagtatactcttcgcatactggctacccaggtggatttagacaagtaacagctgctcagcttcacctgagggatccagtggcaattgtaaaactagctatttatggcatgctgccaaaaaaccttcacagaagaacaatgatggaaaggttgcatctttttccagatgagtatattcccagaagatattcttaagaatttagtagaggagcttcctcaaccacggaaaaatacctaaacgtctagatgagtacacacaagaagaaatagacgccttcccaagattgtggactccacctgaagattatcggctataagagaataagaattgcagaaaataacagtgaagtgattgaaactttcttctgatgagtttctctaacctacaggatggagtaaaacaactgctacagttcagcacctgttttatgtgccgaatcactgtggggaaaggtcaggaaggtgtagtccttcaataggaaattgtaattaaaatataattttatagaaccatttttatgtaatctgatttgaatgttatagttgataataataaaatcacttacttggttgactaaaaaaaaaaaaaaagtcgacg

SEQ ID NO: 56778 - DNA, 484 bp, Homo sapiens
  misc_feature (1)...(484): n = a,t,c or g
gggaatttggccctcgaggccaagaattcggcacgagcgttggtagtgtggggatcctggctttcttcttcttcacccaccgtatcaggatcgtgcaggatacagcaccacccctcaattattactgggttcctatactgacggtgatcgttggctcctacttgattgcacacggtttcttcagcgtctatggcatgtgtgtggacacgctgttcctctgcttcttggaggacctggagaggaatgacggctcggccgagaggccttacttcatgtcttccaccctcaagaaactcttgaacaagaccaacaagaaggcagcggagtcctgaaggccccgtgctccccacctctcaaggagtctcatgccgcagggtgctcagtagctgggtctgttcccccagccccttgggctcacctgaagtcctatcactgncgctctgccctcccatgagccagatccaccagtttctggacgnggaga

SEQ ID NO: 56779 - DNA, 1189 bp, Homo sapiens
gggctgcgataatagcgaggcagcagtgcagctttcagagggtccgggctcagaggggctatgattcggagggttctgccgcacggcatgggccggggcctcttgacccggaggccaggcacgcgcagaggaggcttttctctggactgggatggaaaggtgtctgagattaagaagaagatcaagtcgatcctgcctggaaggtcctgtgatctactgcaagacaccagccacctgcctcccgagcactcggatgtggtgatcgtgggaggtggggtgcttggcttgtctgtggcctattggctgaagaagctggagagcagacgaggtgctattcgagtgctagtggtggaacgggaccacacgtattcacaggcctccactgggctctcagtaggtgggatttgtcagcagttctcattgcctgagaacatccagctctccctcttttcagccagctttctacggaacatcaatgagtacctggccgtagtcgatgctcctcccctggacctccggttcaacccctcgggctacctcttgctggcttcagaaaaggatgctgcagccatggagagcaacgtgaaagtgcagaggcaggagggagccaaagtttctctgatgtctcctgatcagcttcggaacaagtttccctggataaacacagagggagtggctttggcgtcttatgggatggaggacgaaggttggtttgacccctggtgtctgctccaggggcttcggcgaaaggtccagtccttgggagtccttttctgccagggagaggtgacacgttttgtctcttcatctcaacgcatgttgaccacagatgacaaagcggtggtcttgaaaaggatccatgaagtccatgtgaagatggaccgcagcctggagtaccagcctgtggaatgcgccattgtgatcaacgcagccggagcctggtctgcgcaaatcgcagcactggctggtgttggagaggggccgcctggcaccctgcagggcaccaagctacctgtggagccgaggaaaaggtatgtgtatgtgtggcactgcccccagggaccaggcctagagactccgctttgttgcagacaccagtggagcctattttcgccgggaaggattaggtagcaactaccctaggtggtcgtagccccactgagcaggaagaaccggaccccgcgaacct

SEQ ID NO: 56780 - DNA, 1429 bp, Homo sapiens
tgcgcccgccccgaagccccgccccctccatcgcctccggcatcatcacttccggtaaccccgccggccgccagctccaggagggagaatgggagaggggcaaggagggaacgagtggaagattgcgtcacgacgcacataaagacgtacgaagccgtcgccaaatgacaacggcaacacgacaagaagtccttggcctctaccgcagcattttcaggcttgcgaggaaatggcaggcgacatcagggcagatggaagacaccatcaaagaaaaacagtacatactaaatgaagccagaacgctgttccggaaaaacaaaaatctcacggacacagacctaattaaacagtgtatagatgaatgcacagccaggattgaaattggactgcattacaagattccttacccaaggccaattcatctgcctccaatgggccttaccccactcccgaggccggggacttcgaagccaagagaaactgaggaaactttccaaaccagtatatctcagatctcatgatgaagtttcctaatctagaggaaagtttatttctggcaaatggatgagcccactagttattgaatgtaaaccagatggcaaaacacttcttgattaggggcaaaaattcaaatgtcttcttaaaacctccacaattgattctccccctgtgatgtaaacttagatatccctagagtttctcagcatctttcttcctgagtggatggcattatccctagaggtcatggaccttacatcctcactgcagtcacctttggaaacaagaccgaggcctgtagaaggaaagcggaaggatgtaagagctgttcatgggaattccattcaccacacatgccagctgatgcaaagaaatttgccagtcactggaagttactgtggctactataaaactatgtaccactctcagaatattcttaggcttttttttttttcaagttatagatttgcttaaagtgaggttttttggtgtgtgcttttttgttgtcttttgacccttccagtttccagacaaacttgtcttaaaaagtgcatcattgggattgaccatggtttttcatgaaattttatgagatttctgcctttaacaaaatgcatatattccttatcttaaagcctgtcattacttaggatgcacttataggatctgaaaagctcactttaaactcatactacattcgttacgagtattttacgttaacataattgaaaagtacaaggtccaagctggctttcaaattatgtctaaacagaaatgggacaaatagacttgaaaatagaagggatttattccacccctgcaagggtagagtcaggtgagagtcccttggtgagtcatttgtacatcagtgtcatttcttcttaacctctgaagaagatgggcatcagaaataaagacaaagcactatcaa

SEQ ID NO: 56781 - DNA, 583 bp, Homo sapiens
ggctaatgaacgcacagtgcagtggtggttcaagaagtttcacaaaggagaggagagccttgaagatgaggaacgtgatatgggccatgggaagttgacaacgaccaattgagagcaatcattgaactacatgaaaaattacagaagaactcagcgttgactattctacgggtcattagggtcgttcagcatttgaagcaaattggaaaggtgaaaaagcttgataagtgggtgcctcatgagctgagcggaaatcaaaactatcgttttgaagtgtcatcttctcttattctatgcaacaacaaaccatttctcaatcggattgtgacatgtaatgaaaagtgaattttatacaacaaccagctcagtggttggaccaagaggcagctccaaagcagttcccaaagccaaacttgcaccaaaaaaaaggtcatggtcactgttcggtggtctgctgcccatctgatccactacagttttctgaatcctgggtgaaaccattacatctgagaagtatgctcagccaaatcggttgaggatgcaccaaaaatgcaaacgtttgcagtcagcattggtcaaccag

SEQ ID NO: 56782 - DNA, 1497 bp, Homo sapiens
ccacgcgtccgctgttttcagagatggttgacggtggagagaaaatttgctcttcaaaaaatggactcaatgctttcctcagaagctgcctgggtatcgcaatataaggatatcactgacgtggatgaaatgaaagttccagattgtgcagaaacttttatgactctactcttggttataactgacaggtataaaaatcttcccacagcttcccgaaagcttcagttcctggagttacagaaggacttagtagatgattttaggatacgattaacacaagtgatgaaagaagagactagagcttcccttggctttcgatactgtgcaattcttaatgctgtgaactacatctcaacagtactagcagattgggctgacaatgttttctttctacaacttcaacaggctgcactggaggtgtttgcagagaataatactctgagtaaattgcagctaggacagctagcctctatggagagctctgtctttgatgacatgattaacctcttagaacgtttaaagcatgatatgttgacccgtcaagtagaccacgtttttagagaagttaaagatgctgcaaaattgtataaaaaagaaagatggttgtccttgccatctcagtcagagcaggcagtgatgtccctgtccagttcggcttgcccgttgctgctgacgttacgagaccatttacttcagttggagcagcagctttgtttctccttatttaaaattttctggcaaatgcttgtagagaagctggatgtatacatctaccaagaaataattcttgctaatcacttcaatgaaggaggagcagcccagctgcagtttgatatgactcggaatcttttccctttgttttctcactattgcaagagaccagaaaattattttaaacatataaaagaagccctgtatggttttgaatttgaacgtcggttctgcacttactgctggaaaggatgtactgcagtcagcttcagggcagcttcctgccacagcagcattaaatgaagttggaatttacaaactggctcaacaagatgttgagattctacttaatttgaggacaaattggcctaatactggaaaataatgtctttcagaaaaaggtttctttggtttttgtttctaagaaagaggaagccaattggatttcaagttatatgatgaaattctgaattaatgaaactggaaaactttatagaattacttattatcttggatttatggtgttattaaaatgctgaccatatttccttcatcctcttgttcctaaggaaacaaaaacagaaaacgaaacgaatgaaaactcgaattctatttacaagtataaatgctgagtatgtctgttgaagacaagagcagagatattaaattataaccaactttcaatttcctgtgctaattaagggaaattctgttgtggataatcaaacatagccaataaatttttttaaaactccctttgaaaaaaaaaaaaaaaaaaaaaaaaaa

SEQ ID NO: 56783 - DNA, 4002 bp, Homo sapiens
  misc_feature (1)...(4002): n = a,t,c or g
gagaggcaggcagcctgctgggttcttcctgctgttgaaaacttacccggcccttacagaggaaatcttcctcctctcttctgccctgaatgttttcccaaacatgaaggtgataagcttattcattttggtgggatttataggagagttccaaagtttttcaagtgcctcctctccagtcaactgccagtgggacttctatgccccttggtcagaatgcaatgtctgtaccaagactcagactcgcaggcggtcagttgctgtgtatgggcagtatggaggccagccttgtgttggaaatgcttttgaaacacagtcctgtgnaacctacaagaggatgtccaacagaggagggatgtggagagcgtttcaggtgcttttcaggtcagtgcatcagcaaatcattggtttgcaatggggattctgactgtgatgaagacagtgctgatgaagacagatgtgaggactcagaaaggagaccttcctgtgatatcgataaacctcctcctaacatagaacttactggaaatggttacaatgaactcactggccagtttaggaacagagtcatcaataccaaaagttttggtggtcaatgtagaaaggtgtttagtggggatggaaaagatttctacaggctgagtggaaatgtcctgtcctatacattccaggtgaaaataaataatgattttaattatgaattttacaatagtacttggtcttatgtaaaacatacgtcgacagaacacacatcatctagtcggaagcgctccttttttagatcttcatcatcttcttcacgcagttatacttcacataccaatgaaatccataaaggaaagagttaccaactgctggttgttgagaacactgttgaagtggctcagttcattaataacaatccagaatttttacaacttgctgagccattctggaaggagctttcccacctcccctctctgtatgactacagtgcctaccgaagattaatcgaccagtacgggacacattatctgcaatctgggtcgttaggaggagaatacagagttctattttatgtggactcagaaaaattaaaacaaaatgattttaattcagtcgaagaaaagaaatgtaaatcctcaggttggcattttgtcgttaaattttcaagtcatggatgcaaggaactggaaaacgctttaaaagctgcttcaggaacccagaacaatgtattgcgaggagaaccgttcatcagagggggaggtgcaggcttcatatctggccttagttacctagagctggacaatcctgctggaaacaaaaggcgatattctgcctgggcagaatctgtgactaatcttcctcaagtcataaaacaaaagctgacacctttatatgagctggtaaaggaagtaccttgtgcctctgtgaaaaaactatacctgaaatgggctcttgaagagtatctggatgaatttgacccctgtcattgccggccttgtcaaaatggtggtttggctactgttgaggggacccattgtctgtgccattgcaaaccgtacacatttggtgcggcgtgtgagcaaggagtcctcgtagggaatcaagcaggaggggttgatggaggttggagttgctggtcctcttggagcccctgtgtccaagggaagaaaccaagaagccgtgaatgcaataacccaacctcccagtgggggtgggagatcctgcgttggagaaacgacagaaagcacacaatgcgaagatgaggagctggagcacttgaggttgcttgaaccacattgctttcctttgtctttggttccaacagaattctgtccatcacctcctgccttgaaagatggatttgttcaagatgaaggtacaatgtttcctgtggggaaaaatgtagtgtacacttgcaatgaaggatactctcttattggaaacccagtggccagatgtggagaagatttacggtggcttgttggggaaatgcattgtcagaaaattgcctgtgttctacctgtactgatggatggcatacagagtcacccccaaaaacctttctacacagttggtgagaaggtgactgtttcctgttcaggtggcatgtccttagaaggtccttcagcatttctctgtggctccagccttaagtggagtcctgagatgaagaatgcccgctgtgtacaaaaagaaaatccgttaacacaggcagtgcctaaaatgtcagcgctgggagaaactgcagaattcaagatgtgtttgtaaaatgccctacgaatgtgggaccttccttgggatgtatgtggctcaagatgaggagaagcaaaaggatactgcctctgacagtttgcaagatgcatgttctccactgtcagggtagaaattacacccttactggtagggacagctgtactctgcctgcctcagctgagaaagcttgtggtgcctgcccactgtggggaaaatgtgatgctgagagcagcaaatgtgtctgccgagaagcatcggagtgcgaggaagaagggtttagcatttgtgtggaagtgaacggcaaggagcagacgatgtctgagtgtgaggcgggcgctctgagatgcagagggcagagcatctctgtcaccagcataaggccttgtgctgcggaaacccagtaggctcctggaggccctggtcagcttgcttggaatccagcaggcagctggggctgagtgaaaacatctgcacaactgggcactggacagcttttccttctccagtgtctaccttcctcctcaactcccagccatctgtataaacacaatcctttgttctcccaaatctgaatcgaattactcttttgcctcctttttaatgtcagtaaggatatgagcctttgcacaggctggctgcgtgttcttgaaataggtgttaccttctctgggccttggttttttaaaatctgtaaaattagaggattgcactagagaaacttgaatgctccattcaggcctatcattttattaagtatgattgacacagcccatgggccagaacacactctacaaaatgactaggataacagaaagaacgtgatctcctgattagagagggtggttttcctcaatggaaccaaatataaagaggacttgaacaaaaatgacagatacaaactatttctatcctgagtagtaatctcacacttcatcctatagagtcaaccaccacagataggaattccttannnnnnnnnnnnnnnnnnnnnnnnnnnnnnnnnnnnnnnnnnnnnnnnnnnnnnnnnnnnnnnnnnnnnnnnnnnnnnnnnnnnnnnnnnnnnnnnnnnnnnnnnnnnnnnnnnnnnnnnnnnnnnnnnnnnnnnnnnnnnnnnnnnnnnnnnnnnnnnnnnnnnnnnnnnnnnnnnnnnnnnnnnnnnnnnnnnnnnnnnnnnnnnnnnnnnnnnnnnnnnnnnnnnnnnnnnnnnnnnnnnnnnnnnnnnnnnnnnnnnnnnnnnnnnnnnnnnnnnnnnnnnnnnnnnnnnnnnntggaatacttactcttgtcgggagattgaaccactaaaatgttagagcagaattcattatgctgtggtcacaggggtgtcttgtctgagaacaaatacaattcagtcttctctttggggttttagtatgtgtcaaacataggactggaagtttgcccctgttcttttttcttttgaaagaacatcagttcatgcctgaggcatgagtgactgtgcatttgagaatagttttccctattctgtggatacagtcccagagttttcagggagtacacaggtagattagtttgaagcattgaccttttatttattccttatttctctttcatcaaaacaaaacagcagctgtgggaggagaaatgagagggcttaaatgaaatttaaaataagctatattatacaaatactatctctgtattgttctgaccctggtaaatatatttcaaaacttcagatgacaaggattagaacactcattaaagatgctattcttcaga

SEQ ID NO: 56784 - DNA, 1354 bp, Homo sapiens
agagggtccatgtaaataggacgaggtagacagtgcatgattgtaggagaagggttgaagggaggacatgattccaaaaaagatcgttctcaatgtgtcgtctgactcaaccagctggcagattacacttgccaagtcgttccctttccttctaagtcagttggctccatattcacttgaatatgcctctgtttgggcaaagcaagatacctccacttaacctttatccaaggaagctcttggtgtcctcttggtcataaagttgtctcctacctaacccagttttaccaaatggaagtaaaaggggacaaactatggaagatggactccatgccattgcagtcagccaccattctcttttccatataaggagccccattacataagctacgggtgaggttggaacagctatgtttcataatttcaagagtgtgaccaccctgctctagtcatcatcattggatgaatccagttgactctttggcaaaagggtgatacttttcactaaaaatgcctactcttcctgttgatgttccttttctgtttttaccttgtccaatttccacactagtcattttttttattttttagaggatcagattttagcgctggaaaatgagttcaaaaatttcagtgtaatgtcataaggatgttgggatacagagattttttttttccttggaaacaaatggactgggaagaaacacagcatggctttgctctgagtttcaatctgatgattatgaccatggaagatagtcttatgtaaaggttaaatggtgtttacaagtggatagataaggcggagatggtgagaagccgggttttctctatgctaaatgtgtctactaagagcagcacttcctactagctaagcacaatcatagccccaccgtgatgagctgctagtctgaataacattccctgacttagggaaaggcacacaaaaacatataaagaatatgtctattttcatatgtgtgatactgacagagccatggtattcctaaaatataggtttctcttttttcttgtattcttagcaaattgcatttattcactacattacaaaccatcactgatgtatccaaaatagcacacatagttcagtatgaaaataagagaataaaatctgttataagcaagtgatttaggtattttcttttgtgtttatgcattatctgactatattaaaacctgtttttctatttaccttctatcagttttctctaccaattatgttttttcaatgctctataagaatgaatatggaaattatatttcttttttctgtaaaagagttgcaactactttattatatttagaaatccaataaacttcttattacatttaa

SEQ ID NO: 56785 - DNA, 1505 bp, Homo sapiens
  misc_feature (1)...(1505): n = a,t,c or g
ggataatgatatataggatcatgatattccttctatccatgtgccaaatgggtgtaatgtttatttactgatgctttatgttaccaaaacatacagtaanaaagtagaaatttatgaaatacttttgataaaaagtttattttgtgcttaccaaaaggaatgctttcacaatagtgtatcagttcttttgttttgttaaagttggaatttattctgttgccagcatttaagtagtcatggcaagtcctgtttttaagaccttttggagactggagctttctgttccattaagtcttttgtttatactacaaattgtcacctcacttagttcagatgaaatctgttactctacaaggaaggtgttcatcattaggaggcagctttactaagctggtgctttgcatggtagcaagtgctgccctttatcagcaccctgggtcatagtgtaggctagagttaaggcactggcagacttagggatgctggacagacctgtagttcgttttaagtcatgttcacaggaatttctacaataataaacccatcatctccataggtcagatcgaagtgcattccaatgctaaatagaagttatgagtgggtttaacaattttagatgattcagcttttgttccattactgttgaactatatgaactattccattactgcagagatttaagtatctgttttaataagctctttttgttatttaaaggctgcccatgggtttctgcctagtggtaaagctgattgttaccctcctttgaaatcccttctagttctgagatgctttgagggtaactggattcgattttgggatatcttttctcacattcagacttacacttaatggtgttagaaatcaacaaaactcctttttaaaaagaaaagatattaagcctgcctacttctacaatgcattctgttacctatttgaacagtatgtttgtaactatggcaatgaagtcagtagataggaaaccagttattccttctacctttaaaaattttgagaacttgccaaccagggactaaagctattatcttgaacagagtccctaaagctagtctagtttttgccacatctgcaatgattattgtttaatttcaaaagaatcctcaggctctacaatctaggggtggtaaatgtgtttccactatacttgggaaaaggtcagtaggatgtgcatcctagggaagataaaatcgtatatggtaaaggcatttgagttaattttgcattatatctaggaaccatattatttaaaatttgaatcctattaatgctgagagatcctaagagctagtatgttgtaaaacctgccacctgaataaaatgaaaaaaaaagtgtttttttgagacagagtcttgctctgttgcccaggctggagtgcactggtgtgatcttgggtcactgcnaactccgnctaccaggttcacgccattctcctgcctnagcctcccgagtagctgggaccacaggggcccaccantgtgcccgg

SEQ ID NO: 56786 - DNA, 1105 bp, Homo sapiens
gcggccaccgttttaaccacgattggcgaagcgccgtcatttcggagcgactcagcgcctgcccgccctctcgccgcgtcgccggtgcctgcgcctcccgctccacctcgcttcttctctcccggccgaggcccgggggaccagagcgagaagcggggaccatgttccgacgcaagttgacactctctcgactaccacaaccccgccggctttcaactgcaaagatgaaacagaatttagaaacttcatcggttttggcttgaagaccagaaaatcaggcactacaagattgaagacagagggaatttaagaaacatccacagcagcgactggcccaagttctttgaaaagtatctcagagatgttaaacctgtcctttcaagattcaagatccgacaagaaagctattgactggcttcttgggtttagctgttagacttgaatatggagataatgctgaaaaatacaaggatttagtacctgataattcaaaaactgctgacaatgcaactaaaaatgcagaaccattgatcaattttggatgtaaataatcctgattttaaggctggtgtgatggctttggctaacctgcttcagattcagcgtcatgatgattacctggtaatgcttaaggcaattcggattttggttcaggagcgcctgacacaggatgcagttgctaaggcaaatcaaacaaaagagggcttacctgttgctttagacaaacatattcttggttttgacacaggagatgcagttcttaatgaagctgctcaaattctgcggattgctgcacatagaggagctcagagagctacagacaaaaatcaacgaagccatagtagctgttcaggcaattattgctgatccaaagacagaccacagactgggaaaagttggaagatgaacacttgaggacttcagcttctcacctactttagtacagttgggaaccatacacttctggcatgtttggaaatcaaaatgtcacattctcgggggaggaagcccagaaaattgggtatgttctagagatttaccaccattgcttattgcttttttctttaataaagtttaggaaagtagaaaaaaaaaaaaaaaaaaa

SEQ ID NO: 56787 - DNA, 472 bp, Homo sapiens
  misc_feature (1)...(472): n = a,t,c or g
ntttgananccctatgacatgattacgaatttaatacgactcactatagggaatttggccctcgaggccaagaattcggcacgagaatcagaataccacccacaggacaacgaagaaaacctatcttcagtccccacccacgaaatgctggggggtggggaggactggaaaaggagtaaggggagaggaagggtgagcagctgcaagaagtctttacacctctctgcggttcctggtaaacgcgctcatgtcctgggtatggaagggacttaagaattcaggaaagatcaaaataacgggcctcttccccactccctcgccctcccttccccgctgctggggggttagggaggctccgtggagctccagcactctagaaggatcgggtgaggcgcgaggccttgcgggcgggtgaacccaaggtggggtggaaggctccaacccgccaatctgagcccgaggcctgctgaga

SEQ ID NO: 56788 - DNA, 964 bp, Homo sapiens
ggtaagcctgccagacacactgtgacggctgcctgaagctagtgagtcgcggcgccgcgcactggtggttgggtcagtgccgcgcgccgatcggtcgttaccgcgaggcgctggtggccttcaggctggacggcgcgggtcagccctggttcgccggcttctgggtctttgaacagccgcgatgtcgatcttcacccccaccaaccagatccgcctaaccaatgtggccgtggtacggatgaagcgtgccgggaagcgcttcgaaatcgcctgctacaaaaacaaggtcgtcggctggcggagcggcgtggaaaaagacctcgatgaagttctgcagacccactcagtgtttgtaaatgtttctaaaggtcaggttgccaaaaaggaagatctcatcagtgcgtttggaacagatgaccaaactgaaatctgtaagcagattttgactaaaggagaagttcaagtatcagataaagaaagacacacacaactggagcagatgtttagggacattgcaactattgtggcagacaaatgtgtgaatcctgaaacaaagagaccatacaccgtgatccttattgagagagccatgaaggacatccactattcggtgaaaaccaacaagagtacaaaacagcaggctttggaagtgataaagcagttaaaagagaaaatgaagatagaacgtgctcacatgaggcttcggttcatccttccagtcaatgaaggcaagaagctgaaagaaaagctcaagccactgatcaaggtcatagaaagtgaagattatggccaacagttagaaatcgtatgtctgattgacccgggctgcttccgagaaattgatgagctaataaaaaaggaaactaaaggcaaaggttctttggaagtactcaatctgaaagatgtagaagaaggagatgagaaatttgaatgacacccatcaatctcttcacctctaaaacac

SEQ ID NO: 56789 - DNA, 1213 bp, Homo sapiens
ttttttttttttttgtattttgaaaagtatttacttagtttaaataaattaattgcaaataaaaattaagctacaatatatagcctgaataaaaatgactagaacaaatacaacacaggacttgctttcttgcattagtcacaaagcatgtgacaatctagaaaacttcaaaatcaattacatttctttgaaaaaggggtaacagcagttactgatacatcacaactaataaacttataatacaagtttcctgacatgcatttcctgagtgaacccaaatgatcattttttaaaacaaggaagtttcgacagttgaagtaaaataaaataattcatggcttctaagcaacaagttttgttttttaaaaaccaaaagaaaattcagaacagttttgtaataggataaattaaaggtatgctaccacatataaaactttgctacagtcagttaagtattatacaacttttcaaactaaaggaaaacaaatcaaaatattaaaagaagatactgtctaatctaaaagtgtactggtttctacaagtgtcaaaaaaagatttgatgtagtgcaactgtctatacttgtggtgcctttgaaaaaagggtgggaaggaggggagagaagaaacttttcttgcttctggaagcaaaagacatattggaattagagaataaacagaccatgcagtgcgtcactccacgctgcagtcattggtgctcatctgccaaccaaacatttccttaagtctcactgtggcaatctccttaggattcaaacccagagttaaggctggtctgctaaaaacggggggcacctatggtcatccaacccctttaggatctcctagattccctaatgcccggaataaggcccaaatacagaataattaattaagcatttctttttccaaaagcaaatccaagtcactctcctttcttgctaatttatactttttcttatggcaatgatttttttcctagaaacagtgaacagatgatcccacagtttatatcccaaaaaataaacttgccaaatgctgctgatactaaaaacagattagttatcatgggagaaaaatagataatctagattaaattgcatatccaaaggagcatataaaatgtttcttagcattaagtttttgttatagtactacgctcgagagaaacattaagaaaaaatctttcctgattatcttcaatgttgttaaaaac

SEQ ID NO: 56790 - DNA, 479 bp, Homo sapiens
tggatttgagtgattctcgtgcctcagtctcccaagtagctgagactacaagtgtgtgccacccttgcccggctaattttgtatttttagtagagatgtggtttctctgtgttacccaggctggtcccaaaactcctggcctcaagtgatctgcctgccttggcctcccaaagtgttaggattacaggtgtgagccaccatgctcagcctgtagaacttttaacccaagtctcatttcttttttgaaagggaagagtgcacaagattaactgcttctttggatgaatcattgttaataaaaagctgggcatttagaattttgccttataagcccttctccaaccataagattattttgtaccaaaaactttggtgttctctaccaaagcagttaaaaacttttagcctgctacttcttgtatttgtctactgacagccccttggtactatttaggttgggggaggggacctaaaataaa

SEQ ID NO: 56791 - DNA, 1097 bp, Homo sapiens
  misc_feature (1)...(1097): n = a,t,c or g
gtttctggtttgttggggcgtgtgtatgtgtatttngggggactgaagggtacgtggggcgaaacaaaaccggccatggcagcagccggaggaggaggacgggggccccgaaggccagaatcgcgagcggggcggggcgggcgcgaccttcgaatgtaatatatgtttggagactgctcgggaagctgtggtcagtgtgtgtggccacctgtactgttggccatgtcttcatcagtggctggagacacggccagaacggcaagagtgtccagtatgtaaagctgggatcagcagagagaaggttgtcccgctttatgggcgagggagccagaagccccaggatcccagattaaaaactccaccccgcccccagggccagagaccagctccggagagcagagggggattccagccatttggtgataccgggggcttccacttctcatttggtgttggtgcttttccctttggctttttcaccaccgtcttcaatgcccatgagcctttccgccggggtacaggtgtggatctgggacagggtcacccggcctccagctggcaggattccctcttcctgtttctcgccatcttcttctttttttggctgctcagtatttgagctatgtctgcttcctgcccacctccagccagagaagaatcagtattgagggtccctgctgacccttccgtactcctggacccccttgacccctctatttctgttggctaaggccagccctggacattgtccaggaaggcctggggaggaggagtgaagtctgtgcatagatgggagagccttctgctcagaggctcactcagtaacgttgtttaattctctgccctggggaaggaggatggattgagagaatgtctttctcctctcctaagtctttgctttccctgatttcttgatttgatcttcaaaggtgggcaaagttccctctgactcttcccccactccccatcttactgatttaatttaatttttcactccccagagtctaatatggattctgactcttaagtgcttccgccccctcactacctcctttaatacaaattcaataaaaaaggtgaaatataaaaaaaaaaaa

SEQ ID NO: 56792 - DNA, 1320 bp, Homo sapiens
cgctgcacagcctgcggcgcagcggaggcggaccgcagtcgagtctgcagagtgttgggtctgtagccagcaaattacttcatcatctagattatccattcagttgatcctaattagcaaggataacaaggtaacacaaggcttacttatattcacccaacaaaagtgtctctgtggagccacttcccagtgaactacatactgagataggggttcctggatgagaaggaccaaggacagaaccgagaagagtttaggggcaggttatgcgagatggaaatggcgcagataacggagggaaggatttgagggctcaaacgtaggcgtctgtgtttcgcaaaagttggagacgttctaggctgcctctcgttgcctccatctcgctctgcgcggggttttgggaggacattagcattctttcttgtatctccgttgattccagaatcgtccgcactaaagtcccctgcagcgtgaccatgtcgagaccccggaagaggctggctgggacttctggttcagacaagggactatcaggaaaacgcaccaaaactgagaactcaggtgaggcattagctaaagtggaggactccaaccctcagaagacttcagccactaaaaactgtttgaagaatctaagcagccactggctgatgaagtcagagccagagagccgcctagagaaaggtgtagatgtgaagttcagcattgaggatctcaaagcacagcccaaacagacaacatgctgggatggtgttcgtaactaccaggctcggaacttccttagagccatgaagctgggagaagaagccttcttctaccatagcaactgcaaagagccaggcatcgcaggactcatgaagatcgtgaaagaggcttacccagaccacacacagtttgagaaaaacaatccccattatgacccatctagcaaagaggacaaccctaagtggtccatggtggatgtacagtttgttcggatgatgaaacgtttcattcccctggctgagctcaaatcctatcatcaagctcacaaagctactggtggccccttaaaaaatatggttctcttcactcgccagagattatcaatccagcccctgacccaggaagagtttgattttgttttgagcctggaggaaaaggaaccaagttaactgagatactgctgctggaatgggcgagacattgctgcaaagaagtcaagcttttttcagacaaaaggtgtgagggggcttgcttggtatgcttacctgggcttgtgtacctcagtggtttttgtgtacttttttcaataaaatatcaaagttgaaaaaaaaaaaa

SEQ ID NO: 56793 - DNA, 451 bp, Homo sapiens
  misc_feature (1)...(451): n = a,t,c or g
ggtgtnttncncctttgactttgaanaccgtttgactgattacgaatttaatacgactcactatagggaatttggccctcgaggccaagaattcggcacgagcttcgtcagtgagctgctggaaactctggcccagctgcgggaggaccggcaagtgcgtgtcctgctcttcagaagtggagtgaagggcgtgttctgtgcaggtgcagacctgaaggagcgggaacagatgagtgaagcagaggtgggggtgtttgtccagcgactccggggcctgatgaatgacatcgcagccttccctgcacccaccattgcggctatggatgggtttgccttgggcggaggcctagagcttgccctggcctgtgacctccgagtggcagcttcctcggcagtcatgggactgattgagaccacgcgagggctcctcccgggggcaggagggactcag

SEQ ID NO: 56794 - DNA, 1335 bp, Homo sapiens
gacagtttaactctttattctccttcacagcccagcagaccccaaggcgggcagagggtgcaggccgtccccaggatgctggtcatgggccagggtcatccttgcacctgcggcagtaggggcagcagccatgctgaagcaccagcaactcatagtcctcagaatggaacatctggaagcaggaggggcacatggtaatggaggcgtcaggcagcagtgagcggaagtattgccacctcaggggtgggggccatcgcttgatgaggacatcccggcggctcatggagcgcagcaccagccggctcaccaccactggcacgaactctgagccaccttgctcaaagctcagcttagctgtgaacgggtcctcatctccgatggagtccttggtctccactagccgcagaatctgggagctgttgtttgcaatctctagctgtctgtcatcccgcttgggtctcagcacctccaggtcgatgagggagatggcttcttcatcagtgatcccttcctccaggtagaactcaaccaggtgtagcacgtcgtaggaagaggcggagaagatgaagggctggcggcagttgatgcagacgttgcccaggttgttgagcagcgggttgttggtggagcagcggtagcacaagggcaccaactcctcactgtcgtggaagggcttggcgcggatggtcagggtacccagctcaatggacttttggaatctggcagggatgtacaggccacgcagcttgtcataggcgtgccgggccagcctgtaggcaccgagggccttgctctgcttggccaaggtgaagagtattttcactttagagatgcccgagggggtgtccttgggcaggctgtgcagcaggaacctggagatgttgaaaagagtttcaggacgatggacactgaacggatcttccgtgtggcgatggatggcatggtaaccatggtacagctctgccaaacgctggaagtggtagaacttgccaagcattgtgtccttctgggcaggatcttgagctatatcgaggcactgcatggacagcatccagtaataataggcagcatcattaaacctgctctccgccacggcattgtttgtgagctgctccagcacctggaccgcttctctctgtcgcccagccttgtggaacgctttctgggcttcctcaaagcgatcgttctctgctagccactgagcatacggcatgtagatgtcatccttaaactcaggatgcttctcacccaaagcaaaggcctcatcccagcgctgggtctccacgtgcagctgcaccagggacttgaggtcacccatcttcaggtaggtctcag

SEQ ID NO: 56795 - DNA, 788 bp, Homo sapiens
ggatgcaccgcgtggtccaagagtccagtagtggtggcctcttggaccgagatctcttccgaaagtgtgtgagcagcaacattgtgctcctgacccaggcattccgaaagaagtttgtcattcctgattttgaggagttcacgggccatgtggatcgcatctttgaggatgtcaaagagctcactggaggcaaagtggcagcctacatccctcagctggccaagtcaaacccagacctgtggggtgtctccctgtgcactgtggatggtcaacggcactctgtgggccacacaaagatccccttctgcctgcagtcctgtgtgaagcccctcacctatgccatctccataagcaccctaggcactgactacgtgcacaagtttgtgggcaaagagccaagtggcctgcgctacaacaagctctccctcaatgaggaaggaatcccccataaccccatggtcaatgctggtgccattgttgtcagctccctgatcaaggtcagtgccaccttaaccttctgataggtattatcctctaagctcctgtgttcctgtatccctcatatttgttcagctctccagggagactggtggggctctgattcctttgagggtccccagaaggcatatgaggcacagcagggacccacatgttatgctgacaatgtcagtataagagactgcaccacctccgtcatccccactcagtactgttccctgcccccacccatgagtctagagcctagagctttctgacccttagagaagtgagcaggtcctgacccctgc

SEQ ID NO: 56796 - DNA, 1491 bp, Homo sapiens
ttttgaagatattaaaattcaggttttattatttgttcagttataataatttaagttaatatttgctgtattctcagagcaaagatgtatttctgtaccactgtcctgtataaatttgttacccaagatagtgactgggtatgaaaggagagggaagagggtgacagatggaaacgattgctgtaggacagtccatctggccagatgcggtgggggaggggagaagaagtgggagagagatggtcctacagatgctcccatggggtaaatgatggggtgcatccctccctgcagtcgggctgtgcctgtacttcacagtcctctaagaggtgtcattcaggccacctcactcagcctatgcccaaccccactcactttccctttccttatgggctgcccccgcaactgacttccatgatgattggttctcattaggccctttgtttctacaccagccttagatcattaagacaaagacgtacttgctaccctcatagcacataacaacgccctggcagatgaaaatcaaacaaaaagcattaggcagtcttagaacattatcttgtatccttactaatcacatccagaccagatattttctaatcacagtttcgtatcatgttaactttttaagcataaaatgtgtatgtagtaaaaagtgcttttcaagctgtaccaataggaagtcagctatgtttgagtgaggcttattttactaccatagtttaaagatcacctaaaggctcaagcttgaaccctgggcagctggttaatgtttttgctccgtgaccacagtttacacctgaagcttaggccaagtcactccccaagagaatcaagccctaaagtaataatggatcagcacaagtctgtcaatcagtgccacagggaaaagaagttcacattcactggaagcattatctgtgtgtgtgtgcatatatatacacacatacacacatatatatttctgcacattagacatatatatttctgcacagtagacaaaatccactagcaaatttaaacaattcagatggctgaatttggagtcacactgcctttattttattcagtgtgttccacaacctcagcctcttccacattgttctacagcttctccattactttgcaaactgaatcagtgaatcccccaccatgcgtgaaccactttatcctcatggccagtttctaggaatctattgctgcattcttcccagcgggtaactcccccattctctaccaacacaaacttccactccaccactgtatctgcaggcaggaaaatggaatgagaccagaacccatccttgttatagtggagtgggatgtaagtgttccatctcccaagacactcatggtctccagttactgcaatgaattgcacatcagtgcttgtgacataatggacctggaacctgacactaacttgctgagaccctgcaggcatcactgctaccctttccattttcccatgcacttgctgacagctcc

SEQ ID NO: 56797 - DNA, 2561 bp, Homo sapiens
  misc_feature (1)...(2561): n = a,t,c or g
cccacgcgtccgtgctacccccgcggagttgtcgtgtgttctggattcattccggcaccaccatgtcgaaggtttcctttaagatcacgctgacgtcggacccacggctgccgtacaaagtactcagtgttcctgaaagtacacctttcacagcagtcttaaagtttgcagcagaagaatttaaagttcctgctgcaacaagtgcaattattaccaatgatggaataggaataaatcctgcacagactgctggaaatgtttttctaaaacatggttcagaactgcggattattcctagagatcgtgttggaagttgttaatatctgctacttggaacatacgattgcctttcagaataaatattggtattttttgttgttgtaaaattgaaatcaggcatttaacatactatgaaaacaccaggagtcaatgattaatgaaaggtgactcatctgtccctttttgttgtccatactcttcctatgaagagggaatgcgtatgaattaaggctactactgtcacagaagatcatagtctttgatgctacctcacaacacaaacaggtagttcgttgggggcaaatgaattagccaactgttaactggaagcttttgataatttttttttttagaacaatttggaacattaaaatttactgaatcgtatatattcatctgagataaaaatataaaaagaattatggaccctggatggcaatttgcttgatagcatctgatttgcagactcataatttgatttttaattaaatatataggttatgatgaagtgaatagacatatcagtgaacagttaactatattaaatttttatcatttactttttttaagattcagacctcagttatataaatttcagtttaatatcaaccaaaaaattaaaattttaatctaacccttatgtgtataaattggtgtcccataccagcttttaatggtggacctatagaatccagtacttttaatgggtgggaatttacagtagaagcatcctttgctgagttatacattcctttatcaatctcttttgatacaacatttaaaacaagtagcttcaagaaaccactggtgttttgaggatagtatttctaaatagcattcaggaacagagtattattgcacagatctgaagatcaaaaaaaagctcaaggaaatacagatcggaagtgctgatgagttatatttattgaaaacccaacttttaaggaagtgctaacgatcagtcacccatgtgaataagaagccaggaaaggaaagatggggaagcccagatcaccaggcttctattaaggaggaaagcaacagaggaaacagtgaaggggaacagaagggggtagcaaagtgttacagaaaagcggactgggatagacaaaactgcagaaggtgtatgttggggagaactgaaagggaaaacaaaatacttgacatagtcttaagtagaagaaggcagttagagaaaacaaagtatctactggccttgtcaacatacagacttcaaaataccccttatgagaatccaaagaatgatgtgtgtaagggaagattttatttgcccttccggaagaaatcagtatctatgcaaatcttgaaagacgaaatcaaagcccattaatgattcagaatcagtgcttgacctcctgtattctgaatggtgaactctggaagcagggattgtgtctggctctttttagagctggaagtgtagtggctttcattaaatacttgctgtaaagtctttctaagaccaattattatcttagcatgtttcagtatcttctctatcataggccctaagttcattgggggaaaaaaaataagaagattcaacagaatcagcatttgaagtgtaccattggtagttgtttatgaaattaccagatattcataaatgtgacaaatgaacagcaggattatgaattatcaaaggaaaaagtatttgctgaggtgaaaaaatctgatgtttgaggaagtttttatttttatttatttgttttgttttttttttttttgaggcagactntttgncnccnggnttntcnngcctnaccctcncaagnngnnggnactncgggctnncccccccccccccanntattttttnttttttaccaaaancngggngnangtttttatttttataaacaaaatctgatgttcagaggccccgtttcttacaataaatgttgagtcttagttaagcaggaatttatgaacacccatttcctgactttttgctttaatttagatttttctccatcctgtttctagcacaaaaatttgcctgctgtgttacaaaaataaatttatgttgtcctgtgccataaagtgatatatttaatatttttattctttggttttgaacattgtaagttcctaaaaacattttattaaacaagtagacattttgttattaaaaaaatgtgatctgtaatttctttgtgcagaatgatttgaagtattgtattcagtttacatgcattattggtttataattaatatctaatgaaaatacatgttgttatattgtaaaaaaaaaaaaaaaa

SEQ ID NO: 56798 - DNA, 2151 bp, Homo sapiens
cggacgcgtgggcggacgcgtgggtttctgaggaaaacaggctacaactgtttattaaaaccacttgcagtgcattcgtttatcagatgctcagtgcaaagtgtaattgggtcatggtcaaaaacgcttgcaacatctaattggcgttcaagatagtcattcaaaagttcttggcccgctgaagtctgttaacagttgaaacattctacagttaaccattagcatgctagttgtcctaatggaaatttttgaagagtttttcaatatataccctacccttgccaggaagagaagtaaaatcctcaggttgtggggtatttgtttctactccagcctggcaggcaaggctaaaacctgagattatcgatctatgagacatcttgatatgtaaagcacttaatattaaaggcataaaagtgaaactgctaaatatgtatagagaggttgacgtgtgatacgtgggacagttcacatagacatcagagaatttattccagaaaggagcctcctgaatgtgatgaatacggcaaagcctttaatcacatctcagcccttagcatcggaaagcttatactgtaaataaacttgatgaatattatatgtgaggaaaactttcatgtatagcactcattgcttcagacagaaaatgaattccgtcggtatgttccaatcgtgatgaatttgagaaacattgcaagagggagcctggccttgttcttgtttttcaaaaatttctttggtattctcacaagtttattcttccaaattaacttcagaatcagcttaccattttaaataagcaccccccttctaaatctattataacatctcactactttctcttctattcatattagcttaacttaagctaccatcctctcttgagtaagactgttttctaacatacagcaacaagagggttctttttaaaacataaatcagattatgtcatgggattcaaggaaagttttctttggatgaagaagccattcttccagatcaaatagtatgttctcctgttcctatgttaagggatctgacacagaacactgtagtcagtattaattttaaagacccacagtttgctgaagattacatttttaaagctgtaatgcttccaggagcaagaaagccagcagcagtactgaaacctagtgactgggaaaaatccagcaatggacggcagtggaagcctcagcttggctttaacccgtgaccggaggcctgtgcacctggatcaggcagccttcaggactttgggccatgtgatgccaagaggctccaggaactggcatttacagcaatgctgcaccaccacctgtgacttaccagggaaacttatacaggccgcttttgagaggacaagcccagattccaaaacttatgtcaaatatgaggccccaggattcctggcgaggtcctcctccccttttccagcagcaaaggtttgacagaggcgttggggctgaacctctgctcccatggaaccggatgctgcaaacccagaatgcagccttccagccaaaccagtaccagatgctagctgggcctgggtggggtatccacccagacgagatgatcgtggagggagacagggatatcccagagaaggaaggaaataccctttgccaccaccctcaggaagatacaattggaattaagcttttgtaaagctttcccaaatcctttcatcattctacagttttatgctatttgtggaaagatttctttctcaagtagtagtttttaataaaactacagtactttgtgtatttcttttaactgtgtatatttctactgatctgatctcactgtttatgttgctttccaaagatgtatgttgcataatacagtggatctgaatttattattgcttataaaacacatttgatggaataggagtactggtttttcataatggttaaaaatgaaaccagctgtggatttcaaaacacagtgtattctagatcatctaagatccatgctgatttttattgcacaagaattaggtttgaactcttgagctggaacctcagcaaactagagtatatattgttcagtatttctttggaaacatttcattaatgtacttgtcttacagaaatttctgaactttagtaaaaaaaaataaagttaaacttttaaaactca

SEQ ID NO: 56799 - DNA, 679 bp, Homo sapiens
gatctgcagaagattggagaattctgtatggtttattctgaggttcctaacttcagtgagccaaacccagagtacagcacccagcaggcacccaacaaggcggtgcagaacgacagcaacccttcagcttcccagcctaccactggaccctctgctgcctctccagcctctgagaaccagaatgggaatggactgagtgccccaccaggtcccggtggtggcccacatccccctcatactccctcccacccacccagcacccgaatcactcgaagccagcccaaccacacacctgcaggcccgcctggcccttccagcaaccctgttagtaacggcaaagaaacccggaggagcagcaagagatagcatgacattctttcttcctgccaccaaccacatcccaagtgtcccctggagagcaagatagccttccactgattggctggtgtagcagtattttagccactgaacttcagtggagggtggtgagcagtgtccttatccaccctaatctcatactccctcattgtccagctgaactacctgtcccctgggagtcaggaccctctgcctgctctctttcctctttagaaatggcagttactggctgggcgcagtggctcacgcttgtaatcccagcactttgggaagccgaggtgggcggatcacctgaggtccg

SEQ ID NO: 56800 - DNA, 930 bp, Homo sapiens
  misc_feature (1)...(930): n = a,t,c or g
cacattcctacaatcaagtttattactcaaagcaaaagttgtccatataatacattggtcgtcaatttttatttccacatggttacacaggctgaatgactagctcacaatcccaggaggtattataagttttgctcttcaaaaaatggtgttactgttgtaaggggaaaagtcctcaatgacaaagaaatgacactaatgaaaacaaaatcaagaatgatccactggtactgcaggttacagagaagctgtcagtgagcagttccccacctctcgcaagcaaaggggatcaagggctaaaaataccttagaaaaatcaaacagcacctgcaacacatgcttatataaaggccaaacttgcaaattcttccttctcgtccatgctgcccaaatgtgaaggaattacatataaggctaaaatctggcgaatcttctcacttcttcctcttctttgtggaatataatttttctgcgagtgggactgggacaatcccttcacattcttttagttcctgggtcagagggtgtttgacaatattccctctaatcacatctatatctcggagacaagtgctccaccatgctttcaacagctgcggtgggtgcataaaaatcccaccaagaaatacccgccctctgttgtgcttgctgacttgtgggcagagatcctataaggaagcgctcgttcaccccaggttttccaagtccctcactattgctcctctgtccatcagggcctctatcgtacgtttcaaagtagcagcagtctctggccgctgcatggctttcaggattaaagccagctcgtagcggggcatgcctggaggatcggcgagtgcggctcggaagcccaagcggttcccgggacgcgaaggggcgggacggcggggacagtggggacctagaaacctnttgcgccggacggctccc

SEQ ID NO: 56801 - DNA, 1239 bp, Homo sapiens
gagataatcccacctctgttcagctaccgccttgcccagcagcagttaaaggagatgaaaaagaaaggtctgacggaaactaccaaagtgtatcacgtgtctcagagtcccctgacagacactgccattgatgcggcccccagcgctcccttagatttggaaagcccggaagaagctgcagcaaacaagttccggatcaaatccccatttccggagcagcccgcggtcaagtgccggggaaaggcctccctccaggctggatctaaatgtgactcaggccagttgtgccataagccccagccagactctgatccgcaagtcacaggcaaggcacgtgggcagcagaggggggcccgtccgaaaggagccatgccaggaacgcccatttcaggaggacagcgagtttccatgaagccaggcaggcccggccgttccgagagaggagcatgtccactctgactccacggcaggcccctgcctacagctctaggacgcggacctgcgagcaggcagaggacagatttaggcctcagagtcgaggtgcccacctgtttcctgaaaaactggagcatttccaagaggcaagtggaacccgtggtccattaaaccctctccctaaatcctacactttggggcagcccttgaggaaaccagaccttggggatcaccaggcaggattagtggccggaattgagagaacagagccccacagagctcgtcggggaccgtcccccagtcacaagagtatctcaaggaagtagtcttctcccacatcccccaaagataactaccagagggtcagttctctgagcccttctcagtgtagaaaagacaagtgtcaaagcttccccactcaccctgagtttgccttctatgacaatacgtcgtttggcctcactgaggctgagcagaggatgctggacctcccaggatattttgggtcaaatgaagaggatgaaaccacaagtacacttagcgtggagaagctggtgatctagactgagaatcagcctgagctttacacagctggggtctgctactcgcgttttgtagacttttgtgtaactatttgtaccgtaggacagaatgtgaggaggaagtaacacacagaggaggatgtgtgtgtatgcatgtgtttgaattcacaaggaagaaattatttatcttgagctttttcctttgttattcaatttctattgatttattagtaataacaatgataataaaatgtaaatgagc

SEQ ID NO: 56802 - DNA, 1809 bp, Homo sapiens
tttttttttcattcacacacttagcatatgcaattttaatcaaccaaaagaaaatcccaaatgtacaagtgaaaaaaatccaaactgttgacacaggcctaactaatatcagctacttttatgtacagctgtatagttcaaaaaagctatcctatatgtatatacaaaagttgtttatacacaggtctgtacataagggtctatacatttatttcctcagaacccttaggtgccacctcttggtgaggacaccaacacttcattcacatatcttacaaaaaagaaagaccatttccaggattgacaacattgtgcatcctgtattcagacaatgtacactccactcgactggttaagatccttccatcataatgcggaccacaccagatgcatgggttccaccaaacagcttcacacagagtgctccaaagtaaaagcccataaaccaacccgagatgaagcagggtcctgcccagtgtgccaccacaggtccgggcttagttgagtctgcctgccctgctcactgtcggtattccaattcatctacactgataactttgggcggggcatgggaggggcaggggttgctgtagcacatctgagccaaaccatttggcaaggcccacaggggagctgctcctctggctggggcgatgctccagctgggagtgcatgtggggcaggcctgaccggctgggcacgttctgaggggttgtctgaacgctgacagctgctgccatgggaaccagagcctggaggatgcagaactgagcgctgtagctgctgttgcaccattgccagatgcagaggtgttccaggacgagggtttaagagagggtgactagcagcaggtaaagggtaaaagggctgacccaggatggggccagatattccctgtaaatgactcaagtccatcccaggaggaagcacaccagtttggagcaaacttggaagatgcttgtggatgtactccctgggcccagccatcctctgtaccaaccctgggtgaagctggtgagcaggcctaaccatagggacatgggggacaaaggggaacttggtggaaacagggcggaagaaaaagtgttgtaaggaaactggggaatgcccaaagtgggtgtttttcctcccccagttgcctttaggtcgataatcttgttctttggtgtaaacggttggccctgggacaagtggggtggaacacgaagaccctctgtaatgcctgacagtttggaatttgtagtgggagaagagtctcgatcggcactgggtacagagctggatgacaggaggttttcttcactggccttctgagtatcctctttactgtcaccaagagctgcttttccagatgctggctcctccttgcttttctctttgctctcgtacatcttacgaatcactgaggtaggggtaaaggaaggagaaagcatgcttgtgatggaggcagcaggggcaggggaagaggaattcccctcgaatgcacgggtgcctggtgaacttggtcactcgctgttgccctgtttctgaatcccatctctggttctgtcccacctgtggtttgccaaaacccaggctggtagaagtttgctgcctgtacagcaaggtcatgtggcaaggccagcccttctaaagctgcctgttgcaactccagctggctcatctgggctgtgatggggctcatgggtttgcgcatgccttggaatggatctccgagtagctgctgtggtcctggtgtgaaaccaattggtgatggtattcttgggcgaaggtagtcagctgaggctgctcgagtttgaaacacctgtg

SEQ ID NO: 56803 - DNA, 709 bp, Homo sapiens
gggagtcatcattcccttcgacagcattttcctctgctttgaaagccccagaaatcagtgttggccatgatgacaactacagaaaaaccagaggcagcttctttgccaagacctttcaaagccattttaggctgttaggggcagtggaggtagaatgactccttgggtattagagtttcaaccatgaagtctctaacaatgtattttcttcacctctgctactcaagtagcatttactgtgtctttggtttgtgctaggcccccgggtgtgaagcacagaccccttccaggggtttacagtctatttgagactcctcagttcttgccacttttttttttaatctccaccagtcatttttcagaccttttaactcctcaattccaacactgatttccccttttgcattctccctccttcccttccttgtagccttttgactttcattggaaattaggatgtaaatctgctcaggagacctggaggagcagaggataattagcatctcaggttaagtgtgagtaatctgagaaacaatgactaattcttgcatattttgtaacttccatgtgagggttttcagcattgatatttgtgcattttctaaacagagatgaggtggtatcttcacgtagaacattggtattcgcttgagaaaaaaagaatagttgaacctatttctctttctttacaagatgggtccaggattcc

SEQ ID NO: 56804 - DNA, 2614 bp, Homo sapiens
tggttgggatgtggagttgttgctggactctcaggcgaagtgaagtcattgaagtgtgtgaagctctgtgcttgcatgagggcaagcaaggaatggctgtgcctgaggctgctctgggaaactccttgccccttgacctcttttgagagcattcacgtggtcttcttgctcatccccttataaatgtgctttgcctgcctcagcctcatggtcagagcagtggagactggagccctgtttgcacgttctagttgttcggagaaagcctaggttctgggctcaggtccagatgcagcggggattctgttctctgactgtggcgaccttgctttggttcttgttgaagtgaaccaagcccggccaccacgcatggcatgctgtgcttggctccccataagacgtcctctttgggtgcacggtgtcaaagtgtgggcaggagtggagagctgggtgccctcaggaggagaccacagcatgtccatcagctcagcagagctcgacagccacaagtcctgagaagctttgaccttgaagggcttctgggagaggaggaatttctgcatgggggcgtgaaggcacactgtcccaccacaactgaaccagaaggagagtgaagactcccctctttcccatcctctgtgccaggtgccagactgtgctccttgggaacttatggcccaatcttacctgttctccagggactggtcactgcctcagggacccccaagcctatgccctgaggccatggctgctgactgactccagccaaggtgcaaagacgagattatgagacaggtcctcaggcctgtgttccaagtactcacaggggctctgggtgcccatcgccgggagtatggttcagctgccaccggcactgtccatttgcctgtctgtcaagctcagagcatggataagccacacagcagggcagtgcaccctggcaccatgcacggccagcaagaatcaaggcccgcagatgctaagagggcctattgtcaggggaaggtccccgctcctgcacactctctatggatacttgggttgtgggggctctcttggagagtaagtttgtggtttgtttctggtttacagtggtgggctgaacaacccttgttaagaaagcatttctggggaagtcttctgtgggtccaaacatgttgctccgatcatcacaggagagcaaaaggccctagataccccctttggaatgtgagagtcttgttgtctgatatttgccactgagctggtgaagcccctctaaagagatctcgaccctggggagcagaattcttgtcatctatgaggggtcctgagaaagacttgtcattttttttcctggagttcttcccattgaggtcctaggatttgcacaccactgtcccacaagagctttcctgcctaatgaaaggaggtcttgtggtgtgtgtctcctctcttctctatagttcccgagttggcccccattgcagcccccaccctgtgggtagtcttccagaagtgatgcagtggtgtgagatgccctacaccttgttatttgggagactttgagagtcattcacttccatggtgactagtgtttgttttgcctgattttatattctgtgttgcatttctccccactccctgcacttctggaaacctccctgcactctgggaaacctccctgaacacctccccaactctgcgctctcagcctccctgcatctctcctggggctccctgcacttcttccagccccccaaattctctggacctccaccctggccgcctcctcccaactttcattgtcttggcatctctcaaccctcagtcctctcttccttcccttctttatcatctcccctttcctctccacgtcccgcccccttcctcttcctgcctcctcatctcccttaagcatcctcttctccaacctcccgtcaccgtttactctgcaaaactgacagcacttagacgaggcttgggggcagggagcagtgttggggagagggctccccaaccccagggctcggactgttctctgctgggaccacccaggggtcggacacccaagggtgcctgggcaggtcgcagagttgggcaagccgggcctcgtatggggactcgggtgagggtggcgagtactggttccgaacgcacgcaggggagaagggagggacgcggcgctgacccttccaggtcagctggagttgacccgcccacctgggcttttcaaccccagtccgcgagtttctttcttgaaggtgtgggggctagattcattcacgtgcttcgtaatgaaataatccaaaaaataggaccaaagcgcccactggcaggagcgagggcggggcgccgcgctctataattattttctaagatgatgggggaggtttgttgcacgcgacagcccgctgaggaggcggggaccgagctacaacgcggttcggatttggcgggggtttttttccttaaaaaagcaaaaaagaaaaaacaaaagtctgggggaagaaaaaaactaaaattcttaaaaaaaaaaaaggctattatcaaactgatttctccctttttgtatgccggatgctgcatgagtctgaaacaccaataaacggagactgcatgagactcgcctcca

SEQ ID NO: 56805 - DNA, 941 bp, Homo sapiens
  misc_feature (1)...(941): n = a,t,c or g
ccctcaagtgtaaggaactgcgttccgcccctcaggcccccatgggggcagggatcggcttggaaatcaacgtggttgtccccgccaggccggggaaggttggagcagcccccagggaggggggcactaaggtgtcattgtgcccgatgtctggctcccctgcaggagggaggctccagggtaagacagggctggcaggagcagactgcctcagcccatgtgccctgccggccagggcgtgggctcccctcggctgtggtgcctcctctggccccccaggtccacgtcctttaaattggccctttggctcttgcccttggctcccttgggcagacagcaggcttaggccattgatatcgcagttcttcctatcagcttcagtgacccagggtctgaactgcctccatcctagggcaacctggggcagacaggcctggtggggggtggggaaacctccttccacctgagcttgcttgaagggacccagagtctttgggcccagatctttaaacctttgtgtcgtgttgcagcagagtgacgatgggggttggggggttatttattttgcctgtccttatccctgcttggacacctgagcatctgattcctgtccccctggtgccatctgggcctgggctggagccaggaacaggagggacacttccccagaatccgcatgtttccccagtgattacactccactgccaccgtggtgcctggctttaactcccacccctgctatgactcctctctgcagagacgcgactggcggctccagcagggactacctttcttataaacccagggggaccacacacacacacanacacacacactcttgatcccttgcttccctcccccagtgcgttctgtgatcgccaagttcaaagctgtgcacatgtggacactcaataaatgttcattggtgcaaaaaaaaaaaa

SEQ ID NO: 56806 - DNA, 1450 bp, Homo sapiens
  misc_feature (1)...(1450): n = a,t,c or g
agtccaggacaaccattagtcctgatgagtgagctgacgctggtgctggaacctgctggcacctcactggccacatctttggaaggggatggtggccttgcatccaagatgcctgaaaatcagcacgtgcagggcctccctatccagccagcattttccttccagctgaggcaggtgaagacttcataagctcatcacaggggagggaattaggagcagggcagcaggtaattaaacaagataaattatacctggatttccaacaccagctacaaagagttgaagatgatacctatgggtcgcgttaacacaggggggcaactgccttgatcggcctgccatgggtcatcagactgcttcctaaattgagagaaactgagcaatctctcagccactgctatagtctaacttcttgtttgctgagtaattgtttctaatgtctctgaactcaaagtgaggtgctccaagacgctgtgaacttcttgcaaagacacctccttacctactgggatcacgtgacctgacctcactcccagccaggctcccaaagggctcattccagccattccaatctcttcttctttatgcaaacacttttcccccacaacaagccttgtttgttccgataggaatacgtgtacgtcagtgcacttgtccttacgtcagttccttacaccaccaaagcacttcacctttctggaaataaaacttttaagacactactataagtaaaaatgagagtattcactagacttattgctcaggcacatttgagtggggtcccagctgtgtgattaagaagtcaactgggtggccttttctgggttatcttctgatcatggcctttcaacccaacaagggcccttccctgctcttccaccagtaaaggctcctggcctctcatcaggatctgccccccagagaccccccagacactgcagggccctggtgatgctgtcctctgtaccggaaatggcaggcactgtcagatttccactcttctgcctttaggaaggctgggtgcttcttgctctgacagccagtctggggagatgactcttacgttgcttgagtcttgggtgggcaggctgctgtccacgggggagaagtctctgctcttggactggacagaagagagacttttaccctggggcactcacacggccaagcttctgccaccacttcattagctgtattctccatagtatggtgaaatagcaggtgcgtcttctagtttattcctcctggggacatttcctcaaagcagttttgcgcccccgcaagggaatggtcagcctaagggtaatgtacagcccgtgcttggagaaccatggaagctacacccctacaggtgcatactgttctgcttttccaataaatacgagcggcgatttcaaccacaaaaaaaaaaaaaaaaagcggccgaanttattcctttgtanggtattta

SEQ ID NO: 56807 - DNA, 531 bp, Homo sapiens
  misc_feature (1)...(531): n = a,t,c or g
annnnnggnnnnnnnnnnnnannnnanannnnnnnnnngngnnnnngnnnnannannaagnngnnnnnggnnnagtnnntgnnaatttaaaacccttagancgacacgaattaatacgactcactatagggaatttggccctcgaggccaagaattcggcacgaggtgggaatatctggcttaggactgtttctctctaagacaccattgttttcccttattttaaaagtgatttttttaaggacagaacttcttccaaaagagagggatggctttcccagaagacactcctggccatctgtggatttgtctgtgcacctattggctcttctagctgactcttctggttgggcttagagtctgcctgtttctgctagctccgtgtttagtccacttgggtcatcagctctgccaagctgagcctggccaagctaggtggacagacccttgcagngatgtccgttngtccagattctgccagncatcactggacacgnctcctcgcagctgccctagcaaggggagacattg

SEQ ID NO: 56808 - DNA, 1863 bp, Homo sapiens
aattttgttaaatttttttatattaaaaagtggcatgaactttttatcgtagaacaaaaatcttgggaaggcaaaattggataaaaccattaaaacagaaatagagtgcttcaaatgaatcccatcaccttgtgatgtcccttattaacagtctctaaaccaataccagataccagaacagtccatcctaaagaacgagcagcagtccagggcctccacgctacttcatgcaataactgtttaaattaagccagcaggacctgtttcctttgtataagctacaacttctgaagcattacagttcctctagcacggtgctcaatcacagcactttggagcacctctctgcataaaggcaaacaaaacattgcctaaggaccctgcaatgccacccttggaggcttacaaaacagtagttaaaagtttcggagtgtgcaccacattgccagcaatgggatgtgtcacaatagcagatgtcaaaagagttaagctaatatttctctttaaagtacatctgaaatagaaaaatctttaatatacaccatttggtaaacaaattggcacttggattttgcttttttaaatgatctgaatcatactgtaacagtttctcttttttttttttttcttttgatcattgatagaactatggctccttaactcagaagggcccttttttctcaaaacaacctctgcaagatgtaaccttgacttcccaggaaaatgaaaggtagttaacaatttcccccatcacctatgtaactccctaaataaataaaaattacaggcagttgctcctggagattacatattatggtgttgatgacaatcttttagaagacgttaaactttttagtttgtcagatttaaaaaatgaaacattacagaaagttcaggaacaacacacttaagttgcatgaacatccatgtcagagtctgggaggaaagggggcagcagtgttgtaaataagaagctcgtagatttttctcatcttatgaacttgttttcagtaagatgttctctttgttctgacacctctcgccaactccaatgcccaaagatcaaggaacagatcaggatgtcattgcttcctttaatcccatggagccgtacagaagactgacacagatgctgatctcttccctgatggtagccatctttaactgcaaatcttcccattccttactccattttggacctttcaaagtgtgtgaatcattcgttcctcatctgaatccagaagggctggaagtgctacatctgtcacagaagaaggaacattctcttctacccacttcaaatcatcttcctgtgctttgttaactttactatttccattgggttcttgtttggtacttctcattttcattccttcaaagctttctttcagcataggctccttttgttcatcctcctcctcttcctcagacaatggtgaaaaggcaaacctctggttgtttgcagatggtcgccagagaaccatgatgacaaagaggatcatggagaacagcaagcgccagatggcatcgtctacccacagctcccgccagtccgactgacatgtcactattctgaacttcatggttgtccagatgataaacacaatggatgctgccactgccaaaataagcgtgttggtgaaatgccgatacaaagagagttttacaatgttcctccgaagttttaatagcttcattgtttgagtcaggctaataaatatccaccagcacaaggcagtgtctaggaaagccaaggggataaaggccaaggaagcaagatcagtctgggccccagtaactctgaggaccccttccatgccagagaacaaaagatagagggctcctgctactacaaccttatgc

SEQ ID NO: 56809 - DNA, 737 bp, Homo sapiens; identical to SEQ ID NO: 12986

SEQ ID NO: 56810 - DNA, 1565 bp, Homo sapiens
gctccccacgaggccttcctggcctcctgtctgaagtgggtccctttccttactggtccctctccaaagccctggctgtaagactcggggaccccagcatctgcacatctggcagagtggacctcctatgagaactggctgtgagctgtggagcccagggccggaggagcagtaagggtggcatggggaccatgacaggctgctgcgggccaggggcaaacacgtcaggcctggcccccagtccgctgctgcccctccctttcaccttccgtccagcactaagggagtctggccacggcctaatataggagggcttgtgggaggagacacccaccccctctttctgcacctctcccctcttccatgccacccccaggccaggagccaccacagccctgtctgtgactctcagctcccgaggctgggctcttccccagggaagctgcatgaccatggccacatacaggaggtaggagacagaggcctccacggtggacgatcgtggcgtgaagtccacgttgaccacgttgtcggtgctgggggagcggatgaaggccagggacccgcggcgctctccctcagccacgtagctgatggcatccttcaggttcagctcgtggaagacattcaggatccggtctcgagacttctgggccgaccgtctcatgaggaccctgctgaggaacttcctgtcgaagtgggaccacctgtagggacagaccttgggtgtgagcctcagtgaccctgtaggcgcgtttaaaatgagggaagcagcccctgccacacgcccaggccgtccgccgttctcccgcctgtcctgttggatggaggccgttagacgcatatgaaactgcatgccgcctcctccagagggtggctcaggacacggtgggtgtcaggcctgggtcaggcaagggggctttggccacatggggggcaccttcagtgcacaggtaggaagggcaggggcggacagacaccctgagcccttagacttgtgggagccaagctgaccagagtgaggttttttttagcctaacggaattagagtattcgctggttatccggatcagaagggacggtggcctggccggacttagaggaaactctggggcacaaggaggtgatgcctgtcacttggacatgggtgcagccgccagagccgccctccagggcacagggtgggcccgggtgagcttgtgtgctcacacctgggcaggccccgcggcagcaatggcagctctcctgtacaggctgagtttcagccacaccaagaagtcaaagctaaccgaggctgtgccttccgagacccccgggatggcccctgggaggccaaggagtcggggactgggtacccggagcagagtcactgtggccacggagaaccgcagctgagctttatgaagccacgtggccacacctcccggtgcctccaccccaagcaaacacagatcgctcagaaaatgggaacccagggcaaattgtatgtgctccttactgggtttattataagtgtcacatgttttttataataaaacataggtgatttcaccttaatggacaaa

SEQ ID NO: 56811 - DNA, 1779 bp, Homo sapiens
  misc_feature (1)...(1779): n = a,t,c or g
tcatgattacgaatttaatacgactnactatagggaatttggccctcgaggccaagaattcggcacgagcaagttgataaaatttatctgttcagcaaagagattgaacaaaaaagcacgttagtaatatgaagacaggaaaacgaatgaaagtctaacacataactcatattgatttactttatttctgttagattttacactctgaaaatttcacctcatttagtttgtacaaatactagacatggaaacttaaaatgtgcaggtgtcaaagcttaaaaatcaggtgtgtcctctttaaaggcatgtgcgataagcctgcagtcttaaccagacctggtaccagtttaacagttcattatacttctgtgatgagtggatctgttagtctggtagagattaatgttgaaatttacttaaagcccagctattaattgataatgaacatttttcactatttttttttctatctgaagcttagagatctagagctttggatctttcgggtatatgtcaatggaggtattattttataatactttgcattgacatgaagtgggttcatgggggaaaaccatgagctgtgaacattggtagcaaacaagcatatattcatttcaaaactttccttgcttttagcagagagaagcctgtatatgttacatgtgtgactttcagtagtttaaagagatgtttcaaaaaattgttgcatgtttttgatgcaatttgggaaattgtttacttcacaatgtagtcattcataaaaaaattcatgaaaatactgaacatatgtttgaggatttttcttttcctttttaaatttttttattttttctgagannnnnnnnnnnnnnnnnnnnnnnnnnnnnnnnnnnnnnnnnnnnnnnnnnnnnnnnnnnnnnnnnnnnnnnnnnnttgagatttggtcccatgcagtaagagggaatggagaacaggagccacccaactttggacattaaagttggagcaggcaaagatgaggccagctgtttcgcgaagcctgggacatgggcagctcttgagtacaccgggttcgaggccaggggaaaccctcaaggtagagatggggttaacaggtgtgagcccaccgtgcccggctgaagatttttcttaattgcaataaatattcagcattttttctaatgaaaatgaattttgtttaccagtaaaagtatgcattttaaaagactttcagatttatgctttttacgtgaagctgctaaactaaaagtaaatggaagaaaccaagtctagtaggttttttcttttttttgtgggggtgggatgggggaggttagttatacttaaaatatcttctccagagactgtatgctcctatactagactgtaagctctttgagggcagtctgtcaaatttatctttgtatcttccccagcgcctagtgttaggccttgcacataataggcgcccaataaatattgatgaagaatgaaggcgttgtgtttctaatgtgaccaaaccatggggattctttgtcattaataccgtcctcctttgtaagtgctgttttttttttttcattcttgagctcctaatgacattagatcttatcaggggcagttggacagttcagtaaaggtaaatgctgctcttgctctagttgctgtgacctatgttctttctgacttgctaagagagccaagtgatagtggctagtgataagattgatacataaattgctttactttgaaataacactggaaaaccctaccgtagacctgatcaagaaaaaaaaa

SEQ ID NO: 56812 - DNA, 3974 bp, Homo sapiens
ttttgcattgggggtggcagtgcactttattaacaaacaaaacagtaccatacaggcaaaatcttacttcagtggcaaagcacacacataggtatactccaacgtgtagcactggggcaaacttcagacatggaacattaggcaccaagttcacaatcacactaaacatagttcacaatccttcaatccatactcttcagtggaggatgaggccttatttaacagttaactgggacagacagatgaagttttaaaatctaattcttggcctaactgtggagtggggctgactcagccttcagaactgtgaagtggatgccttaacagggccaagatctatcagcctcttaaactgactttcatttctctggttcagagaaaaagcttatggtatcttcacgttggatgaacttgcatatcgtgagagtcctcagctccaatttcgtgtctaggcacatctggactggcattcattttgatacccaatccatagattaatagggttaatctaattagaataaattaaatcgttttccaaaaagttgaaaagggtaaatcacatgagttcttcaacattcaagactttaaatatgttagcaaactgattactgttccaactgttgccagttaagaagtttaaatcagcatttcccaaaaggtgtgtcaggactgagttaatcagtaagctaatagaaacaactgcaatagactagggatgagatttctcaaagcagtctgatataatatgcggcaactccttatgtactggagcgtatccaatacattctcaaaactcctaaattagctaaaatgcaaggtaaagagcagtagaaaaatgcagctcttaggataggcaaaactttggaagatttatgtcctcacaccagggtccagcaacttaggtttgaatttatgataaggttaatgatataataaacttgggttggctggtttccctggcaattgttaattccccttaaataaaaatatgttgatacattgtaaaaagaagtattttacagttgaaaccctttggaaagggcttttaaaaatctgagtttttaaaaggggaaaacaagaggtgggcacccttgtgggccgacattactcctaagatagagaacttagttttcatatataaaatgactcaatttcatgtcttttataaaacttaacaactaaagcaagtgagcttgctttaaggaaattagagccctaatttcttttctgtctgatagtctcaacaaataacagtcaaatttatcatatgtatttcagtacttaagagaaattggcatgctttgctaatatttatgcagaggtaaccatgttgaagacatatgtaagttgagaggtatgtctaattttatggtcataggaaaaattaaaagaaaactgctgctttcctgaagttgaaatagaatgttacaacttgacaaggatccattggtgtctagctgccttccagggggaagagaagatgccagtccgtagttggtctcccacagagctaagcagggagtcctcctgggggacagtcctgccactattttcctctgctcaactggaaagctgcacataagtcacagcaagtcagtttcaacattctaactcagttaaacactctcctccataagaagtgaaagaggaaaaatacaaataagctagcactgagactagatgtctagagaagtcggagggactacaagtggtcaggagattcctgaggcagcagaccacaagatgtccccattctggtctgagggtctgcatgccgctacccccaacactgctttcctttactatttcctgatccaaagtggaggctgcttcctccaggaggctgtgagcctctaggctctgtaatgacagttcaccattgcctaagggaagaaaaaggacagttacaggctgggccttcacctactccacctccacagacagaaagtcaaatgctttgtttctgaaatcatcatgtattttgcattgaagggaataaaaacaggacacagaaattgtttctgatgagcacatcacgtttaactttgtgaatttcagaaagtgatcacaaggctttattctatcaattaacatgagttgatctacactgacaaataagatggagcttgatcttactgaaattaattaggtgattctttgaattgtttttactttaacaatgattggaattaagccaaaggtagttaaatccagtacacttaaacatggcccaatgacacagcctttaaacttgtcaatattttcctcttggtggtattgaaaaccagtgagcagagagcataagaacagaacttcaagaccgtggcaggagcttgtatttgtacagcacaaaccccagggcagttactgatgtggaaaatccaatgatcttcagcaggccagaaacagagggcaggttcctttcccagaaggtgtgggtgatttctaccgctggaacgtcctttgattcaggttcttgtacccagatgtctttctcgggtcaccttcccgagaccatttaagacctccctagctgctcgttctccagcctcaactgccccttccatgtagccgctccactttgtggcagtctctgtgcccgcaaagaaaatcctgcccacgggttgacgaatcacccttcccatattgagtcatgatcccaggagggaagtaggccgtgtagcagcccccagagtactgctcctcacaccagttcttctcttcataatgcactggatgtaaagcttcttgggatcccagccactttggcatagagctcacagattttcttcttccttatttccttatgtagcttagcaagtcgatcagctttccgggcaagaatgaagcccatgatggcaggcagtgacccatctggcttggtgtcatccaaggttattgaaattggagcatcttcatcttcaatgatcatgcagccacagtaatccttcttcttccagaaggcctccttgtaatacatcatgcacttaatgacagctcccattggaagacgctgaattaactggtttctctctgctggaagctctggtctgaagtgaatcttggcagtcaaggtcggagggatcgcattaattacgtatttgcactcataatgttcatggttcagcgtctctatgatgatgttgtcacttgactggtcaacgtgagtgacaggatggttcagcttcacttggtctccgaggaggtccattatccgttcgctcacttgaccagatccacctacaaacttccgttcctggccaccattggtgacagagaatatccgagtggtgcccccgcactgcttcacataccacaagaaccacagggcagacacttcgtgaggctcagaggtcacattgatattcacaaaaagataagcaaaccgcctagcagtctttgtccagcagattttgtcaatgagctctttcatggtcattttgtcccatttgtcagcatgttgagcctcccagggtgcatcagttggaatctccttccccatgttatctattgtcctccacagattattgtaatccaaatatgcaatgggattccatactggtggaaaggcgccccgaaatggatatgttttccccttgacatattgaacgagacgctcactgacattcactttgtaagtctctatgcccagctccttagacaagcgtaagattctgttttgggttggtcccacataagctccaccaacatctacgtaatcaacatgctcattccttatagtatatgttcttcctccaaccctgtcccgagcttctaaaaccaaaacactaacgccatattcagtcaagagtttggcagcagatagtcctgaaatgccacctccgatcacgactacgtcgaacatgtggcccgcgatactcgccttctcttgattctccatgctttggctgacacgctcctgggtcgtaggcacaggagtggggacggcaaagggtgggaaggacccttctatg

SEQ ID NO: 56813 - DNA, 465 bp, Homo sapiens
  misc_feature (1)...(465): n = a,t,c or g
ggtgntnnnnntttgaatngnanancngntatgacatgattacgaatttaatacgactcactatagggaatttggccctcgaggccaagaattcggcacgagttccaagtaatcagattgagaaaaccctatgagtattccagactacagagtttgcccaaatcaactgtaaatgacacttgtgtaacgtatatatagtgtttcatgaggtgtatataaaatagcaaattatgacagaacagtgatcacatatatttggatttatatgatatacagttacagtttactctgcagaggtaccttacctggtattctttgaatttttttttttttnnnnnnnggaaaanancaccaanttngatnatattttnaagggtntnaaancctgaaaaanattnatngggcnttnttnganccntgtnaanatcttttngagnaatggtttggtttnttncccttaaatag

SEQ ID NO: 56814 - DNA, 1134 bp, Homo sapiens
  misc_feature (1)...(1134): n = a,t,c or g
ggtggcccttgccaacctgaagagcaagtatgagaatgagaaggccatggttaccgagaccatgatgaagctgcgcaatgagctcaaggccctcaaggaggacgcagccaccttctcctcgctgcgtgctatgtttgccaccaggtgtgacgagtacattacacagctggatgagatgcagcggcagctggcggctgctgaggacgagaagaagacgctgaactcgctgctgcgcatggccatccagcagaagctggcgctgacccagcggctggagctgctcgagctggaccatgagcagacccggcgtggccgtgccaaagccgccccgaagaccaagccagccacaccgagcctgtagagtagctgccaggaggacttggccacccggccctgtcacactgcagccccttccccttccctctcgtggcccacaaggaggaaggaagggcaacctaaaagcccacttagaaactttttggatatgccactgcaattcttttcaaaatagcattccccagggtttttaatgggaggaaaaaaagctttaatgttgagcatgctgcgagctgctgcgtggaaaggcctctgtatgggccgaagacccttcttccctggctgccaggctcgccaggagcccactggaaacgcccaccacgggggctccttgttacacatgttctttttttatccgatcaacctgtgcacttttgatattttgatattatatttgcttccttaattcctcgcgtagagacggtctcaggtgccgtggtctatgctcgtggtcctgtagctgtccgcctcagctcccaccgtgtttgtctggtgtcagcacgaggcagagctgtgtgctccatagcgtgtagctttagactcggagatgagtgctttgacccagcgaggagctcagctaagtgtagtcacgctgtggttcagcagcctttagatcatacggcattgtggttcatgtttgaaattncagattttaaatncnntgtacagaaacantggcatagactccttcacacatcactgtggcaccagcaactacttctttatattgttcttcatatcccaaattagagtttacagggacagtcttcatttacttgtaaataaaatatgaatctc

SEQ ID NO: 56815 - DNA, 6826 bp, Homo sapiens
  misc_feature (1)...(6826): n = a,t,c or g
cagctccgaggggagtcggaccggagcaaacagccacccccggcttcgtcccccacgaagaggaagggcaggagccgtgccctcgaggccgtgcccgccccgcccgccagcggcccccgggctcccgccaaggagtccccacccaagagggtgcccgatcccagcccagtcaccaagggcactgcggccgagagcggggaggaggcggcgcgggccatcccccgcgagctcccggtcaagagcagctcgctgctgccggagatcaagcccgagcacaagaggggcccgctccccaaccacttcaacggccgggcagagggaggtcgaagcagagagctgggcagagcggccggagcgcctggagcttctgacgccgacggcttgaagcccaggaaccatttcggcgtgggcaggtcgacagtgaccactaaagtgaccctccctgccaagcccaaacatgtggaactaaatcttaaaacccctaagaatcttgacagtttgggaaatgagcacaatccatttagccagccagttcacaaaggcaacactgccaccaaaatctccttatttgaaaacaaacggacaaacagtagcccaagacacactgacattcgaggcccaaggaatactcctgcctctagtaaaacgtttgttgggagggcaaagctgaatttagccaaaaaagccaaagaaatggagcaacctgaaaagaaagtaatgccaaacagtccccagaatggtgtgctggttaaggaaactgctatagaaaccaaagttaccgtctcggaagaagagattctgccagcaaccagaggaatgaatggagactcttctgagaatcaagctcttggtcctcagcctaaccaagatgataaagcagatgtacaaacagatgctggctgcctttcagaaccagtggcttctgctctgattcctgtcaaggatcataagctcttagagaaggaggactcagaggctgcagacagcaaaagccttgtacttgaaaatgtaaccgatacagcacaagacatccccaccactgtggataccaaagatttacctccaacggccatgccaaagccacagcatacattttctgactcacagtcccctgctgagtcatctcctgggccttctctttcactgtctgcacccgctcctggggatgttcccaaagacacatgtgttcaatcacccataagcagtttcccatgcactgatctaaaagtgtcagaaaaccataaaggatgtgttttgcctgtgtctcgtcagaacaatgagaaaatgccacttttagaacttggaggagaaacaacccctcctttgtccacagagcgtagtccagaagctgtgggaagtgagtgtccatccagagtcctcgtccaggtcaggtccttcgtgctccccgtggagagcacccaggatgtgagctcccaggtcatcccagagagctctgaagttagagaagtgcagttgccaacttgtcacagtaatgaacctgaagtggtttccgttgcaagttgtgctcccccacaagaggaagtactgggcaatgaacactctcattgcacagcagagctcgcggcaaaatctggcccacaagtcataccgccagcatcagagaaaactctgcctattcaggctcaaagtcagggcagcagaacacccctgatggctgaatccagtcccaccaactctcccagcagcggaaatcacttagccactcctcaaaggccagatcagactgttacaaatggccaggatagccctgccagccttttgaacatttctgctggtagtgatgatagtgtatttgattcttcttctgatatggaaaaattcactgaaattataaaacagatggatagcgcagtttgtatgcccatgaaaagaaagaaggccaggatgccaaactctcctgctcctcactttgccatgcctcctattcacgaagaccatttagaaaaggtgtttgatcccaaagtgtttacctttggtttggggaagaagaaggaaagtcagccagaaatgtcaccggctttacatttgatgcagaaccttgacacaaaatccaaactgagacccaaacgtgcatctgctgaacagagcgtcctcttcaagtccctgcacaccaacactaatgggaacagtgagcctctggtgatgccggaaatcaatgacaaagagaacagggacgtcacaaatggtggcattaagagatcgagactagaaaaaagtgcacttttctcaagcttgttatcttctttaccacaagacaaaatcttttctccttctgtgacatcagtcaacactatgaccacggctttcagtacttctcagaacggttccctatctcagtcttcagtgtcacagcccacgactgagggtgccccgccctgtggtttgaacaaagaacagtcaaatcttctgcccgacaactccttaaaggtcttcaatttcaactcgtcaagtacatcacactccagtttgaaaagtccaagccacatggaaaaatacccgcaaaaagagaaaaccaaagaagatctggattcacgaagcaacctacacttgccagaaactaaattttctgaattgtcaaaactgaagaatgatgatatggaaaaggctaatcatattgaaagtgttattaaatcaaacttgccaaactgtgcaaacagtgacaccgacttcatgggtcttttcaaatcaagccggtatgacccaagcatttctttttctggaatgtcattatcagacacaatgacacttagaggaagtgtccaaaataaactcaatccccgacctggaaaggtagtgatatatagtgaacccgacgtctctgagaagtgcattgaagttttcagtgacattcaggattgcagttcttggagcctctctccagtgatactcataaaagttgttagaggatgttggattttgtatgagcaaccaaattttgaagggcactccatccccttagaagaaggagaattggaactctctggtctctggggtatagaagacattttggaaaggcacgaagaagcagagtctgataagccagtggtgattggttccatcagacatgtggttcaggattacagagttagtcacattgacttatttactgaaccagaagggttaggaatcctaagttcctactttgatgatactgaagaaatgcagggatttggtgtaatgcagaagacttgttccatgaaagtacattggggcacgtggctgatttatgaagaacctggatttcagggtgttcctttcatcctggaacctggtgaataccctgacttgtccttctgggatacagaagcagcgtacattggatccatgcggcctctgaaaatgggtggccgtaaagttgaattccctacagatccaaaggtagttgtttatgaaaagcctttctttgaaggaaaatgtgtggaactagaaacaggaatgtgtagttttgtcatggagggaggtgaaacagaagaggcgactggagacgatcatttgccgtttacgtcagtggggtctatgaaagttctaagaggcatttgggttgcatatgagaagcctggatttaccggtcatcagtatttgctagaagaaggagaatacagggactggaaagcctggggaggttacaatggagagcttcagtctttacgacctatattaggtgatttttcaaatgctcacatgataatgtacagtgaaaaaaactttggatccaaaggttccagtattgatgtattgggaattgttgctaatttaaaggagactggatatggagtgaagacacagtctattaatgtactgagtggagtatgggtagcctatgaaaatcctgacttcacaggagaacagtatatactggataaaggattttataccagttttgaggactggggaggcaaaaattataagatctcttctgttcaacctatatgtttggattctttcactggcccaaggagacgaaatcagattcacttgttttcagaaccacagtttcaaggtcacagtcaaagttttgaagaaacaacaagtcaaattgatgattcattttctaccaagtcttgcagagtttcaggaggcagctgggttgtatatgatggagaaaatttcactggtaatcaatacgtgttggaagaaggccattatccttgtctgtctgcaatgggatgcccgcctggagcaactttcaagtctcttcgttttatagatgttgaattttctgaaccaacaattattctctttgaaagagaagacttcaaaggaaaaaagattgaacttaatgcagaaactgtcaatctccgatccctgggattcaacacacaaatacgctctgttcaggttattggtggcatatgggttacttatgaatatggcagttacagagggcgacagttcctattgtcacctgcagaagtacctaattggtatgaattcagtggctgtcgccaaataggttctctacgaccttttgttcagaagcgaatttatttcagacttcgaaacaaagcaacagggttattcatgtcaaccaatggaaacttagaggatctgaagcttctgaggatacaggtcatggaggatgtcggggccgatgatcagatttggatctatcaagaaggatgtatcaaatgcaggatagcagaagactgctgcctgacgattgtgggcagcctggtaacatctggctccaagctaggcctggccctggaccagaatgctgacagccagttctggagcttgaagtccgatggcaggatttacagcaagttgaagccaaatttagttttagacattaaagggggcacacagtatgatcaaaatcacattatcctcaacactgtcagcaaagagaagtttacacaagtgtgggaagccatggtcctatatacctgaacaaagaaggaagaagaatcttctggaggtccttccagccaccttatttcttaaaaaggacaatgctgatggaagaccagactggaaagtggatcgactcctccttcattgattctaaattcaaccttaaatcatgctgccatgactcagagaacttactcatcgtttcaaaagactatcatagctttaaaccaataatttgtcctcctttcatttcttgcctttcatttttggtagctgcttaaacaggttgcctaattagcagcttttgggtgattttgtaaaatgttatatcaagatttcaagactgtgtacattttaaattatttccaaagatagtgacaggagagaactggaacaaatttaccaactttgtggacctacaaagcccttacactttaaagggtaagacaaaggcttaagtttgaaaggtagagaactgtttagcatctgagaagaaatactttattaggcctgtaattttggttcttggccttaaacactttctggaacctttaaatatgctgcatagacaatgggaaagccttaggtattcacacatttaaggaactctaaacaaaatactattttcctttagttcatattaaaaattaatacattttaaaaatttaatgtcaaagtctggtaacatttgttagtaggatttgagttattattttttgagacaggatctnnnnnnnnnnnnnnnnnnnnnnnnnnnnnnnnnnnnnnnnnnnnnnnnnnnnnnnnnnnnnnnnnnnnnnnnnnnnnnnnnnnnnnnnnnnnnnnnnnnnnnnnnnnnnnnnnnnnnnnnnnnnnnnnnnnnnnnnnnnnnnnnnnnnnnnnnnnnnnnnnnnnnnnnnnnnnnnnnnnnnnnnnnnnnnnnnnnnnnnnnnnnnnnnnnnnnnnnnnnnnnnnnnnnnnnnnnnnnnnnnnnnnnncactgcgcccagccaggatttgaattattttaactcatccatgggctgccctagaatgtcacaaatgagggttgtttaatgcctttcttatagctgctactggaacactattatgacctaatttatgagccatccttactcatctacaagtgctgaagcaatgttacatacttttttgctaaactcagattttttagcctaatttcttgtcctcctatccacctgcatccacacatggcctgcatggggctgccttccctgcagtgttctgcagccatgcttcagggtatagctgttggtggacagcctcaggtcttgggggcactatagccactaaacgaggtgtgaaaggctcaagaggatgaccagcaattaattatccccagaaagtgaaggaaaagagacctttagggatgttgctggtcaagtcttgatttgaccggagtcaaatcaatcttcaagcaatcttggaatcctcaactgcagtaagcatttcaaaatgcaaacaaactgcttaacaactgacaagacaccagcccatatgctgctcttccaacagtgggttctagctttgaacaaaagtgctaaacatttccttgaatatattcttcctctttttgtcctcatcactcaatactggtgctcttgtcacaggtagaacagcttgtttcttttccatctattcaagtgtgtttctaattctaaaatgctgatcttctctggagtctatggtaggcaattatggtcactggaatagtttgtcttgttttaaaatattattggtgcatgtacaacagcatccaacatatctgtcttgttcctagatatatagctctgattttaggccttttgtgcataccattacaatatggtggggtaagacattctacagtagcctgtgctgaactgatctcttaaataaacttgcttctggttaactatgttgaaaaaaaaaaaaaaaaaagtcgacc

SEQ ID NO: 56816 - DNA, 535 bp, Homo sapiens
  misc_feature (1)...(535): n = a,t,c or g
ttgananccnttttgaataacgctatgacatgattacgaatttaatacgactcactatagggaatttggccctcgaggccaagaattcggcacgagtcggcctgcctgcaaacgctgtttgagcagcagaacatgtacaggctcaaggtgctgtagatgaggctgcggtcggccatcactggcctggtgtacagaaaggcatccacagcatatctgaagaaatattcagaagttaactaatctcagatgatttcagcaggagtaaagaagagaaacagactcagaaatgccattacaacagttaattatgtcaaatttatcaccctgattgatcacgcagcattaacctcaagaacgccaagccaagtttttttgacaaatgtgagccaaggtttccgaaaaactagcagatatgactgtgacttacaaaatggaaaaagtaaacgagaaacacaatttgatatgatttaataaaagatttgtttcaccacttctcctgggaacctcagcacattttcttttcactgacgttatt

SEQ ID NO: 56817 - DNA, 1524 bp, Homo sapiens
ttttttttttttttttagaatgttaagtaaacagattttattcaatctttcctagagtttataatgaacatttgttatttaatatggtagttatattacagttttaccttacgagcgatagaacatttggtgaataagattaacaaaccggaaatgatgataccctcgaagacactctctggaagcacaccagtcccactgactcatgttacaaatttaagttggcatccagctgatttgtagaatgtgttatcctgatgtttctgcaattataccacctgaagagggtccctgtcagtctctgataggataatatttatcttattctccaagtgagaatccagcatatctcgaaggtcagaaagaaagcctcgttcagtgttgctgtgttcacagaggatgacatttattccttgggaagcagcatccaaagtatcatgatgggacatctcacctgtgaggtaaaggtcagcctcaacaccctgcagaacgctgctccccagaaccagcacacagggccacgactttgactgagactctaaggttctccccaccccaagggctaagcgaatatgagatagttttaggtgtctttttattcgatcaatcatggttgccagggagacagattcatccagtgtgcataaccgtcccattccagtatgtagaagcaaaggcttctccagtgacagaatttccgtcttctgataaagttgtttgttccgggaaagaaaatctaccacctgcatcaaagccttctgagtacaattcagattaatccgtgtttgttcctcattaccagtcctagcagaaaaagaagtgacagaaacaccgtcaattcctttcactgcagacatgactttgtccaggtcttgggtgtagttaacgttgaattctactcggtggtttccctctgtagggtagttgggagctttggaaggatgtatgggcctggaggtacaagctccaagccctttagccaaccagttgttgacgccctggggcgcagcatcataggctgtatgaggagagtagataccgactctgttcctcccagagcccggatcaccaggcgctccttccatgtgttcccggttaatgcgccttccatgggtcggaagataggcggatggtaggagagaatgaggtctgcccttcttttgcagcacctccctcccatcacttccctcagtcaggtcattggtcaggaagagtgtatttacagtatgtggtgggcttggttccaccagtaatccaacattgtcccaactctcagcaaacgagagggatgcaaagtcattcaaggaagaaaggagagccttcaaatccatgaaggaacgggaagaattgcagatcagggaatctacaaaccggactgtcgtggggactcatctatgcctcatttcagtgccacttcaggccttttccaggacagtgaaaaaccacgagacacagccagttaagtctgagtcaggacccctgtcccactagtgcgctgtgctctggtgcggcagggcagttttc

SEQ ID NO: 56818 - DNA, 1095 bp, Homo sapiens
cagctatgacatgattacgaatttaatacgactcactatagggaatttggccctcgaggccaagaattcggcacgaggtggatcctgccctccctgtggcttctcctgcttggggggcctgcctgcctgaagacccaggaacaccccagctgcccaggacccagggaactggaagccagcaaagttgtcctcctgcccagttgtcccggagctccaggaagtcctggggagaagggagccccaggtcctcaagggccacctggaccaccaggcaagatgggccccaagggtgagccaggagatccagtgaacctgctccggtgccaggaaggccccagaaactgccgggagctgttgagccagggcgccaccttgagcggctggtaccatctgtgcctaccttgaggggcagggccctcccagtcttttgtgacatggacaccgaggggggcggctggctggtgtttcagaggcgccaggatggttctgtggatttcttccgctcttggtcctcctacagagcaggttttgggaaccaagagtctgaattctggctgggaaatgagaatttgcaccagcttactctccagggtaactggaagctgcgggtagagctggaagactttaatggtaaccgtactttcgcccactatgcgaccttccgcctcctcggtgaggtagaccactaccagctggcactgggcaagttctcagagggcactgcaggggattcccctgagcctccacagtgggaggccctttaccacctatgacgctgaccacgattcaagcaacagcaactgtgcagtgattgtccacggtgcctggtggtatgcatcctgttaccgatcaaatctcaatggtcgctatgcagtgtctgaggctgccgcccacaaatatggcattgactgggcctcaggccgtggtgtgggccacccctaccgcagggttcggatgatgcttcgatagggcactctggcagccagtgcccttatctctcctgtacagcttccggatcgtcagccaccttgcctttgccaaccacctctgcttgcctgtccacatttaaaaataaaatcattttagccctttcaa

SEQ ID NO: 56819 - DNA, 510 bp, Homo sapiens
  misc_feature (1)...(510): n = a,t,c or g
gannccnnntgntannacntntgatcccantgctatgacatgattacgaatttaatacgactcactatagggaatttggccctcgaggccaagaattcggcacgagacactgcattgagtttttaccatatggctggagcatctcttgataaagtgaccatgcagcaggtggccaggacagtggctaaagtggagctctcagaccacgtgtgtgatgtggtgtttgcactctttgactgtgatggcaatggcgaactgagcaataaggaatttgtttccatcatgaagcaacggctgatgagaggcctggaaaagcccaaagacatgggtttcactcgcctcatgcaggccatgtggaaatgtgcacaggaaactgcctgggacttcgctttacccaaacagtaaccccacactgcaagaggggacccctccacccccagtaccctggaccccctccgcagagtctcggcagagccctttgtgctgctgcttctggaagtagtccccctt

SEQ ID NO: 56820 - DNA, 426 bp, Homo sapiens
  misc_feature (1)...(426): n = a,t,c or g
ttgcccacccgtttngacatcattacgaatttaatacgactcactatagggaatttggccctcgaggccaagaattcggcacgagtgcaggtgaacaggtagtatcttccccagcagatgttgctgaaaaagctgacagaattattacaatgctgcccaccagtatcaatgcaatagaagcttattccggagcaaatgggattctaaaaaaagtgaagaagggctcattattaatagattccagcactattgatcctgcagtttcaaaagaattggccaaagaagttgagaaaatgggagcagttttcatggatgcccctgtttctggaggtgtaggagctgcacgatctgggaacctcacgtttatggtgggaggagttgaagatgaatttgctgctgcccaagagttgctggggtgcatgggca

SEQ ID NO: 56821 - DNA, 534 bp, Homo sapiens
  misc_feature (1)...(534): n = a,t,c or g
actatanggaatttggccctcnaggccaacaattcggcaccagcaaataaatgcaatcatgtgcctcgtgtcaccttttttgcattccattcattaacaacaagttgcagttcctacctacactcaaggaagggnggaattacacacaagtgtgaccacaggaggcagggctcatggaggcctccttaaagtcccccagccaaacctgaaaagtcaatcctggaccttatcatagtggctgtatagtttanaagggttcttcagattggcattcctttgcctcatatcatcacttcaaaaccctataagggtttgttcctcggtcttgactttgtgtctttgaggattgctttgtttagtgtcacctgccttctttcaggaggttttgcctgacatctggtggtgaccgtgggcaccaantcancccaaacactacctttanggacnactgcanttcccttngggccccnncaacctaaaattgtncncttcaaggcaaaaaactnttcctcaattttttttcccaanangaag

SEQ ID NO: 56822 - DNA, 1275 bp, Homo sapiens
ggtgttttccttgagtatctacttggcttctcgtggtttttcccaccccagctgccccagcacgcgggacccatagcacaccccttagcgcttgcctaggttgctgaaaacagggaggcacctggtatctcgagtgcctgcagttgcaagtatgtttacacctggtgtccaattttgtattttaaaatgtaatccatttttacttcagctcatccaaaagcagccagcagaccggttgactgagaccggtctgtggctgtggggccccttgggtgacccgctgctcttttggaaatgggtgacctgaagtgacactttttccacaattaacccaagttgtgttaatacttcaggtctgtttcccagacccagaaagctttacagaaaatcattgtaagacaatttattaatttgagaaagtcaccttgacagttctttgcacacaagttttacacctctctggattcgaagtttgtattgtattcatagttaaagggaatcgggtactttgcttgttgaataatgcactttaaaacaaggaaccgtatcaggccagcatggtggctcatgcctgtaatcccagcattttgggaggctcaggcagacaaatcgctctagctcagaagttgcagagcagcctgggcaacatggtgaaacccgtctctaccaaacagacaaaaagcagccaggcgtggtggcacatctgtggtcccagctacttgagaggctgagccaggaggatcgcttgagcccaggaggcggaggttgcagtgagctgagatggcaccacttattgcactccagcccgacagagcgagactccatctaccagatccttatgacgcagctgatgcctgccttggttcctaccactctggtgtagacagaggactttgtccaagtctcacactaaacatgcccgggcttcgatgtgcctggaggatttccccacagggacccacgcacctccctgtatctgcgcagcttgctcgtgtggctggaagcgctgtcgataagcttcacgcactggcttgccagttcttcagctctaggacttgtagctttaagcaaacggtgtggcatgggttgagtgtggccacctgcaggatgtgcatgggttgagtgtggccacctgcaggatgtgcagggctgcctcagaagctggctggggactctagcctctgtgttcataaagacattaagaagtggatggatgttgttccttttttgaagttgtcattaaagtaggtgcaacaaccaagaaaaaaaaaaaaa

SEQ ID NO: 56823 - DNA, 433 bp, Homo sapiens
  misc_feature (1)...(433): n = a,t,c or g
gggcccttggaatacaccagactggccagaaagttacagatgacatgtatgcagaacagacggaaaatccagagaatccattgagatgtcccatcaagctctatgatttctacctcttcaaatgcccccagagtgtgaaaggccggaatgacaccttttacctgacacctgagccagtggtggcccccaacagcccaatctggtactcagtccagcctatcagcagagagcagatgggacaaatgctgactctttttttgtctggggcctggggaaagggcttggactgtgaaaagaaatgtggcccctttccatcttcaagagagatggaattaatgatggatggaccctggagggaatctccccagccgacttccactgggctgacagactttgctgaccacaggggaaccatggtcttttctttnttcat

SEQ ID NO: 56824 - DNA, 749 bp, Homo sapiens
gtacgaccgtctcctggctgccgtcacttccggttctctgtcagtcgcgagcgaacgaccaagagggtgttcgactgctagagcccgagcgaagcgatgccctaaatcaaaggaacttgtttcttcaagctcttctggcagtgattctgacagtgaggttgacaaaaagttaaagaggaaaaagcaagttgctccagaaaaacctgtaaagaaacaaaagacaggtgagacttcgagagccctgtcatcttctaaacagagcagcagcagcagagatgataacatgtttcagattgggaaaatgaggtacgttagtgttcgcgattttaaaggcaaagtgctaattgatattagagaatattggatggatcctgaaggtgaaatgaaaccaggaagaaaaggtatttctttaaatccagaacaatggagccagctgaaggaacagatttctgacattgatgatgcagtaagaaaactgtaaaattcgagccatataaataaaacctgtactgttctagttgttttaatctgtctttttacattggcttttgttttctaaatgttctccaagctattgtatgtttggattgcagaagaatttgtaagatgaatacttttttttaatgtgcattattaaaaatattgagtgaagctaattgtcaactttattaaggattactttgtctgcccaccacctagtgtaaaataaaatcaagtaatacaatcttaactgttgtgggccttttttg

SEQ ID NO: 56825 - DNA, 1677 bp, Homo sapiens
gggtctcgctttggttgcccaggctggtcctcaaaactcccgggactccatgcaaatccctccccacttcggccctccccaaagtgctgggatttacaggcatgaaccactgcccactgcctccagccatattatagatttatagccatattatagccatattatagaaatattatagatgactttatttcctatacctacatgattataactagcttaaaaataaatcaataaattacaaacaataaaaccataaaatcaaggaagatgagggctgttgcatgttcctttacattttatttgccataaacattaagataatacagaaaatactggagaaaaaaagctttttaataatttcttgatgcaaagcttcacacttaaaaattatgcttgctccccccatccaccccaattcaacatgcagatatcatttattttcttatatgctgattctagagcattgtaatctcgacggttttttaagagttatctttgcccttgcaacaatttcacaaactgtatacaatcatggtataataccatcattcaaatgaatccctaaggtgagtacatttacacaatattaacactaaaaatctgtgtttttttaaaacaccatagaagtcaaaccacaaaaacccaggatcttgttttaaatgtgtttatgaagactgctgctgagctcaaagcatgcaggtaatcatgaccacctagatgaagctggatgttgaaactccttcatggtccaatgatggtaatttttcactcatcccaagtatctccatacttgtttactttgacttctttttttggcactctttcatgcataggcctgactgaggggtcagtcttttgtgttaaagatacttcatatgactctctgttcttattccttaattcctcatatgtaatattttttcttttaggactttcttcaaggttgggatcaggtccttggacaatatgatcagtaataccagtgggagcagattcattcatagaagaactgaatggaattggctcataatgaggaagcatttctatgttgtctgctgctggggatgtcacaaaagatgattgaccactcacacttgagtcatattttgacttttgataatagtgcccaggtggtgaagatcgtcgtgcttgtcctgatcgtaaagcttctccaaggggggaattttcaagtttcttgaatttctcttggcaagttttcacataagaaagttttccagcaaagtatcccatgatacaagcaagtataagtttagggatggaaccatatttgggatgacttgaaagtattcctttactaattaatccttgagtaatcaacatacttgttgcagccaaaggcacagatctgaaccagaagctttcatcattgcattctgcgaagactctcctttcttcctctgttggaatgtaatcaggccctatgtggggaattggtcttggaacctctgcattcggctctcgaaaatcagccctcccattcatctttcctcccgacgacagcagcaggcgactgcaaggaaaaccaagcgatcaggggcagaaggcccggagggtggactcgagagggggcagggagggagaaaagtgcaaggtaccgcgggaggggagggtagacagcgcagagtctccgtcgtgcgaatctggctcgaggcaatc

SEQ ID NO: 56826 - DNA, 956 bp, Homo sapiens
gctcctggatgccagtgagcggctgagagctgaagctccctggacactcaaggctcttgtggtgacagtctgacgtaaaggcgtgcagggaggcctagctctgtctcctggacttagagatttcagacacagaagtctgtccatggctccttgtcacatccgcaaataccagggagagcgaccgccagtgggttgtgggcttgctcttcccgggggatgggccgagcatgccccagccaccttccgggcaattgctgaagcttgccttcgaaccctcatactcttacttgggggggcccctcgcccttactcctgggtgttttgggatcctggggtttttagcccttcgtgttttcaggcattcagccttttttccctggccctgtggttccttgccaaaaaaccctgggacggagtatgtggacatgacattgtgcacagacatgtctgacattaccaaatcctacctgagtgagcgtggctcctgcttctgggtggctgagtctgaagagaaggtggtgggcatggtaggagctctgcctgttgatgatcccaccttgagggagaagcggttgcagctgtttcatctctctgtggacagtgagcaccgtcgtcaggggatagcaaaagccctggtcaggactgtcctccagtttgcccgggaccagggctacagtgaagttatcctggacaccggcaccatccagctctctgctatggccctctaccagagcatgggcttcaagaagacgggccagtccttcttctgtgtgtgggccaggctagtggctcttcatacagttcatttcatctaccacctcccttcttctaaggtagggagtctgtgatctctttctgtgtgtattggtcagaatagaatccattcagctgtagcagcaagcaatccccaacctttcactgcaatgacctttcaatgcaataaaagcttatagtcc

SEQ ID NO: 56827 - DNA, 1229 bp, Homo sapiens
ggggtcggggtttgggtggacaagctttcctcgtcctctcccgacagagctgacgtgtcctgggttccaccgggagcgggcatttccaccggacgggagggttcggggtgtccggggctggggaatacgtaggggttgccgcgcggtgtggggagttggggcgtgtggctgcagtcccgggagttcttggagggggtcggcccaccgagcttccggaccggctgaatctgcccgtagcttgccggaaggaaggcggagcctgactctccggtcccttctcccatcccctccagtggtgggtacgggcacctcgctggcgctctcctccctcctgtccctgctgctctttgctgggatgcagatgtacagccgtcagctggcctccaccgagtggctcaccatccagggcggcctgcttggttcgggtctcttcgtgttctcgctcactgccttcaataatctggagaatcttgtctttggcaaaggattccaagcaaagatcttccctgagattctcctgtgcctcctgttggctctctttgcatctggcctcatccaccgagtctgtgtcaccacctgcttcatcttctccatggttggtctgtactacatcaacaagatctcctccaccctgtaccaggcagcagctccagtcctcacaccagccaaggtcacaggcaagagcaagaagagaaactgaccctgaatgttcaataaagaatcaactttattgaacattcagggtcagtttctcttcttgctcttgcctgtgaccttggctggtgtgaggactggagctgctgcctggtacagggtggaggagatcttgttgatgtagtacagaccaaccatggagaagatgaagataccaggtggtgacacagactcggtggatgaggccagatgcaaagagagccaacaggaggcacaggagaatctcagggaagatctttgcttggaatcctttgccaaagacaagattctccagattattgaaggcagtgagcgagaacacgaagagacccgaaccaagcaggccgccctggatggtgagccactcggtggaggccagctgacggctgtacatctgcatcccagcaaagagcagcagggacaggagggaggagagcgccagcgaggtgcccgtacccaccaccatcatgccccgcccgtgagtccaaccggcgcctctggccaagaaaggcgagctgaaccgggtgcggttagcc

SEQ ID NO: 56828 - DNA, 1938 bp, Homo sapiens
cgggctgtcagagttggtctgttactcggtggtggcggagtctacggaagccgttttcgcttcacttttcctggctgtagagccgctttccccctggcgggtgagagtgcagagacgaaggtgcgagatgagcactatgttcgcggacactctcctcatcgtttttatctctgtgtgcacggctctgctcgcagaggggcataacctgggtcctggtttacaggacagacaagtacaagagactgaaggcagaagtggaaaaacagagtaaaaaattggaaaaggaagaaggaaacaataacagagtcagctggtcgacaacagaaaaagaaaatagagagacaagaagagaaacttgaagaataacaacagagatctatcaatggttcgaatgaaatccatgtttgctattggcttttgttttactgccctaatgggaatgttcaattccatatttgatggtagagtggtggccaaagcttccttttacccctctttcttacatccaaggactgtctcatcgaaatctgctggggagatgacacccacagactgttccttcattttcctgtatattctctgtactatgtcgattcgacagaacattcagaagattctcggccttgcccccttcaacgggcccgccacccaagcaggcaggtggatttctgggccccaccacctccttctgggaaggtcctcttgaactcaagaactctttattttctatcattctttctagacacacacacatcagactggcaactgttttgtagcaagagccataggtagccttactacttgggcctctttctagttttgaattatttctaagccttttgggtatgattagagtgaaaatggcagccagcaaacttgatagtgcttttggtcctagatgatttttatcaaataagtggattgattagttaagttcaggtaatgtttatgtaatgaaaaacaaatagcatccttcttgtttcatttacataagtattttctgtgggaccgactctcaaggcactgtgtatgccctgcaagttggctgtctatgagcatttagagatttagaagaaaaatttagtttgtttaacccttgtaactgtttgttttgttgttgtttttttttcaagccaaatacatgacataagatcaataaagaggccaaatttttagctgttttatgtacaaggagagatctgtttcattttgttttgccgtatttctagatataagttttagcatgggccaggaaggactaaaataaaagtttttaaggtactgtactttttgccatacttgactcatatactcaaaatacagagttgtcttggtgtaggaattggaaagcaagagtggaaaggaacgtaataactcgttggagtttaaaaatgagggtcttggcaagtaacactgatgtctgaaaaaaaattaaatataaataaataaataaaaatgagggtcctcagctgttctcttcatatcctattacagtctctcagattcttgtgggggcactcttagatctcccttggagacaaggttatagttatatgttgttaatctcgcagagcttccttttagtcacaatagccttcattttctgccatgccccttcataagggagaaggatgtttgtaccatgatcctccccgcataatctatggaattaggagtcctgtgtggagtcttatcaataaatatgcacattcatcaaatgtctacttaaatgtgagtattctaccagtgagaaaaaacacataattttcaaggtaatcattgttaaaccaacagcaaacttctttcttatcagcaccataaagtccagaagacagtagaaaagtatcttcaaagtgctgaggaaaataagtatcaacttagaattttatgtacaatattggaggcaaaataaagacatgtttagacataaaaaaaaaa

SEQ ID NO: 56829 - DNA, 945 bp, Homo sapiens
ttttttttattttaaagtgtttatttttttctataatacatttcattcaaatcataaaagtctgatacatttttttctcaagaacaacttacactcatttgagatgctttttctttcctttaatcttataggatggacaaagatacactttaatggacaaaaaacaccagagttcattacaaatacagcttcccaggccccacctccagcacttctgactgagcgtctgggacgcatcctaggatcgcaaaactgtaaaattcccccagtcaactccacggcaggcaggcctggaaccacccttagtggaacactgcttaggacttgtctgttatctaccagaagcaatttcagaaaatcaggagtaattacgtatacagaaatagctcttctataaaatttccatataaaaataatggcatttatttacaaagtctgagatactacaaaataatatatcatattaggttgtgtacttcaatctaataaaggaaagtctacattgggcaagtcagatgtggtggttgcattttcctcttatctctcttgtttaaattgcttaaagcatgtggcaccacgatgtatccttcatgcagaaaaaaggagaactatattttctggaaataaaacccaatagcacatagtcagagtaaagcattttcagatgaaaaggtgaacaacctagtggtttgggctcatggccctttacccaccttttttttttgagatggaatctcgaggggaaaaaaaatattatgcaaacatcaggtttttctcttcttagtaaccatgtttggcttgagtggaaatttaatcaaacactgttatcaactgggaatttgagggcagggaggcacattgctgagggtcattcaaatggcatggtgcaggctcctgatacatagtgtgggtctttgggaaatgcatattagttttcatcagtgc

SEQ ID NO: 56830 - DNA, 920 bp, Homo sapiens
aggataaccgctttttttaaggtaaaggtgtagctaccccagatcagaccgcaattggcgacatgcaagcatgttggccaccaaagaaaaaccggggtttttcgaccaaacacccgtttaccggaaggcccttgcttgggcaattagaagatctgggcttgtataccagtgaaagggttctaagataagtcgacccagttccagtacgctttaacgacgcagtcaagtaaataccttactaagggatagctgcgccgttaataaagacctttttctttttcttctacttctctgagggatttattggttcctgtgaaatctgtgaaggccacaaacactccatagccagagaatgacaacatacgattttcttttcagtcttgtagtatccacagtagtgatgtctgtccatgtacaagtgtctgtccagaacacccattaaattccatgcctgctctgtgtgtcacggggaaagggacagagacagaagacagattcactggtggtactttcaaacaacgcggtaggccttccctttggggtctgccatgacaacgataccccaggtggcaatgccttgattctcactgaggccgatgaccatctgcgtaattggtccatggactcggggggtatcccatcttcatgggcttccgtgccacccagtacacgtacccgcccgcccccatcagccccaacccagaaagcacgcgacagctccagcaggtcttcaaaaggcggtgttctgctggggaggtcggcgctccgggtgtagctgggggcgcaggtttggcgggcgcggcggcggtaccgggaggcgcagtgatataggactcaaaaggctgggacaaccgagaccccatgctctggaactcggcctcaaccttgggcgtctttggttcaaactgcgtaaacgactg

SEQ ID NO: 56831 - DNA, 2519 bp, Homo sapiens
  misc_feature (1)...(2519): n = a,t,c or g
tggagtttcccggaggaaatgacaattacctgacgatcacagggccttcgcaccccttcctgtcaggggccgagacattccatacaccaagcttgggtgatgaggaatttgaaatcccacctatctccttggattctgatccctcattggctgtctcagatgtggttggccactttgatgacctggcagacccttcctcttcacaggatggcagtttttcagcccagtatggggtccagacattggacatgcctgtgggcatgacccatggcttgatggagcagggcggggggctcctgagtgggggcttgaccatggacttggaccactctataggaactcagtatagtgccaacccacctgttacaattgatgtaccaatgacagacatgacatctggcttgatgggggcatagccagttgaccaccattgatcagtcagaactgagttcccagctgggtttgagcctagggggtggcaccatcctgccacctgcccagtcacctgaagatcgtctttcaaccaccccttcacctactagttcacttcacgaggatggtgttgaggatttccggaggcaacttcccagccagaagacagtcgtggtggaagcagggaaaaagcagaaggccccaaagaagagaaaaaagaaagatcctaatgaacctcagaaaccagtttcagcatatgctttattctttcgtgatacacaggctgccatcaagggacagaancctaatgccacttttngtgaggtttcaaaaattgtggcctccatgtgggatagtcttggagaggagcaaaaacaggtatataagaggaaaactgaggctgccaagaaagagtatctgaaggcactggctgcttacaaagacaaccaggagtgtcaggccactgtggaaacagtggaattggatccagcaccaccatcacaaactccttctccacctcctatggctactgttgacccagcatctccaggcaccagcttcaatagagccccctgccctgtccccatccattgttgttaactccaccctttcatcctatgtggcaaaccaggcatcttctggagctgggggtcagcccaatatcaccaagttgattattaccaaacaaatgttgccctcttctattactatgtctcaaggagggatggttactgttatcccagccacagtggtgacctcccgagggctccaactaggccaaaccagtacagctactatccagcccagtcaacaagcccagattgtcactcggtcagtgttgcaggcagcagcagctgctgctgctgctgcttctatgcaactgcctccaccccgactacagccccctccattacaacagatgccacagcccccgactcagcagcaagttaccattctgcagcagcctcctccactccaggccatgcaacagcctccacctcagaaagttcgaatcaatttacagcaacagcctcctcctctgcagatcaagagtgtgcctctacccactttgaaaatgcagactaccttagtcccaccaactgtggaaagtagtcctgagcggcctatgaacaacagccctgaggcccatacagtggaggcaccttctcctgagactatctgtgagatgatcacagatgtagttcctgaggttgagtctccttctcagatggatgttgaattggtgagtgggtctcctgtggcactctcaccccagcctcgatgtgtgaggtctggttgtgagaaccctcccattgtgagtaaggactgggacaatgaatactgcagcaatgagtgtgtggtgaagcactgcagggatgtattcttggcctgggtagcctctagaaattccaaacacagtggtgtttgtgaaatagtccttcctgttctcccaagccagtgaagagttatctgctgggaaagtgtcccaagagcctgtttttgaaacacaagctgggcttctggtagtgcctcatcacaacccatgatggctgttcatgtttcaccccttttcttccttcagcagaggccaggctatggagcagggccactgaatttgctgtaatcctggagatgctttttactttcaaccataagcggtaatagcagaggaaagggtgaagggagtctgggcaagcaaagcatagagatggtggggtggtggtggggttgaagaaacttgttggtataattgtcataggacttgcctaaaatattattaaaattacgggagtgtactcagctttgagcctaggagaaaatgccactgtgtgcatccattttaaagggttccctcataaaaaaatgttattccccattatcacatcagtacactgctttgaaaacaaaacttttcaacatgggcatactgggctacatggaaaatgacatcacccaggagtgatttctctttatatatattatttctgcaggtaccatccttatctgagttatcacagttcatgaatctaagaggcggaactctacatcattagtaagaggtccccaaagtctaaagttgtattcct

SEQ ID NO: 56832 - DNA, 1735 bp, Homo sapiens
  misc_feature (1)...(1735): n = a,t,c or g
gaagatcaaaaacaggcttgttttatttatacacagaacaacttatgtacagcactcaggtatggactatgtacataacaatacaagaggcgtttgtttccacggtggtcactatataaacaaaaaaaaaatggcggccgcattntttttttttttctttttaaagttttattaaagtttaatggtacaatattttatctctttttttgttaatgccagtacaaaaatacagttgatgacttgacaaaatggctacacctagggcttgaaggtttgagtttctccaacagtaacaagggaaagcatgcttccacctggagccgagtccaagcacacagccagtcctgcacacgcatgcgtgcaaacagggaagctcaagcatgagaagaggaaagaggctgtagaaatttgggaagaagcccacaattattcccaggagaaaaaagggaaaaaacaggctgatatccttggtagggggtagaataactgatttacacttaggatttattgttattgttgttgttgttgttttttaatgataagctacttctgcaattttaacgttgtagaaaagatgctactagtctcctttcaccactaaggtgagtaaagtgggaggaaatgggaaaagactcaaatacttaagtgcgaggagtaaacatccaagtggctcaagttttgtgtcagaaggtttcattctttacattcaatgacaagttgacatttaggtgagagggaaaaggagaagaaagtctgccactctccgctggatccacaaacatgcagaccagcttctgttagcagaactcttccacagtgagagcgctccttccagtgtaggtaggaatgaggtttcctggtcggcttaattgttctagatgattcctcaatattcccttccctgctgctttccttccagaacactaactctgatgaaagaaggggcacattcatgttacaattcatcttcaagatgtttctttctgaaggcatcacccgtcagcctttcctgagcttccttcatcccctgaacaacttgctcggcactgacataaaaatacttgtagctggggtttccattctcattgatgatttcaggatgcaccttgccactgggatccagaaaaaggattcgtggaatataacccccgtcagggctgaaatcttcatctttgggttcctcttcatcctcaagatttaccataacaaaattatgggagagttctgaaatttccgtagattctgcaaatttgggctttagagctttgcaagctccacaccaggatttatgaataatcaccatcaggggcagtccactggcagctgcttctttcttcccatcttccagtgtcctccaatgaatatgatctccaaaaccctttccaagcccattatgtccatcagaagagatgacgaggagcaggaaactgaagcccagcaaacaggtggccccgagacgaggccgcgtctccatggcagtaggtgcgcggggccaccggggctgagcggacgcagggccggagtcccagcagacggtccacacagttcgccgagcgccgctcagcacaacacctctacttcccagatttttttttttcaaactctgaaggaagtgatgttagacggatgtgggtggtgcctccggggtccggtttgggatggagtgagcttaaaggtgcagatcacgtagaagggtacgagagctgttctcgagcgcgagttgcttttcgtggat

SEQ ID NO: 56833 - DNA, 1676 bp, Homo sapiens
tttttttttttggttcttgaatatgtattttttactgaaaaaatcattcataaattaacatacaaaaatgtacaaacacatgagtaaataatgtaatgacaaaggactatttttgtgaaaagtgttttttaaaacatctttagatttcagtgcaaaaatgtacccctggcacctcttaaaacgtaagagcaagctcaaaaacacgtagtgatggaaataagctaggctacgctcaatgccatcgtcaatggtgagtggatacaatcaatccatgtggctcctgctcagctattaatgtctgtggtagaggatctctgacaagaggacctattatgtcaaaatgagtattcttgcaaatacccccccaccccccaaaacagcatgaacaaacggggacacctttccctgcacacagcaatcaaagacaagattaaggggccacccatcagtagccttgaagattttcagctaccaatatatgcacaaggtcacatttggttcctgttttgtttttttttttaacatgacaatttcacactattaacagcacacgggcctggctgtacgtttttaactatgacatttcccatatgatattcgaggcctggtggacacatgactgacagtgcacatccagagattctacactcatcagacacagacatgaccgcaaaggtatcaaagtgaccccactttaagcagtgaaaaaagacctttccttttgttctcaaatcagcattttctaaagtcaggtgttagccttttgcccaacagtgtgtacttgatggtaattatggcaacatagagcttcaaacaagatcgcctgacaacactgccgcatacacatacggcacccaggactcagaatcagtctgtcctggcaaatccttccaaatgacatcatagtgttgtcacattgaaagcaactcacagccttcagtgaggaaaggggagaggagaatgagaaggggagaaaagccaaggcagggacaaaggcccggtgggggatgggggttgcagggtggaggggggtctttattgctatatgcaccataaaacaaaggaaaaccaaatgaacttctgtgtgtaatgttcacttgtgaaggtattttaaagcatgaaatgcttaagtcttaaaaaacatatgctatagcttaccggcattttcaagggcaggaacctgctctctcatatgagccgataagagctttgcaatgcaatttattttctaaataccactctattcttcaaaagaacaaaaacacaaacaaacaaacaaacaaaacaaggcctggccaatcactcccacagtttgtggggatcatatgtccacagaaccatcacatgcaacgaaaaaagccctaacccacacacatacacacacacacccctacacacacccatgtaaactatgaaaatcaaggaagttgaaggcaaacaaggcaattaaaaaaaaatacgaagtactcttcagaaagtactcctcatcacaatatataaatatgttttatggaaaacaagggcgggggaggaaaactggcattttccagaattctgcagaagccgacagagactacaatttgagggctttggtttggggaaaaacaaagaggcacaaattcaaatacaatttagaacatgacttcaaggctgggcgcaatggctcacacccgccc

SEQ ID NO: 56834 - DNA, 466 bp, Homo sapiens; identical to SEQ ID NO: 22233

SEQ ID NO: 56835 - DNA, 1944 bp, Homo sapiens
atttttttcaaatgacacaattcagctttatttttacttaattataacaatttttaaaaactccatgactttgtgctatttctaatatttaaataaaaaacatttcaaattttgcacaaataatttaggccaatacataactagatttgaataaagtcagatgaagcaataattcctcctctgtgtttgaaaggaatgagtgtggttacaaagtcacaggatgagtccctgggatctggggtgggagaaggggtggatcaagaatgacttgggcttgtcactccctagcaggctgagggcgtgacacagcagctcggtggcggagaggtctattctagtttctaacactccaatgctaactttttggatgtatttccttctagcatgtagaaagggcttttcttggctgccaggaagtagggagcagggatgtggcatggtgatgatctgaggacagccaggcatatgctcagacactttggaaaactgggggaaggggaagcagggagacagaatcttcatcttcttccttttgtgaactggggaggagggtgcttggtgacattttcctgagtataaagaaggaatacaggtttgaaaggtttgtaattgtatatgaaaacaggtattgaaaaccaatactgggggaaaaaaggcattgtaaacacttctatttaaaatgaagatttctggaacaactatactatatagtggtatcacaagtctttagctggcaagatctagcactgaaacaactcttaatttttaacttgtgagggttctttttaaagcaccacttaagacctatatattaaaaaaattaaatatagaaagattgttctatctaataaatgagtttgagaatgcacaggaaacaacaaaacccatttttaacctctggtaactgaagtggagcattaaattcaaagccactttgaggatttcctacattgttcacctaagggaaaacaaatgcagagctatcaaagagcttctcgataaattcccagaccttggagggctacagcttttcataaatatggtcactggactgatgatttctaaattttaaatgtaatacccccaaaaagtaaaatataggatttataagtattttatttttctgagaaatgaccaaaaaattggaaccagttttaacaatctctgaaaactttaaattctagacatgtttattttgaaacacacttccaaacaagataaacaacaatatgtaagtctactacactgcagaagtagcttaaacttgccaagacatcctcctttgcacttgtttcctcaagagttgctaggtcattttttttgcctgtggccagcagcctctttaaaaacaacaaaggacctaatgtcaaagtcactctcaggtgtttgccctgccagctcaggccttctccgcacaccgcaccccgaaggagcacggaggcccgcagggctggctggccctggttccagcctcaccgccggttggaccgcttttcgtacttgtcctggctgctccgctttcgtggcggggagtaactggcggaacctcgagcgcggaaagctgtgcttgtaaggatggcttctgtgtttcttcgggttttcttctttctgggcctggctcttcgctggttccttatcgccctctttttgttcatggtcttgctctttatgagagggcaatgtgtttttaattgtgttaattagaaatcttttattggtgctagcaagaggacacttcatccaacccatgggtcccattgtttcagctctagttttcccacgttttgcctccttaagcagttcttctattgctttcctctccagctcctgatcctcttccatcgctggggcggtttctggatcctcaggtggtgctggcggatcgggggctctgtcccatagcgcgaggcgcggaggcgaagcaggaagcaaggaccgaccgac

SEQ ID NO: 56836 - DNA, 459 bp, Homo sapiens
  misc_feature (1)...(459): n = a,t,c or g
cnttnatgacccgattacgaatttaatacgactcactatagggaatttggccctcgaggccaagaattcggcacgaggcagtatattcattttgcttgatgaattactttcccctggctccttttaatcagcttctgcaaaaagacatcatcagtgagctgctgacatcagatgacatgaagaatgcttacaagctgcatactttggatacttgtctaaaacttgatgatactgtctatctgagggacatagccttgtcactcccacagctgccgcgggagctgccatcgtcacatacaaatgcaaaggtggcagaggtgctgagcagccttctgggaggtgaaggacacttctcaaaggatgtgcacttgccacacaattatcatattgattttgaaatcagaatggacactaacaggaatcaagtgctaccactttctgatgtggatacaacttctg

SEQ ID NO: 56837 - DNA, 673 bp, Homo sapiens
gaccggcccacgcttcccgccagtcccctaaccctgaggctgccgcgcggcggtcactgcgccggggtagtgggccccagtgttgcgctctctggccgttccttacactctgcttcaggctccagtgcaggggcgtagtgggatatggccaactcgggctgcaaggacgtcacgggtccagatgaggagagttttctgtactttgcctacggcagcaacctgctgacagagaggatccacctccgaaacccctcggcggcgttcttctgtgtggcccgcctgcaggattttaagcttgactttggcaattcccaagggcaaaacaagtcaaacttggcatggagggatagccaccatttttcagagtcctggcgatgaagtgtggggagtagtatggaaaatgaacaaaagcaatttaaattctctggatgagcaagaaggggttaaaagtggaatgtatgttgtaatagaagttaaagttgcaactcaagaaggaaaagaaataacctgtcgaagttatctgatgacaaattacgaaagtgctcccccatccccacagtataaaaagattatttgcatgggtgcaaaagaaaatggtttgccgctggagtatcaagagaagttaaaagcaatagaaccaaatgactatacaggaaaggtctcagaagaaatt

SEQ ID NO: 56838 - DNA, 980 bp, Homo sapiens
gttaagtaaagtcaattcacagaagcacaattttgccctttgcgagacattgttgcctctatctagtcctacaagtagggttttgcatactgtgtttgcccctagggttgtcagtgcatcagaaatacttctaaatagtggtaaaaatgcacatggttaatgcacatgttacttttaaatcattaggatatccctcacctgttcctgatgaataaaaagtgtgttaaagaccaaaattcttggcataataatcagctacatacaaatcacatatagtttaatcttttttaatgaaaaaaaatcatgtttaaaatgggcaaaagcccatcttatacacttttatatagctgcaaaaaatttgtatctgtacagatctaacactacgacactcagtattcattttattgaagcatgcaagtaaagcactttttctaatttatatagaggtatctaattaacacagcacattgtactaatgactaggagtagcagctttttcttctctccctcctatgaattcttataatgtcccctttttcctgtaagtttttgagaggcaattggcaatttaaggaggcagcagggtctgttttggtcaaatcttgaatttccgttggttgcactctagtgactgatctttgggaatgtcttgtctttgcatggggctcatagagatgtgtgcagacttgcttattgtggttagtgtgtatcaggaacacacacacaggtgttctgaccagctcaggcttgccacagtgagcaactctgtggctagcaaaagagaagtttatttgtgcccagccaaggtggaacaccctaacattatgcccctcctgatgtgacttaagaattttacctatttagttttcttgcacaaagtgttaaactggaatttaatcatgaggaaattattagacaaatcctgaatgtagtcattctataagatgattgacttgggcttctcaaaaagtcagtgtcat

SEQ ID NO: 56839 - DNA, 1539 bp, Homo sapiens
aggaagctagggttagaggcaaccgtgagctagaacccgaacgtggtcggttggagcaatatgtccctccggaggcacattgggaaccctgagtatctgatgaaaaggataccacagaacccaagataccagcatatcaaatcaagactggacactggtaacagtatgactaaatatactgagaagctcgaagagattaagaaaaattatagatacaaaaaagatgagcttttcaagagactaaaagttacaacttttgcccagctgatcatccaagttgcttccctctctgatcaaacactggaagtgacagctgaggagattcaaaggctggaagacaatgattctgcagcttcagaccctgatgctgaaaccactggcaggaccaatgggaaaggaaatccaggtgagcagtcgccgagccctgagcagttcataaacaacgcaggagcaggggactccagccgctcaactcttcagagtgtcatcagtggtgttggggaactggatctagacaaagggccagtgaagaaagcagagccccataccaaagacaaaccttatcctgactgccccttcctgctgctagatgtgccgtgatagagattcttaccagcagtgccacattgttggagcttacagttacccaattgcaactctgtctagaacaatgaacccttattcaaatgatattcttgaatataaaaatgcccatggaagatcatcattctgtatgacgatgatgaaaggctggccagtcaggcggccaccaccatgtgcgagcgtgatttgaaaacctcttcatgctttccggaggcctaaaagctcctagctcagaaacttcccggaagggactgattacctgggttccctgccagcatcttggccagcagggcccttcctcctgggtctgccccggaaacgatccagccacaaatggccacccctaccagctgcgaataaacggagatttaccccagaagacttaaaaaagatagaatattatctggaagaggagcaagggcctgcagatcatcctagccgactgaaccaagctaaactctccggaagagagtccaaggtgcctggtgcccgaagcgctcagaatctgccaggtggcggccccgccagccactcaaacccccgctccctcagcagtggtcacctgcaaggcaaaccctggaagtaaagactttgtctcacttaggcaaataaatgttcttcctcttttcagaacccctgagcatttcccaagttgggtcatttccagaaacttctgcagaggaaagaccatgacatatgtatgggataggcctcttccctgtccctgtctccagttcctctcccctcaggaggccacctcaggaaggattttgacaggtgaccataaaaaccagaggtgtgacaggctctagtctcctccctgttgtttacagcatatttaagtcttgtgaactgtataggaaaaaagtatctacgtttttagtttttttgttttgtttttttttaataaggtccagcttgttgggtctctctgtg

SEQ ID NO: 56840 - DNA, 1617 bp, Homo sapiens
  misc_feature (1)...(1617): n = a,t,c or g
gagcgagagtccatctcaaaaaaaaaacaactatttttcacataatcaaactcaccttgtctcatgacttttggttaagggggttttcccatagtttatttttctctcagtgcatcttgctatgaggtttgcttgttacccttttggtttttgaattgttgattttgttcacaacctcttttaaatctaacaagtcctgttctgtttagtgaaggcccaaagactcctctaagactttgtatatttgttacataaaaccaagttttactaaatactttaaaatttgtcctacattcgaaaaatagaaattgtaaatcagaggttatctgtctgcattttaaactgccaaattaccttatagtaagtttctattttatgactttgggccaagaattaagtattttcctaaggcacaaatctttttctatattctcattttaatatcttatgctattattctgtaaacattttaattttagtttcatgagtctttatttttttgttacctgcaagttatgttcttcttcattgaatttcatatttgagagacatttgtcttcatgaagcagatttgcactggaaccattgctttactctggttggaaatgccattgttttggggacagacttttaaaatgcccttgtgtctcccagtgaggagccctaagcattgacttctctaccctaaaactgtttgagagagggagagtgggccctggctttctcaagcatgggtcgggggttcagcggggcctctgtcttttgtggtgacccctcaggggtttcattgtttccttctgacttaagcaatagagagagaatttgttttggtactcttcagaggaattgtgctttggctcataacttggccatgttctccatgaattagttctcctatttttttttttaactaccttaaacttaagggaaaagttctcctatcttgatttcactggaatataggctttaggagctctgtaaggctggtatttttgtctgttttatcttctactgtatcgccagtgcctggaacagtgtctggtgcacataataggtgctcaataaaaatgtgttcaatggatgaatttctaaaatatcctccaatgtgtgcatggaacaaataatcaaaagaaccagactgtgtcttattctcccactgacagaaagattttcctgctttcaggaaacaagctttatgtggcccttttctggtcccctggcttagactacagttctgtgtggatttgtctgattgcttcagacatgtaatgttgtttttcatccttggcagcttacatcagttgtttgtttgattagaaaaatgaagnnnnnnnnnnnnnnnnnnnnnnnnnnnnnnnnnnnnnnnnnnnnnnnnnnnnncctatgccaataaaaatgtctcagcaacagtgggattcaccttggtgtttctctctgtaatttgtgtggggtttacccttcacaggtttaaggagaccngggtcttgtttctctctctgtgctaccaggaaggtgtgnaacctgagggtggcatcttgttttcataaggngggagggcaggtgaatatgtnggttttttacggggtctttttgaaataacggggtgccctcaggtta

SEQ ID NO: 56841 - DNA, 1562 bp, Homo sapiens
gtgaagaacagctcattgtgccccagtgatgaagttgctggacacatctctttgcaggtagcagcaacagttgtagcagcagcagacgaagccattgcagaggcagaatatgctgagtgtctggagtcagcctgaagacacagggtggattatttcctggcctccacaccaaacgttcccttgcagatggagactgaatctgagggcagcagacttttatcagcttgagtttatgtcatttgatggacttggttcaacaacaagaacttacttaaaacaatgtactgtggtgatgagtcccaggggcactggtcagcctgtggagccctggatgctatccacacccacctatccctgcagctaatttagctgatctctaatttaactgagctctaatttagctgatcagattttgcttgggtaaagttcctttttaatgttctaaagtgtttacggttctcaaatatcagttaaaaactaattttaggtggccataaacataaaatagaaaccctgtaagttacagaagaccctaaattgtatcaaaaccctagagacaacttttcaatttgatccaaatttgaactggccaaccagtctttaaaacactggactagaagagataatgattgaaacatttaaaaaaaaaaagtgctccattcgcaggagcttttcctgtcctgtggttttccagttggtgaccaccatgggaggtcgctggctcggctcactcccttctcccacccttgagaatgtggagaactcccatggagaggcagaatggcaggaggtttcatgtcccgcgttgcatctcctcctgaaagaaaagcagtgatacctgaataatgctggctctccgattgatcctgtgaggatgaatttgcatttccagaatccttgagcatggattagatgtttcctgggaggtgccttgagtaccattatgtgcaagctacataattaaaacatttttcttagtttccctgggaagcttttcttgactcacagcccaggttcttctgcccaacacaaaaggagtgagttggggtctttagtctcttcttattgggtagctcttgctttaatattctgtttggtgagtgtaagggattctgcaagggacagggggcctgactacccagtctttgacttgtatcctctcccctcttcatacactcctgctgaaaaatgttaatccaaatacacatttaaacttagggtcggtccttattctgatttgagtattttaatgtctcagtgtgctgatttggtagttggaagaattattcttctggaggtctgttagactacatcctacactgacttcagaaaacagtctgtcagacaaaaaggccttatgtcaccactggtacctcagtttcctcatcccatttacagtttttctaactccagggtagtgtttagtgttaatatttgggatatattttttttcaaaactgtttttaagtagtttgtaatttgtaacaaacttgtaacctggttgggactgatattgtcatagctatgataaactttggatattagcagaaaaaaaaaaaaaa

SEQ ID NO: 56842 - DNA, 2017 bp, Homo sapiens
ggacggtttgtgacccccttagccgaccctactcctcactggccgggacaactggtcttatcacggaggctggggccaggcagcccttcggttcgggtgggcccatggaccccagtccaacgccgagggaataggaccatccaaaagcggaaccttcgcctcagaaaaagggtgcgggacccctcctcaccgtgcggtcacgcgtggaccctgccagcagccaggccatggagctctctgatgtcaccctcattgagggtgtgggtaatgaggtgatggtggtggcaggtgtggtggtgctgattctagccttggtcctagcttggctctctacctacgtagcagacagcggtagcaaccagctcctgggcgctattgtgtcagcaggcgacacatccgtcctccacctggggcatgtggaccacctggtggcaggccaaggcaaccccgagccaactgaactcccccatccatcagagggtaatgatgagaaggctgaagaggcgggtgaaggtcggggagactccactggggaggctggagctgggggtggtgttgagcccagccttgagcatctccttgacatccaaggcctgcccaaaagacaagcaggtgcaggcagcagcagtccagaggcccccctgagatctgaggatagcacctgcctccctcccagccctggcctcatcactgtgcggctcaaattcctcaatgataccgaggagctggctgtggctaggccagaggataccgtgggtgccctgaagagcaaatacttccctggacaagaaagccagatgaaactgatctaccagggccgcctgctacaagacccagcccgcacactgcgttctctgaacattaccgacaactgtgtgattcactgccaccgctcacccccagggtcagctgttccaggcccctcagcctccttggccccctcggccactgagccacccagccttggtgtcaatgtgggcagcctcatggtgcctgtctttgtggtgctgttgggtgtggtctggtacttccgaatcaattaccgccaattcttcacaggcacctgccactgtctccctggtgggagtcaccgtcttcttcagcttcctagtatttgggatgtatggacgataaggacataggaagaaaatgaaaggcatggtctttctcctttatggcctccccacttttcctgggccagagctgggcccaagggccggggagggaggggtggaaaggatgtgatggaaatctcctccataggacacaggaggcaagtatgcggcctccccttctcatccacaggagtacagatgtccctcccgtgcgagcacaactcaggtagaaatgaggatgtcatcttccttcacttttagggtcctctgaaggagttcaaagctgctggccaagctcagtggggagcctgggctcctgagattccctcccacctgtggttctgactcttcccagtgtcctgcatgtctgcccccagcacccagggctgcctgcaagggcagctcagcatggccccagcacaactccgtagggagcctggagtatccttccatttctcagccaaatactcatcttttgagactgaaatcacactggcgggaatgaagattgtgccagccttctcttatgggcacctagccgccttcaccttcttcctctaccccttagcaggaatagggtgtcctcccttctttcaaagcactttgcttgcattttattttatttttttaagagtccttcatagagctcagtcaggaaggggatggggcacccaagccaagcccccagcattgggagcggccaggccacagctgctgctcccgtagtcctcaggctgtaagcaagagacagcactggcccttggccagcgtcctaccctgcccaactccaaggactgggtatggattgctgggccctaggctcttgcttctggggctattggagggtcagtgtctgtgactgaataaagttccattttgtggtcctgcaaaaaaaaaaaaaa

SEQ ID NO: 56843 - DNA, 767 bp, Homo sapiens
ttttttttttctccgagtttttgcattttaaaatttatttaaagtcttggttgttcaggtcctaggggttccaagtccccagtcaccttgaggactcagacatcaggaattcagtccccagcccagagatcaacgaaagaaagacaacttttcttggagccaggcctcagtgaggtcatcagtggtgcggatttcgaacacctttgtgagctctgctgtctgcaccagcctgtttttactccctgcatacatcatctgttgttccggcttgcagcccacagggctggagaagatgaaacacaaagggtaggacactcggccatcgtcatgcacgtacttgtagctgtaaaccacgaacctgggctgtctctccggcaactccattttgagctcctctggggaaatgttctgaaattcttcctccagcaccaccatctgccggtctttgtccaccttcattatgatggctgcattgtctgtctcttttcggaagcggaatttcctcagcttttcttttagctctgggtctacatcgcacaccaccagggagtcagacatgattgttctgtccacaggcctcttcttttcttagttccgctgtcttctaggcgtggggaccggggctgtaggggggcgggctgtgcagtaggagcaaggtttcatccaacaccacatcctgtttatgccctttcctcgtgccgaattcttggcctcgagggccaaattccctatagtgagtcgtattaaattcgtaatcatgtcatagc

SEQ ID NO: 56844 - DNA, 1720 bp, Homo sapiens
cggacgcgtgggttacttattagcagagctctttgtagaccttccacatctggctgtcagatcttaaggttgtgaatttaggctccagttatattcactggagagcataatcccacacgggttatttataaatacagagcctctgattggacggtctcctgccaagaactagtaatacccttgttttaaaatcttcacaaggtaaaacttaaaaagccaaccaaacaaattgctctccattctacttttaattgggccaaacagcatatgctacagtagtaacatgtttttcggagagtgtaaaaaactctgtttacatttgcctcctccgtgggttgatcgaaaatgtataaaactgactgcttctcgccagcctcagacaagaagagtgagttgctggtactcgctactcttttacttcttttgtaaagtattgactcttgggaaggctacagtatacaaagtctcaacatgttttttaaaagaaataaggagcaagcgactggccctggctagaaatcacaaaccgatttttgtagaatattttgtgccccaggcattaatttcactgactccagaacctgcagttcagagaatgatttcttatgatgataaaaatcgaatgggatcagacgatgtttgcatttttttaatacttgaataggacacctcaagtttgagatttcattttcttttagaacacagtcacaagattaatcctggtgaatcccttttgtcacagttctccgtgtgtgtgtgcgcgtctcccgtgtgtgtgtgtgtgcatgtgtgtaaaactggaatggtcccatttaaattgccttttggaccattgaataagttgggaagtaagaattttttaattggcatgagacggttcctcaactgttaaattaaccaactttgacctgtctttagaaaaaggcttatttgtatgattttgggctaactccccggggggaccatattaaaatggaccaaaaatggctcccttggggtgacacaccctacaaagtatttgctgttacgaacataaacgcccacattcttaatatctaatatttttgaccagtgatgttttatgctgtcatctgaaccctagagaagcagtgtcagaggaaaccttggtgtcacatgtgtcttagcaaaagggttaccatgatcgggggtcatgtgaccaaaagatgctccagagaagcttgagaatttgtttcaagttgggaggagggttggagatacaaaaatcactctgctctacaggactcttcagctgtctatgcaagaaattccgttttctctttcagcacctggaaagacacagcagcccaccgaggcgataggtgattcactaagcacaagaggaatgttttctaagcaaggcgtcccttgcctctcaaacaaatgccctccaagtttgttagggtttctattcctgcaacttgtggtatcaaaaccacttcctggaattgtcaaagcactgccaaaataaatgtttttcccccttctaagaaaaaaaaaatgacagtgctcatatttgacacttgtgtattggactctcttttgaatgaataaaaaggaaaaggggtttggtgtaattcctgatggggtgcgtgttgtttttcatgccatggtttgtgaattttaattgtggtttcccatttcgttgttgtaactgggcagaaattaaaaaagaaaaatcaataaaaatacaaagaaatgg

SEQ ID NO: 56845 - DNA, 909 bp, Homo sapiens
gtgaaccaggatgtgaggggaacacaacagaccatgccgacggagctcccgggcccaggccggggcctcttcccatcgcactctgacccgccgtcgggagtgcccaggcccgggtcgggcctgcctctccgctcgcaccgcactctgacccatcaggagtgtggggaagaccgtcgaccaaaggtgggaaagacaggaaagatactgtactctaagtagtaaatttgttttttgcgtggacgattctgaagctgtattctgagatggaaaaaactagaaatacatcgtggatgatgagagccaggtgtattgagctcctgcttttctaacgtacaaaggtaactggatagagaaacggagtgatcgccctcacctggccagggtgtgctccgagaccccagcaggtgccgaagccgcggatagtcccgaatcctgtccaggcggtgttttttcctgtacgtacctgtgatcaagtctgagatgtgacagcaaaactgacagaacttcgtgcttccctcttcaaaatgtcacagatgggcactgtgttcttaccggagatcttagcaacctcggcatctggctgtttttcttataggtcaggagtttccaccttttcccttaaaggaagcgcttggcagcttctctggtgtgtctgagtcgccagcatcaccactgtcctgttctggggccattcttaagtaaaataaaagcttcttggacccaagcaccacatcaccgcgatggctggtctgatcaccgagatggctgctgagtgcctggcaggcagggtggcgtggatggcccgaaacgctggacggagggagggttgatgtcccagcaggacggctgctcagaacagcacagaatcaaaaactcatgaatggtttatttctggaattttccacttag

SEQ ID NO: 56846 - DNA, 794 bp, Homo sapiens
tttgttgctgtgatattgatagcttttattttctaatttttaaaaaatggtcatattatgagtcaaagagtatcaaatcagtgttggatggaccacccaagggtgaggagaggggctggaagccctgggcattaggagaagggagtgggtgctggcatggacatgactggatagaattttctcaggagggagcttggtggattttgaaggtaaaactttctgggtttatcatgttttaattttagagacagggagtgatgaatcatcaccggttgtccccttatctaactccataaaagtgggaatttcaaaagaacacctcatccaaggagctggggcagacttcattgattctagagagacctgtttcagtgcctactcatccctgccctctggtgccagcctccttaccatcacggcttcactgaggtgtaggtgggtttttcttaaacaggagacagtctctcccctcttacctcaacttcttggggtgggaatcagtgatactggagatggctagttgctgtgttacgggtttgagttacatttggctataaaacaatcttgttgggaaaaatgtgggggagaggacttcttcctacacgcgcattgagacagattccaactggttaatgatattgtttgtaagaaagagattctgttggttgactgcctaaagagaaaggtgggatggccttcagattataccagcttagctagcattactaaccaactgttggaagctctgaaaataaaagatcttgaacccaaaaaaagaaaaaaaaaaaaaaaaa

SEQ ID NO: 56847 - DNA, 542 bp, Homo sapiens
tgattacgaatttaatacgactcactatagggaatttggccctcgaggccaagaattcggcacgaggaactaagaagcaaacctacattcttcttcccaaagtccatgtttctccccctcgccatcctcttcaccaaaaactacattcattgtattcagctcctgcaaagagcacacattaagaaacaggtttaaggaagtgttagacactgaatgtattcgacccccaaaattcatgtgttgaaatcctgactcctaggactaactgttaggaggtagggcctttgggagatgattgggttttgagggtggagcccctcatgaatgggattagtgcccttataaaagaggccctggggagctgtctcccttttccaccatgtgaggacacggcaagaaaatggctgtctacaaagcaggaagcaggccctcaccacacactaatataccagcaccttgaccttgacctccccccatctccagaactgtgaggagtaagtgttgtttaagccacctagtctgtggtatttttgttataatag

SEQ ID NO: 56848 - DNA, 1190 bp, Homo sapiens
tttttcacacaaatcatcggcatttatttcctgggtcctaggtgtcacttatcctggtggacagggcagaggtggtcagatcgttttgagccaaaatcccttccctaaaaatggatctgtggagctccatgagggaacctcagagatgcacaatgacagtttagctaaaatggcttaaaaaatgtgaattgattgtcagctctctccatatctgctgaaaaaaggtttaaaatttttaaaaagtttaaaagtgttttctaaaaaagggacaagcaggtctggacccagaagattgggctggagaggaggtgttggtgttgggacagggtccctgcccgggccgctcgcgagaggagcgttcctgtgtgggctgctcactgtagggcaggccccgcccaagtcccggcgccagctcaataaataacatcttgtggttacagtgtcttgaaagtgtacctgggcacggtgcgaaggtggtgggaatgtgaagcctgtgggtgtgggcagagggctttcccggagtggaaggccacagaagcctctggggagccttctcagtctggcctggtttatctgggacatggagctcagagaagaagctgctgggcccagtgcccagggttccccctctgggaagggaacagaaggtctctcgtccagccttcttggaacaaggtcaagattcaagacgaggtggtcccatcgctgctctggggctggttgccaagcttccttgtctggggcgcttccctccacctgtccttctgccccctcgaagtgccaagctcgcccatgtctccagcccagcttcctcacggctcacagcctctgagtctccctggatgtcagggaccgcattccgacgggcctgtccggtcacaggagatgaagtccgagtaggaggactcgacctccatcatgcctgtcgcatcgctcctcaggcctggtttaatttctttttcctgcttgcatctcttcagattttccactgttgactaatcagtacgggaattaagaccaaagtttcctcaaaatccagtggtcctcagtcagaagcggaggcagaatttaagaaaccaggattcaaggttagcagtccagacctgtggtgcgggcaggattctcactttaccctcctctctgtctcttccccgtgtctcctgcggtctcgccgcctcgtccgtgcctgg

SEQ ID NO: 56849 - DNA, 887 bp, Homo sapiens
aatgaatcataaattttatttcaaaatgtaaacgtcactaaacatgcatacacgttaaaacaataaaatttacaatttcgttaatttttctttttgcataggacatcattacaatatagaatctatgccatacaaaatacatacaaagttttatccgagcaagccaaggccagactgggaactgtacaactgtaatacttcactgtagtgatccaggaaagatgaaacgtggccttcggaattatggtgggtgctggttaaaaaaaagttcctacagaaaagaaaaacatgagctccatggaaatggtcttggacccttggattctgccttgggcttttggcaaatgattccagagaagctccaccaatggctttggatgggaaggggttgcctgtgcgggcctggggcagctgagacccggaagcatgcacccaacacatgcacacaagcaattcccagtcaccaaggaaccaccgaaagccccaaacccgacaatgacaatgcatagttgctcagtagtgcctcctttctgctgaggctttccagccccagaggcctcagcactaggcaccaggggcctctctctaggatgaggccagggagcaaagtctcccactcacacacccagaggcaggcacctggagccggcacagacgctggggctaatgagcccacgtggtgtctagagccacatgggaggtggcctcttgctcctctcagggcagccaggtacaagggctcctctgctgagtgcatggcctggcaggcattcggctcacacacctggtttccaaataagcacgcactgcgacctgtccacgggccctctagaagaggccagggaaaacaggaccctgaggccttaagaaagctgttcccgtgctcc

SEQ ID NO: 56850 - DNA, 1840 bp, Homo sapiens
tactcaggcaatccaaattcactcttaactatatatatatacataaatactatatctctatatggactcgtaaaggcatgggtataatggtaccccccagtaaacttcctaatgatttcttatgactgttatcaggctttattgggattaggctaaagttgttagtaaacttataaaaggctgctatggtaacactaaacctaagtggtctcttgtctattagtttggtttgaattattaagtactatccctgtagacccagagacatagtttatataagaattgctaaagctgaagttcaacttggctgagtgaagataatcataggttgtgtgagcctatgaaaaagtgtatacgtctaagatttcaaaacaatgggtcccaaagcctaaccactttaagagtttatggagggtacttggcattacagacgattcatacacttccagtgctgccttctttacactgccagttttgacaaaacaggtttgttttttattttacaacaacatatgcctaattctgcaggattgcaagtaactttttaatgcattgtgattacttattggtaatgatagggctgatggcagtttactagatcactggttataatttgggacaaaaactgctacatcaactttcatctcgcccagagtgctcaaggctggtatgatcagtggatcaggaatgcaattgtgaattcctgcccattgcctctcttggtgaatgtggaaatggccacctgggttttcccatatcaggaagggctttgggatggcacctatattggctgataattgaggatgcaaacattccattcattagtgtgatcgagctgttaatttttagactatagatcaaaatgtgaaacattttatgttcaatccatatttgtcttgcacattataaatatatttttattttttagtaatttaggggagggaggagggagaaagggataatgatgcccttggcataattcacaaaagcagctgtgacaacctccaatcagtttacttcatttcaaaactatttccaatcacaaggaaagatttatttaaaatatactcgtacatttcacctgtggatgtctataacttcatcctcagtatgttcccaaatctgtgctgggcattgaaaggacaaaacattatactagtgggtttttctactaattattttttgaagcattattttcccaacacaaaagagcttttttctcggtataatgaaaattgaaatcctatgtgtattcaatagtaaatagacaaattttattttttatttccacttgaagagttacatttcgtataaaagtttacaaataacggtttttattttgattttttcagtataaaaaaagttgccttgatggcatattatgatgtaatgctaattgcttgtaggatagtaaatggtcagtattgaaacctaatctctagctgccgtcttgtagatatgaacgaatgttcaccaagcatgtattttgtattttgttgcattgtacactgcaactaataagccaaggaatcgacatatattaggtgcgtgtactgtttctaaaaaccacaaactaagaatgataaattatcaatatagtttagtatttgctaattttactacactcttttgttatgtatatgtagggaagtcatagggattataaattcaatttgagtaaaatttaaaaccatatattttatgataaagggcctttaacttaagatggccaaagcactgatattatatatttgctgtaaagagaattataagagttttatttttctgatattaaaagttacttaataaagacttgtttccattaaaaaaaaaaaaaaaa

SEQ ID NO: 56851 - DNA, 1057 bp, Homo sapiens
acctggtgcccagccagaaaagcatttttaatagaattttgatagctcttaactgagatcctaaatcaaggatttagaaatgaggtatcataaagaatagtaagattttaaagctctcaaaattacatatgatacaaataaagattgtaacagtatttaatcattgtttcaaactttattacttaatgaaacagtttctatatactgcttccaattactttaatccttttttctcgttaaattttttttgttgttcttcagttgagctgagatacttttaattactttttattaactgcttccagaaaccgtaacaggtgcaggaatagattgatgatatccaagtagaggctgatggcagctaatacgtactcttcaggtgacagtttatgcatcagtgagtgtgtgtcatagatgatgaatccacagaaaagaagggctcctgcagcggctaagaccaactccattatctcactataaaaaaaaaacttcaagaatcctgacaggcacaatatccacaaaagagcaaacagccctgctccaaatttgctgaaatccttcttagattgtagagtatacacagtcaaaccaaaaaatactggtagtagtcagtatgaaagcttgcagaataatatatacatcatagaaagtaacaacaactgccacagtcagagcttccaacagcgtaaatccaaaaagtaggtacaggttaaggggatacttatgtctgtttaaaagtcaacgcaaaaatcaaacccagagatcccgaggggcaaaacagcaaaattaaggccaggactctcatgtacaaatgtccgtacagactcaaagtataaaaaaacttgttgaagtcactgtagttaagagaacctgcagagaaagaatgctgtagacttttctcagaaaggccattcggatgtgcacggtggcggaggccacgctgctgccatagttgaagtcgtcctcgatcgaggagcgagggtaccgggggtcggggtcagccatgatggcaacagcacccctaccggtcccggtccactaaccgcaaccgcctccc

SEQ ID NO: 56852 - DNA, 3155 bp, Homo sapiens
ccggcggcgcgactcgcttctttcggttctacctgggagaatccaccgccatccgccaccatggtgaacttcacggtggatcagatccgcgccatcatggacaagaaggccaacatccgcaacatgtctgtcatcgcccacgtggaccatggcaagtccacgctgacagactccctggtgtgcaaggcgggcatcatcgcctcggcccgggccgggggagacacgcttcactgatacccggaaggacgagcaggagcgttgcatcaccatcaagtcaactgccatctccctcttctacgagctctcggagaatgacttgaacttcatcaagcagagcaaggacggtgccggcttcctcatcaacctcattgactcccccgggcatgtcgacttctcctcggaggtgactgctgccctccgagtcaccgatggcgcattggtggtggtggactgcgtgtcaggcgtgtgcgtgcagacggagacagtgctgcggcaggccattgccgaggcgcatcaagcctgtgctgatgatgaacaagatggaccgcgccctgctggagctgcagctggagcccgaggagctctaccagagctttccagcgcatcgtggagaacgtgaacgtcatcatctccacctacggcgagggcgagagcggccccatgggcaacatcatgatcgatcctgtcctcggtaccgtgggctttgggtctggcctccacgggtgggccttcaccctgaagcagtttgccgagatgtatgtggccaagttcgccgccaagggggagggccagttggggcctgccgagcgggccaagaaagtagaggacatgatgaagaagctgtggggtgacaggtactttgacccagccaacggcaagttcagcaagtcagccaccagccccgaagggaagaagctgccacgcaccttctgccagctgatcctggaccccatcttcaaggtgtttgatgcgatcatgaatttcaagaaagaggagacagcaaaactgatagagaaactggacatcaaactggacagcgaggacaaggacaaagaaggcaaacccctgctgaaggctgtgatgcgccgctggctgcctgccggagacgccttgttgcagatgatcaccatccacctgccctcccctgtgacggcccagaagtaccgctgcgagctcctgtacgaggggcccccggacgacgaggctgccatgggcattaaaagctgtgaccccaaaggccctcttatgatgtatatttccaaaatggtgccaacctccgacaaaggtcggttctacgcctttggacgagtcttctcggggctggtctccactggcctgaaggtcaggatcatggggcccaactatacccctgggaagaaggaggacctctacctgaagccaatccagagaacaatcttgatgatgggccgctacgtggagcccatcgaggatgtgccttgtgggaacattgtgggcctcgtgggcgtggaccagttcctggtgaagacgggcaccatcaccaccttcgagcacgcgcacaacatgcgggtgatgaagttcagcgtcagccctgttgtcagagtggccgtggaggccaagaacccggctgacctgcccaagctggtggaggggctgaagcggctggccaagtccgaccccatggtgcagtgcatcatcgaggagtcgggagagcatatcatcgcgggcgccggcgagctgcacctggagatctgcctgaaggacctggaggaggaccacgcctgcatccccatcaagaaatctgacccggtcgtctcgtaccgcgagacggtcagtgaagagtcgaacgtgctctgcctctccaagtcccccaacaagcacaaccggctgtacatgaaggcgcggcccttccccgacggcctggccgaggacatcgataaaggcgaggtgtccgcccgtcaggagctcaagcagcgggcgcgctacctggccgagaagtacgagtgggacgtggctgaggcccgcaagatctggtgctttgggcccgacggcaccggccccaacatcctcaccgacatcaccaagggtgtgcagtacctcaacgagatcaaggacagtgtggtggccggcttccagtgggccaccaaggagggcgcactgtgtgaggagaacatgcggggtgtgcgcttcgacgtccacgacgtcaccctgcacgccgacgccatccaccgcggagggggccagatcatccccacagcacggcgctgcctctacgccagtgtgctgaccgcccagccacgcctcatggagcccatctaccttgtggagatccagtgtccagagcaggtggtcggtggcatctacggggttttgaacaggaagcggggccacgtgttcgaggagtcccaggtggccggcacccccatgtttgtggtcaaggcctatctgcccgtcaacgagtcctttggcttcaccgctgacctgaggtccaacacgggcggccaggcgttcccccagtgtgtgtttgaccactggcagatcctgcccggagaccccttcgacaacagcagccgccccagccaggtggtggcggagacccgcaagcgcaagggcctgaaagaaggcatccctgccctggacaacttcctggacaaattgtaggcggcccttcctgcagcgcctgccgccccggggactcgcagcacccacagcaccacgtcctcgaattctcagacgacacctggagactgtcccgacacagcgacgctcccctgagaggtttctggggcccgctgcgtgccatcactcaaccataacacttgatgccgtttctttcaatatttatttccagagtccggaggcagcagacacgccctcttagtagggacttaatgggccggtcggggagggggaggcgggatgggacacccaacactttttccatttcttcagagggaaactcagatgtccaaactaattttaacaaacgcattaagaggtttatttgggtacatggcccgcagtggcttttgccccagaaaggggaaaggaacacgcgggtagatgatttctagcaggcaggaagtcctgtgcggtgtcaccatgagcacctccagctgtactagtgccattggaataataaatttgataaggtggtgacaaaaaaaaagtcgacc

SEQ ID NO: 56853 - DNA, 950 bp, Homo sapiens
tttctgctcagaaactcattgattttactctgaagcacccacgaatgacagattcccaggaggggcagagaaggctgagcggcaccacgtggggctggccgcgggttgtgggcatgagcacgcctggagaggccatggggctggtgacaagctctggccagaagaccccaagaaggtctgatcctggggtctgatccaggcctgcggcactgggtcctaggcagactgtctgcctggtgagacgtggaaggagccagtgtccgcagccgtctcaggacgtcagagagctcggtggcctgtctccagcagcatgctctccagatgcagcctactgtcgctctccacatagggctggtgcagccacatggacaggtagctcagggtgaggtcgggatccccggtgtgggcaagctccttggccaccgtgcgcttcaggagcagctccttcctgtacatctccaagagcttatgcgaaacctcatagaaatgggttgtaggccacgtgtggaacagagggggtcgtttactctcctccccataatggtagttttctagttcacaaattcccttggtagttgaagacagcttttccattttcacctgtattttggtcaacccatccaaggtggcctgcagttcctcacacagcttctccagttcctcgttatattccagacacaccttttcttcattttccttcgaggctgggctgctgctgtctagttctatcttgtctttattcaataaactgattttcaagttggcaatattatttgcagtggtaaaacctgcatcattgagggtttcccacttcaggattaaattgtgccaatcagccgcattgtccttaatttttcttgcactgacagataagacaggttttctgggcgttacagttccaagagtctttgcttccataaggtccacagatatccgtagaaggagacgcg

SEQ ID NO: 56854 - DNA, 1720 bp, Homo sapiens
gggggcccaggagggaagaactccatatgggatggagaagggaatctactttctccctgtttttttttcctgatggtttctcccagactagaccaaatagccagaaaaatgataggggtcggatgggtgggtaagcccaggatttgcacatgaccttccatccttacctgtattcccatctccccagtgtcactcccctcaccaatcactccagatggttttgggggaaccattctactcttctggtgggctttggggtatccccaccaactttcccttcaaaatagcaccttacaccccatctttgactcagttccccacacccaaagatcccagcctagggatggggtacagggactttaaatagtccctaatccctaatttgcactagttaaccctggtcagggtccctgtatttccttccagtgggggagataaatgtttgctcctaattctctttgaaaactgggcctccctgctctgtgattggataaatatttcccatcccacccacctccccccaaaaaatagctcacaaggggagagcccagtatgggggagcaaatttgacaaatgggaattagaggagtgcagttttaaaaggaaaagttgctgtcatcaaaatggcagccttttccccagctactgtttttggggccaagatggctgccctagcagcaatcactgccaagggcaagatcatggcttttggagggaggtgagtttagggagggccaggaccatcctcctacccctcataccctccccagcatatacaaaaggggaggttttagacaggctccctgaatgttaaccacagaggagtcactccttcattcctcctctgtctctttgcacttttcttggtcttggccacagcctgagtgacgaatttcctactgaatgtaccaagttccaatttttaagggggggaaaggtttcaaatggggaaaaacacacaaaaaaaaaaatcactaaaaattcccacaaatcttgtttctggcactttagaaaaactgcaaaaaaatacgtaataaagaatacatatatatatatctacacacaaattatatatctatctatctatacagcggaaccacaagagagactgaggaaggcctggaggcaggggcagaggtgacgacagtgcccctatatccttaacccatactcctctgaggcaaacaggcatgggaaaatggaagggttgaggatggaccggagaattggaacttcagaataggtcaaaattccaaaaccatggacatttttttttgggagaattgagattgtagacattttttttttcttaaatatgatcaaggaaaatagcttccagaatgtggtggttctgggcaacaaatgagattgtggcgacgtggagattaaaatatatgtatttgagctggggaatttgaatattgtgagtttcagatgttggaaatttgggattttgcagttttgtcttttgaaaatgatcaagtcttgtcagttcgtgccctctttccccatgttccctgggaagacgggtggtggcagagtgagaaggccactggttctgtgccgcagcacgcaaaatttagaattctacagactagctctatacgtagtgaggacccagatttagagaaactgaccaatatttatctccgcatttgtgtgtgtgtccaactctgtaggccaataaaccaacaagacaaatgaactgtgctccacagtg

SEQ ID NO: 56855 - DNA, 1326 bp, Homo sapiens
  misc_feature (1)...(1326): n = a,t,c or g
ggacggagtcttgctctgtcgcccaggttggagtgcagtggcagcgatctcggctcactgcaacctccacctcccgggttcaagcgattctcctgcctcagcctcccgagtagctgggactacaggcgcgcgccgccacgcccggctaatttttatatttttagtagagacggggtttcaccatgctggccaggctggtctcgaaccccgacctcgtgatccgccctccttagcctcccaatcctctcttaaaaaagtgatagctcagaaacatttgtaaaagcaaggtttttatttcattttggctctgtcattttcagaggcaaagaagttggcctgtaaaatagagtgctaggagctcttacgcccctccccttcttcccaacttcctacttcctagcccttttatcaactcctaggaatagttaaagagagacacatctagatgggatgaaaggtgccctaagcaggagaaactgaacaaaaggctagagggcatgggccaggtaaaaattgggcctagagtgaagactgtgctgtcgttaagagctttcgaggaaggagtacttactccccaatgatgatgaatggaaaaatacttttcagggagaattgaaggggttaaagtgttaaatatgttgcctagacaagggttctttaaagaaagacagcgcaactttgaatgctttcttacttgttttgtgacctaatttatgtggaagattgttatttcattaggatttagtaaaatttttttttctgattctaaacttattgtgaaaattgagctgtacagatattcttttgatttcaattgggaacatttggaagaacaacagtcttacttgcctgtacaatatagagacatatgaatagtcataacagttttcaacttgttcttgtttctgttaaactatattcctagaaacatagtttgaacaacttggtctttgttaggcttgtcaaattgccttcatggaaaaataatctacaaaagtatggtttaattgattgtcttacatgataattttccctggtaacaacttagtaagtgatatatcttttttcctaaattgcttaaatactgtgaaattgctctgacaaattggaagtgtaccattggcatatttgtcttcctttttatgcatgatggtaaaataaaagcatgttgttctgctagatttcttatttttcaccttacccataaatgtaatgcttgaatgaagttgttcatattaattaaaaattatggaatcattaaagtcctttaatccattaaagttcttaatggattnaaatcattaaagttcttaatggattaaaatc

SEQ ID NO: 56856 - DNA, 892 bp, Homo sapiens
tttttttttttttttttttcggaaggtctattttaataggaaaatgttttttagttggaacgttttggaaataagataacgcaatgtcttctatagttactcatttacactgaaacgtgatgggtaacttttagggcgtttgcttccagtcactttcccctgactccttgatgtgataattccttccataagatacaaccattctccccaagtgatgcgatgacgagtatgtgcgtgactctggagggaaagggtctacatctgtctctgcttgtgcctcggatgggttttacagtaggacgtaccaccgaccccgcctcttcaccaggtaacagtccttgcagcgcttcttaaggacagtcttgtttttgaaccccagcgcaggcagcagatggggcaggaggccgggtgagagaagtgagcgcactgctgccccgggttccacagccacgggggctgcacctcgaatggatccaaatagaaatgtggagagggctcgaggcttcaccgtgtgacgactgagatagagcagagggttcacggtgaagcctcgagccctctccacatttctatttggatccattcgaggtgcagcccccgtggctgtggaacccggggcagcagtgcgctcacttctctcacccggcctcctgccccatctgctgcctgcgctggggttcaaaaacaagactgtccttaagaagcgctgcaaggactgttacctggtgaagaggcggggtcggtggtacgtctactgtaaaacccatccgaggcacaagcagagacagatgtagaccctttccctccagagtcacgcacatactcgtcatcgcatcacttgggagaatggttgtatcttatggaaggaattatcacatcaaggagtcagggg

SEQ ID NO: 56857 - DNA, 432 bp, Homo sapiens
  misc_feature (1)...(432): n = a,t,c or g
tnnanttcncctttgantncttttccntgattacgaatttaatacgactcactatagggaatttggccctcgaggccaagaattcggcacgagctgaagaaatgggactccctccgcgacgtgcccggagcaggtcccttcgctgtggaagcggcggtgtcttcgaagaaaccggaagcccgtggtgacccctggcgacccggtttgttttcggtccgtttccaaacactaaggaatcgaaactcggcggccttgggggcggccctacgtagcctggcttctggttgtcatggatgcactggtagaanatgatatctgtattctgaatcatgaaaaagcccataagagagatacagtgactccagtttcaatatattcaggagatgaatctgttgcttcccattttgctcttgtcactgcatatgaagacag

SEQ ID NO: 56858 - DNA, 684 bp, Homo sapiens
ttttacagagagtgcttgtgatttcacgtatttttgctgaactcgtaaaagagacacttggatggtggattaaccagaacactaacattctgtgaaaagtttcaaattggagaatattgaattttcaccctagtccagcagctccgctgctcacttaaatacagatgaatgaagaccccattcggaaagacacctggccagcggtccagagctgatgcaggccatgctggagtatctgccaacatgatgaagaagaggacatcccacaaaaaacatcggagcagtgtgggtccgagcaaacctgtttcccagccccggcggaacatcgtaggctgcaggattcagcatgggtggaaagaggggaatggccctgttacccagtggaaaggaaccgttctggaccaggtgcctgtaaatccttctttgtatcttataaaatacgatggatttgactgtgtttatggactagaacttaataaagatgaaagagtttctgcgcttgaagtcctccctgatagagttggtaagttctttttataatttgtgcattatatactttaaaaatgatattgaactggatgctttttttattttacattattaatacttcacttttattggaacacaagcacccttcttgataaacattatattaaatcaccgaaaaccacaaactcgtgccgc

SEQ ID NO: 56859 - DNA, 1311 bp, Homo sapiens
tttttttttttttgtcatagatttgatttattaaaccaaaattatacatattaaaattatatcacaaatatatatgcttccagacaaagaaaagtttgttagtcctgattttctaatcgtagccactcaaggaacagtcctttcatagtaccccaagtatttcaattagacttataaaagtataagtcaatctatggtcagtgtctttggttaaaaaaaaaaaaaaacacaggcagttctttacataaaaacgtcccacacgttatagatgccagccacctcctggtagtcactatggacaactaatgagatgcaaagtcttttggaccgatgatgtctctactactggatctatctgtattaacagcaatgttactctcaatgaaactgcagaagccaccatgaacatggaagaccacctagcagatcggtgagtaggctgcttgttcagctttcctttaacacctgttggtaaatactaatgggagtagacagagttgtatggcctggacagtggaaaccaagagcaggatcgcaaagtaacagcatcagactcttctgccctcctcttgcacttgggttctgactcccagaacaaagaacttgggagaacagtacgggagactgagcagaaaggatgggtttgctgactcgccttgaaatctaactctaacgtaggcagcagtaactcgtctgaacaaatctgattaaataaattcttggggcttacctgtgatgtcacacatacagatctactctccaggaagcaaactcttagcaagttactgccccacttgtaatcactgatctgaaattctcttgttatgaaagaaaagtccttctccccacgaaagacctttaaagacttctacgtatttgaaataccagatactaaggtgtttaaaatgatttctatcattggtaacatcaaacaaaaatagctgcatctggttaagttaaaaagcatcaatactccctcttctggccctacagctgtaccaataggaattctcaccactactcaataacagaaataagtgcctacagccatgatgaatttgtaacattttctcaaattaactacgatttttctaatttcaggtgaaaacccaaggtggtacttcaaacacggcacatgcacacacaaactcagaggacagcgttacaaggaaactaaggaattcctgcattaacaaaggaagacatgttagggggacatcctagccacatatgctttctttgttatatttaggttcattttcattgatactaaacacagacatttaatggcactgataaaaattcaagtaa

SEQ ID NO: 56860 - DNA, 764 bp, Homo sapiens
ggtcatggagggagcaggagctggatccggcttccggaaggagctggtgagcaggctgctgcacctgcacttcaaggatgacaagaccaaagtgagcggggacgcgctgcagctcatggtggagttgctgaaggtcttcgttgtggaagcagcagtccgcggcgtgcggcaggcccaggcagaagacgcgctccgtgtggacgtggaccagctggagaaggtgcttccgcagctgctcctggacttctagggatctcagccgtggctgaggccacccccagaggagcccctggtccacagaagcaggccttgtgtttccagcggcctctgataagaggcagggaaggacctgaaggatttggagttgattcaaacaagatctctgggagtctccagcctgtgcaagaaggggcaggactgcagtgcactgcgggccttggaagtgtccagtggggacactggtgtgggaaggggcagcacctggggagtccctgcctctcctccctgggacaatagtgtgcatgccacccggggtcctacaggcaggtgctgggaaaggcctggccagcaggtagcctgtgtgtttgacaaacagcagctggcagcgctgcctcctgcccacattcctgccacccgacatcaaagctggcgtgtgacctttccagccatgcgatattccccttggaagatgcttccccaggctataaatttgttctcacaaagcaacatcaataaatcaaaactgtctctcccaaaaaaaaaaa

SEQ ID NO: 56861 - DNA, 3351 bp, Homo sapiens
  misc_feature (1)...(3351): n = a,t,c or g
cacttcacctatctcctggtttaccagggaagttcatgttgctattgacagctccaacaaagaacagtagcaattcctgtgggccaggcccagcagccacacacgaaagacactgtgagaatggtatgggctgcctagtctgggtatgtcaggaatagaaatccttttctaactggcacaccatttcagaaagcttgaaagaccagaatcatcagtcacatttcttcctgttttagtcccgggtgctcatgaagtaaccctggagtatgtcactggttttaagactaggttgaaaaaggcagatggggtccctttctgtacgaaactgagatttttactgacatgcagatgtgctttagagttaatgtttctacaaaaagtttctataaacaatagaaaatttctagcatgaagtcacaggatgttaaaaatattacaatgcaataaatacaactacatcctccacagccccaaccagacaggaataggcagctatcaggtttggagggaaacactcttgagatcgccttcacgatccacagaaacccagagcaccacacaggaagagggagcaacacaagactcccaacttctgcttccccagctttgcttcttctcaatctgaccctgcctgtggcccgcaccagctaaaaactgtagcttcagtccacttcggctctcggggaaaccctcttgtcagtggactggatggacaacaggtctgtttttgtgcagagcacatggacacactggtttctgtatggattaactctgccttacggccagtaataacctcagggccaggtcccgtatccatgtcctctctttacagggcctttcagtgacctctagaatggactcacagtaacaggttgtgatgtgaaggcatgtattcttttggaaatggcctttgagaaaagtaacccagggacctgaaagacccatgagattgtggaaggcaccctggacttagtcctaggagaagaccagcgggctttgctagctgctcatcacagatgtagcctagttggtctgtattatccttggatgacaacggtgtcatgtgacactatctagggtactgtggctcttgtgcctgagtggaccttgaggctggggaggccagactgaggggtcattcatggaagggccaagatgtgtgaactctaaaggggatgttagcactaaagacttcccagccctggtccttggaggtactatacttgatactgtgccaaagtttagcagtagcctgtaccatggatcccatcaggtgaccagattcttgcccaaagcaaagttgagagaactgaccaagttctcttcagcacttagcacctaacccagacatgccccttagggagtggggaaagtttccctgcccagccccagcagcaaaagggctcagtgggagttggagtggtccaagagaaactctggcacaagtagttgagggctgtgctcttgctgcgagccttgctagtcgcagggttgggcacagcacccttagttaccattctgtacaggtatgtggctgcacgggggtgggagggcttgtgggagaagggctgctctgctctagcttttcttggaaaagccaaatctccaagtagaatgggaactatctgggacatctagacagaatagtttaagccctaactccctttcttgatactttagtataattacttctggtcctgcacagggcctgttctctccagctccagacctggatctctttccaggctgacagtggtggaaagtgaggtggcagtgcaagaagggcctagagatcggctacaaagggaaaagaagagatgacaanaaaggccgaggaaggatgcccaaaagcttgattcagggttcaaagatggtggccaggccacccccatcattgtccagcacctccgtctccagcattggctttgtttttttgaaaagtgagggaagattcttaatgtgaacttcttttcggaactgctctcccaagggtttcccaatgcaaccagcaatgaggcgtttgaattggtcctttcggcgcttgtcagccactttctgcagggaggggtttaaaagcttgcagtcaaactggtccagtgagtccttctgtatttcagggatttgctccattacagctcttatctccaggtacctggggcgcagtgcctcgtatatctggaaggccagatggaccagggaagccatgcacccgtcgtgctgcccgtgcatctgtaagcctttcagcacactggtgaaaagccacgtaactgcatctgcgagcagtgtccctgacagcacttgtttgaggagaggccagcagagctgtgaggttgtcctctggcaggacagagtatctttccaggccagggaattgaaggctgtaattaatagcgctgtacaaacatcctcatgcttcatcagacatttgcccaggtctgtaagctctgccatagctgagggggtgacctctgtggccatcatttcttcatcgtctccatctgctgggggagcactactgtggtcagcacccttctttgaaacacagcaaaccgtgattaggtccatgacttctcgggttaacatcctcaccagttgctcctccagcatctcttgagactctgggttttcatctgcagcctcatcttctccacacagcaggctcctttggttgataacttgccatttctgagaaagcctcatatggaggtaggtgaaaagaggtccgaggatgggggataccagggcttcatagtgctctgggggacagaagagcaccagaggctttacaaagacacgaagcatgggtctgagtcggtagtcaggaatattgttcaagttgacagaaggctgagctgagaagctgggtagcaaggtcctccacagtatagaagtcttgctgcatggaagggcctgccttccctaggatatgaaaacagttttcatagagggtagagaagaaacgctgcattctttccaagacggttttgaagacaggagagtcattgagttccaagagaggttgaggtaatcctaatatagcagatttttccgcgtcaagcatatccagagccttggtgaaaggctctgccattttggctagcatttctggtgcatataatgtattgtgggttcttataagcgcaagcaaattgtcaagaagtttcagaatctgctctgtgcaggggttacggaagattggatttccactggatgtataacccaccacaaatcccccagctttggcctcttctaggtcagtgggccagcaagttcgtttcaccacacccagaatgctgtatacacaaaagctcattcgtgcacggtttaagccacacggatcctccaggcctg

SEQ ID NO: 56862 - DNA, 2321 bp, Homo sapiens
gccacattaaggaacctgctgctgagaaaatgctgccttacagatgaaaacaaacttctccatccctttgtctttggtcagtacagaagaacatggttttatatcacaacaattgaagttccagattcttccattttgaaaaaggtgactcatttttctattgtcctgaccgccaaagattttaacccagagaagtatgctgccttcactaggatattgtgtagaatgtacctgaaacatgggagcccagttaaaatgatggagagttatattgcagttctcacaaaggggatatgccagagtgaagaaaacggctctttccttagtaaggattttgatgcccgaaaggcctacctggctggctccatcaaagacattgtatctcagtttggaatggaaactgttatcttacacacagcactgatgctaaagaaaagaattgtggtgtatcaccccaagatagaagcggtccaggagttcaccaggactctgcctgccctggtgtggcaccgacaggactggaccatccttcactcttacgtgcacctcaacgccgatgagctggaagccctgcagatgtgcacaggttacgtcgctggatttgtagacttggaggtgagcaacagaccagacctctatgatgtgtttgtgaatctggcagagagtgagattaccattgctccccttgcaaaagaggccatggcaaatgggcaaacctgcacaaaagaaattggggtcagctaattgttcagtctgcagaagatccaggagaaattcagaggagccacgttatacaggatattgctctaaaaacaaggggaaatcttttaccaacctaggcaccatttttcagaagtttcggctgatggagaaaagagagtccttaatttggaggcgctaaagcaaaaacgatttccaccagcaacagaaaacttcctttatcatctagcagcagccgaacaaatgctgaaaatctgactgtgtgacagaacgtatcactgatgactgatagaaagccctctttcactctgattacccactcactacatgaagtcctgaaaataacagagaaactgttatatctttttaatgatttatttgcaagtattgagatttgacctgaaaaacaatgaaacacatgaacacacttccgattttctcctcgctgattagcttcctgcctgctgtcagtgctggacgaagtgctataactactttatgtaacattacagaacagctagaggtcctggggtaagagaaaaaaagcacatcacaacaaatgtgaaagccttcattattacacgttccagtttgtctcgctgtgtaggcataagctaatggtttattttcagaaagctgcctgaaacgttgctttgtattcttctaggaagaactttaattcctcctgaggaactctactttctgagccaaactgctaattttctgcggaactgtctagaagatcattcaagagaccctgcagttgcactttctcgtaaaagttaaaaaaaaaaaaaaaaaaaaaaaggtttttcccggcctttgaacattttgcctatgagagttttgcatatattttatacttgagtagacaactttaataatccatatttatactatcgcagaagtaagcatttggcaaacgttcagccattagcactcatttaaccctgttagcaatattcttttgaaaaaagtgccagtccttatgtgataaactaagaagcccattgaatataaaagtgtataggactgaaacagtgaccttatattattgctaagggaatatgagattaacttcctacaggggccaaaaccagagaaaggcttccagcaacttcgatgaaagtagtttggccacatgtcaagccaattgtttgtattatttatgtacctttttcataactggaattgccaaataagcatggagatctaaatgatgtacttgttagtgtattcattcatattgattgtaaaggattatttttcactcagtactgatgtccttggaaatcttacctggaaacatgtttgcaaaaaacattattgggtctttcatctttttcttggtattacatatttgttcaataaaaattaaacaccctcccttttttttgagtgagggcagggagtacctgaaataagacaatgtttactaaggcaaataattgaaaattaaatctgcactttatggaaatgagaaatattaacatcttttttctcatttttttgtattactatattagctaatgatcaaagttgttaaaattataaatttatgatgcagaaataaaattggtatattttgaaaaaaaaaaaaa

SEQ ID NO: 56863 - DNA, 1276 bp, Homo sapiens
tcgactctagaggatccgctttttttttttttttgggatttcactcaagaatgtgtctttattgaagaatttgtaagaaaaaaggatgtaccctctgtaaaaagaggagatgttgcctccaacagcagggaggaatgagacctgggtggcttcccagaagtcagtgtttccggcatgactggctcctttcctggcaaacactacaatgtgtcacactacagctagcaattcctccccactccctcccagcccttcctccctccaccccacaaccctatagccatttgaggcaaatggctttctaaaggcccagggatagatgtgccaggcttgcctcttaatggggtcaaagtgagttttgctttggaaaaattcaaacaggaatgtaaaatggtttgagctctttctagtccaaccaaaggtgattacatccagcccctctcaagggaatgggggcagagactgtcgctcctgaatgtgcacacatggggtaaatggactatatcgcagtctgctctttatttgaatggagaatggaaacaggttataagaatatataacatccatgttcaagagtcactgagttctggagggcagagggagcacagaggcctgctgattccaacagtgctcctgatggctatcctcgagttgtagggatggttattcctctccagctggaagattgtcctcaatccgcctgatgaatctcatccggatttctgtcacaccgtctcctttcagggtgtcctggacaaacttggcctccacagccatctggaccatctccaaagctccccgcaacaccccacacaagagattggaataaataagggatgagtggttatcaggaagttccacaaagtccaccaaggggttattttccaaaatgagggagaattcatcaccagctgggctccaattagtaatgcttggagtgatgcccaagtacatcttgaacgccaccttggcaatgacatccgcagtttcccgaaagtcatggcacctcccaacatttgaccgagccaagaaatcttcaatcagccggactccaatgttaaagcccattttgtccagctgtttattcacatcttcatcattttcatagtccttacatagctgggtgaccagggcaccataggtcagggtgaagagctcagagctcattttcttgctctcggtgccacggttcgcctgcctcgacatggtgccggccgccccgccccactcgcctagccacgggttagctcggcgacccctgcagacgccggagcct

SEQ ID NO: 56864 - DNA, 2184 bp, Homo sapiens
ttttttttttttttgaaaaaaaccagtttattttgagatcagtgaaaagagtctaggccacagaaaagaacagctctttaatgcaagttaaaatgtgtaaatgaatgaccgggacactgagcaacctcagatgcagacttccatccggacactggtgtggcttcagtaccgaggctgctaaagctgccagtcacaacccagcatgtcaactggttcctcatgctctgtttggtgtggaaattcacatgtgccctgacactgaggaagcaattgcttaaaatcactttccaataacagctgataaaatatttttgcagggtttgtcatgcaaggtttatttattaggtggctattcaaagtttgtatagcaaccacttaagcagaactaaattaatattcactgagcactgtaacgatggaagagggcttttcctaagggttgggttgggagttgtgcttctgtgaaattaacatctctcactcattgccaagattctctgcttaaaaatattagttttctgtgctgttgcccaaaatagcaatttaagcaaatgtagtgccagaatgacacatgagcctcggactcagggaacagttccactgactgtggagtacaactattgcattcttttccaaaattcagactgatgtaaaagactgaaatacaatgttcttaaggatctgataaacatggctgggatgaaaagaaaactgagagggaagagtgcttttcacagtgcaattcatagcagcgttcaaaaacttggttatgaattgacttgaaggtggacagagcttaagactggaaaaattatctataattggggtttaacaaagagcatgggaaaagaaacacttggtttcagcacctggattctacatacagtagggaaactgtgtgaagggttgacttttaaattcatcttgaataatcttttaaaagtttaaatttgtccaagaacaaaactaagaaaataataaaaaatggatgcaatggatgcttcaacacatctgagagatgtgcattcataacacaatatgtcaatccatactcttgagaaagccagtgattagaaacaaatattgttgcaaccttataatttctgctttaatggcaatcaagtttaaaaaatgtacaattccacttatccatactattcctttataaaaggcagatttcaggtaagcttctaaatgcatgcgtaatgtagaggctaatattttctggcagtccttggttcctgaaatttgaacttcatatgtgttttaaacttttgtcaaaatagtcatgaaagatatgttatttttgcataatgaggtaatatatcaggggcgggcactcataagacagtataaatccacttgtctaaacttgcatgaggctgtgtgcattgtaaaatgccataaagagttttgggtcagtgaatattttgctgaaggaataacacttacatttaactgagcacttttctgtaataaataccaaagtaggtttttgtagctgtaaactgtgtacacagataactacaggctggtctgtcatggagctaaaagtttcacctggaaaacagaacccacctctttgctaatgttgcattttcagtaacacaattgagaatactgcattgttaggaacagagtcaattctatgcctttcaacggttgctggagaccacttctatttgcaaagccagcagttcctatactcctatttttgtttgtttgcttgtagaacagcatagagagatgtaagtgctagatgccaaggatggctttggcaaaccagtaaggcgcgcccgggtccgaggctaccctcatactggtgaaggcagaaaaccacaggatatttacaacacacattatatccccctcctgaggtggcccttccatgagtttcttactctgtaacagcagctatatacacactgtgcccagggttacatgaaggcagcagtcttgcatgaaggatgtggacaatcttaaggttctgcgttttgctagtcagacaggatatgaacaaaggacactggaaagacccccttcctttcaggctgtccttcgatgtggccaatccaccactcctggtcctcttcccctgtgacgataatcacttctccctcgatgaatgtgagctcgtcatcgttgtctgcctggcagtcataaatggtcttcactcgcactcac

SEQ ID NO: 56865 - DNA, 933 bp, Homo sapiens
ttttttttttttttagaagtgcacggctgataggcttttattacagactgggggcggtaacggctggacagagaacggaaaaggaacatctgagaccaggctcaaagctagggggttacacaacctccaataacacaaggtgagtgcagcacttctagacacacacacagacacacatcacttactcataaacggcacagcctacggtacaagaaaaagggcaaggtaggtaagggcacccaacaccctcctgcctgcagggggccacagggttaatgtgccttcctgcacgcaggcttaagagggataaacaaggagagggctgcccttggagaaggcctgcggataatagtgactgaggcacaggtccatgcaggggaaggaagcacagttcacagagtggcaagctcagtgccagccagtgcaagcaacaggcagttctttgatcctggcttagtcacagcaaacatttacccagcctggctcttctccatagccagcaggttgcttgctcatccagtctgtccctggtcagcgggcatgtgctcaaggagaacaaacacagttcagcacaggactcagctgagggtcactaaaggatcatagactgtgagggtgggaggtcttggtttagaggttgagtctagtgcagctgatcacctggggtctagtgaaaatgcagggtcagattcagtgggtctggggtctgaatctctaaggcgctgccaagtgatgctgatgctcctggcttgtggaccaccctgtgtatagcaaagctctagactaggaggtctcaaccttggctgcacagaattatctggggagtttttaaatttcccagtgcccaggctgcattcatatcatagtagagacagggttttgccatgctggccaggctggttcaatcatctctgagggtgggacccaggcatc

SEQ ID NO: 56866 - DNA, 2395 bp, Homo sapiens
ttttttttttttttttttgactgttttaagatcatttattagaacagtcattcagaagccattgagacatcaggcagcagaaaggaaggtgggatggagcaggccctgtgaaggaccaagaacaaagtaatagccacagttatgaaatttcattttattctgataaagactaatatatgcttgataacctagtgataatccataagtttggtatttcacaacattttttagaaagcacataagattaacattcaaataaggcattatagaaagttttataaagaatgaagtgtttcctatatttcttttaaaaaaccttggttcatcttgaaagatcgatgaattttttaaatatcagaagaaaagggaaataaaattttccccccaaaacacataagaaccacttactggcacttgtattttaagtacctgggaaaaaaacggaacagatttttaaaggcaataacgacttgtaagacggcttgtttcatttgatttggcacgaagtaaagtaagagtaaatatgccatggaagacataatcaagtttttcctccatctctcatatttccccacttctaccagaccacacagtacatcagcaaccatcctttagattccaatttttaaatggctgctcagacgacaccaatagagttctttctccttaaaatatggtggcagtgaatgctaacaggtatcaatttctttgatcaggaacaaagaactccttcaggaaactcactttcctggtccttgttaacctatcatgtaaattctttttattggtacacctgtttactaattataattgattgctatttatgccaagggagcatttcccaggcatgcctcatctatttactaacaacaaagtatgcttactttatttacatagtgccacgggtttctcttttttcttctcttttttattggcgggggagatggtactataacttgttatttatcagggcagatcacacatttggatcaaaaagaaaaaccagcaagtagatcctaaaacacatttcttaacctgagtcataactgaaaacatagactttaattacattttgttgaaaattcattcaactttggtgcttgtaaaagcacttatgtcaatttttgacacaaatcataaccctcagtacacaggtattttcaaaggaaacaagtcatcttaaagtaatatttttctatatgctaattgatacatctttatagcaaattgaaaattctgagtaaactgaaagtatgcttaacgacaaaataaatacagcatatatggttaacatatacatttcttagtgtaaaggcagcagtgaatttgtgtctcacaataaatctgtaaatccagttgctttctttctggaattttatatagtgtctcaccatgttccacaatgctggaaatgtcttttttggcatcaatctatgcacaaatttctgattacgtattttctccaaatgacatgtaactttttttaacttttccagaaaaatatggaaactttatcaaccacttattaactgaacaaaaagttagattactaccaaatgctcttttaattttgctctaacagatgttttaaaggttcagacatcgctgatgtttttgaggataactgcatacaacacactagatgatttcaaacgatgcatcttagtatccgaatcatttggcacatccttagtatccaaaataaaatcagtagaaataaaagtaatataattttcaaagaattcatacatactagaagtcttaggaaaagcagcttctaaatgcaaggactaggaggtttgcccatcttactattaatagttacacacatttctcctcatggagtaactgaaagctttcctggcttctttggtggaaacttttagtttggtaggaaagcatatacatagggccaaatcttgttggtttctgttccggagaatgtttccagcaccccttttttctggtaatattccaggactggctttgtttggtcttcataagcctttagtctcttgataaccgtctctggtttatcatcctcaccgctgaatgagaggctccccagtcaggtcatcaatgcccacagttttgggagggttgaattcaatgttatagactcggccactggcgggatgaatccagcgagcagtaaggcgttgtttaatgacctcaaagggcacattcaggttaatcactgtgtcgatctgataagctctatctagggcttctgcctgtggaagtgtccttggaaaaccatccaacagccagctatactgggtgagatttttcagctcatgaagggccagccgagtcatgacatcatctgggatgagtttcccttggtcaatgaaagccttggctaacacgccaatttctgtgccccgcagcatgt

SEQ ID NO: 56867 - DNA, 2205 bp, Homo sapiens
gccgctgctgctgctgctcctgcttcgcgccgtgctggctgtccccctggagcgaggggcgcccaacaaggaggagacccctgcgactgagagtcccgacacaggcctgtactaccaccggtacctccaggaggtcatcgatgtactggagacggatgggcatttccgagagaagctgcaggctgccaatgcggaggacatcaagagcgggaagctgagccgagagctggactttgtcagccaccacgtccgcaccaagctggatgagctcaagcgacaggaggtgtcacggctgcggatgctgctcaaggccaagatggacgccgagcaggatcccaatgtacaggtggatcatctgaatctcctgaaacagtttgaacacctggaccctcagaaccagcatacattcgaggcccgcgacctggagctgctgatccagacggccacccgggaccttgcccagtacgacgcagcccatcatgaagagttcaagcgctacgagatgcttaaggaacacgagagacggcgttatctggagtcactgggagaggagcagagaaaggaggcggagaggaagctggaagagcaacagcgccggcaccgcgagcaccctaaagtcaacgtgccttggcagccaagcccagttgaaggaggtgtgggaggagctggatggactggaccccaacaggtttaaccccaagaccttcttcatactgcatgatatcaacagtgatggtgtcctggatgagcaggagctggaggctctcttcaccaaggagctggagaaagtttacggacccaaagaatgaggaggacgacatgcgggagatggaggaggagcgactgcgcatgcgggagcagttgatgaagaatgtggacaccaaccaggaccgcctcgtgaccctggaggagttcctcgcatccactcagaggaaggagtttggggacaccggggagggctgggagacagtggagatgcaccctgcctacaccgaggaagagctgaggcgctttgaagaggagctggctgcccgggaggcagagctgaatgccaaggcccagcgcctcagccaggagacagaggctctagggcggtcccagggccgcttggaggccaagaagagagagctgcagcaggctgtgctgcacatggagcagcggaagcagcagcagcagcagcagcaaggccacaaggccccggctgcccaccctgaggggcagctcaagttccacccagacacagacgatgtacctgtcccagctccagccggtgaccagaaggaggtggacacttcagaaaagaaacttctcgagcggctccctgaggttgaggtgccccagcatctgtgatcctccgggaccccagccctcaggattcctgatgctccaaggcgactgatgggcgctggatgaagtggcacagtcagcttccctggggggccggtgtcatgttgggctcctggggcgggggcacggcctggcatttcacgcattgctgccaccccagatccacctgtctccactttcacagcctccaagtctgtggctcttcccttctgtcctccgaggggcttgccttctctcgtgtccagtgaggtgctcagtgatcggcttaacttagagaagcccgccccctccccttctccgtctgtcccaagagggtctgctctgaagcctgcgtttcctaggtggttgggcttaagctgcctgggttgtggccgccctagcatcctgtatgcccacagctactggaatccccgctgctgctccgggccaagcttctggttgattaatgagggcatggggtggtccctcaagaccttcccctaccttttgtggaaccagtgatgcctcaaagacagtgtcccctccacagctgggtgccaggggcaggggatcctcagtatagccggtgaaccctgataccaggagcctgggcctccctgaacccctgggcttccagccatctcatcgccagcctcctcctggacctcttggcccccagccccttccccacacagccccagaagggtcccagagctgaccccactccaggacctaggcccagcccctcagcctcatctggagcccctgaagaccagtcccacccacctttctggcctcatctgacactgctccgcatcctgctgtgtgtcctgttccatgttccggttccatccaaatacactttctggaacaaaaaaa

SEQ ID NO: 56868 - DNA, 1040 bp, Homo sapiens
tttttttttttgtgaaaaccaaccaggaacatttattaaaaaactaagcaagttatccccaagagggtgaagcaccgctggctggttctgacattcgattcaggctgaaggcacggcaactcctccagcccttgctgggaaatgtcctacccaggccacgggcagtgccccagtgcagctgggtcccctaaaagcccccaaacacatgatcccaccaaaggcttgaacagagcaacttcatcaagcaggcagggaccacacctgagacacaagggcaaggaggtaaagcacaggggaccgggagtgggccagggacacccagcccccgtctccaactggcgccccctccaggggggctaacatgtggcgtggggccaccaggacctgtgcttgcccctggtggcggaagagctaccctccctcttgggtggtggggggatgttgtctgcacacagctcagacgaccgagggtacaggaagaatcaaactcagtcaaccattcttcaacccaactgggagtctgtgaggcctggcacacaggtgctcaataaacacttgtggcatgaagaagtgaaggaaccgatcttgttcatctctgtgccccagcactcggcatgtagcccatgatcgaaaatgcagactgaacaactgtcacactcttttgtatcactagtgcccggcacacagtcagtgctcttcaggtgtgtgggaaagaagccaatgagtgagaagttcccacaccgtctagcagtgaggaaaaaaagaaaaaagtgaaaagtaccttgtttactcccattcccatcccatagctcagctccctgcacacagcaggtgctcagtaagtgtaccgaatcaggaacttatctttgtgacatgagtgccaggcacacagtaggtgaccaatatgtgcttgaataaatggatagaagcatcttatttatctcaatattccccagagcctgggctgggcacagtggctcatgcctgtaaccctagcactttgggtggccaaggcgggcagatcacttgaggtcaggagc

SEQ ID NO: 56869 - DNA, 861 bp, Homo sapiens
gaaacgatcccagtgtcggttgcgggatccgcctcctctcagtttgcccctttagccctccacctttcccttctcctctctcgcatttccgccagtcggcttacccgctggccgcctcctgacaagcgggagggatccgcggtggacccagggaagcggaggagcctggcggccaccccctcttcctcacttccctgtactctcatcgctctcggcctccgacacgttccaagatgagatgggattctccaacatggaagatgatggcccagaagaggaggagcgtgtggctgagcctcaagctaactttaacacccctcaagctctacggtttgaggaactactggccaacctactaaatgaacaacatcagatagcgaaggaactatttgaacagctgaagatgaagaaaccttcagccaaacagcagaaggaggtagagaaggttaaaccccagtgtaaggaagttcatcagaccctgattctggacccagcacaaaggaagagactccagcagcagatgcagcagcatgttcagctcttgacacaaatccaccttcttgccacctgcaaccccaatctcaatccggaggccagtagcaccaggatatgtcttaaagagctgggaacctttgctcaaagctccatcgcccttcaccatcagtacaaccccaagtttcagaccctgttccaaccctgtaacttgatgggagctatgcagctgattgaagacttcagcacacatgtcagcattgactgcagccctcataaaactgtcaagaagactgccaatgaattttccctgttttgccaaagcaagtggcttgggatcctgggccacaagcaaggttttcattgtat

SEQ ID NO: 56870 - DNA, 1550 bp, Homo sapiens
cagaaccatcattttatccccggaactgtctgatgcagcttatccaaacgcatgtgctttcttacagtttgtgccccgacttaatggagattgccttaaaaaagaaagatgtacagttgttacaactctgtctacagcagttccctgacattcctgaatcagtcacctgtgcttgcttaaaaattttcttgagcattggtgatgacagtcttcaagaaacagatgttaatatggagtcagtttttgactatagtataaattctgtacatgatgagaaaatggaagagcaaactgaaattcttcaaaatggcttcaatcctgaagaagataaatgcaataactgtgatcaagagttaaataaaaagccccagggacgaaacaaaggagagcacttcatgccctgtggtacaaaaaagagcagctctacttaatgcaattcttcattcagcatatagcgagacatttcttctgcctcatttgaaagacatcccagcacagcatatcacgctgtttcttaagtatttgtatttcctgtacctgaagtgtagcgaaaatgctactatgactcttcctggaatacacccacctaccttgaaccagattatggattggatatgtctacttctggatgcaaattttactgttgttgtaatgatgccagaagcaaagaggctactgataaatctttacaagcttgtaaaatctcagatatctgtttattctgagctcaacaagattgaagtaagttttcgggagctacagaaattaaatcaagaaaagaataatagaggattatattcaattgaagtgctggagctcttctgatattatcaattctccttcatagacattttataaagctcttttatgtgaactcttgcttcatccaggcaagaacggtgttttgtttgcgaccatctcagtgtcaagagaaacgtgtcagtgagtacctggaccatcacttaactgatgctccggggtaggactgcaggtttcacatgaacctgttctaggctgtggacattggtgtggagaggttctgcaattttttaaaaatatgtaactgggttgattttaagtaaaattatttgtgtattgataaaattcaaaacacatgataagaaattagacttttatcaatacacaaataattttacttaaaatcaacccagttacatatttttaaaaaattgcagaacctctccacaccaatgtccacagcctagaacaggttcatgtgaaacctgcagtcctaccccggagcatcagttaagtgatggtccaggtactcactgacacgtttctcttgacactgagatggtcgcaaacaaaacaccgttcttgcctgagattttacaagcttgtaaagatttatcagtagcctctttgcttctggcatcattacaacaacagtaaaatttgcatccagaagtagacatatccaatccataatctggttcaaggtaggtgggtgtattccaggaagagtcatagtagcattttcgctacacttcaggtacaggaaatacaaatacttaagaaacagcgtg

SEQ ID NO: 56871 - DNA, 1095 bp, Homo sapiens
aaagaggaattgatgcatggagagtgtgtaaaagaagagaaggatttcctgaagaaagaaatcgtggatgatacaaaggtgaaagaagagcctccgataaatcacccggtgggctgcaagcggaaactggccatgtcaaggtgtgagacttgtggtacagaagaagcaaagtacagatgtccacgttgtatgcgatattcctgcagtttgccctgtgtaaagaaacacaaagcagaactgacatgtaatggagttcgagataaaactgcatacatttcaatacaacagtttactgaaatgaatctcctaagtgattatcgatttttggaagatgtggcaagaacagcggaccatatttctagagatgcttttttgaagagaccaataagcaataaatatatgtactttatgaaaaatcgtgcccggaggcaaggtattaacttaaaacttctacccaatggattcaccaagaggaaggagaattcaaccttttttgataagaaaaaacaacagttttgttggcatgtgaagctccagtttcctcaaagtcaagctgagtacatagaaaaaagagtaccagatgataaaactattaatgaaatcctaaaaccttacattgatcctgaaaagtctgatcctgtaattcgtcaaaggttgaaagcctacattcgctctcagactggggttcagattttaatgaagattgaatatatgcagcaaaatttagtaagatattatgaactagatccttataaaagtctcctagacaatttgaggaacaaagtgatcattgagtatccaacattacatgtggtattgaaaggatccaataatgacatgaaagttcttcaccaaggtaagtgtaaatttgtttctgtaatgcttagaatagctttagagaaaccaaagcaaaatatgtccacccttatttctttatatgtgttttcccactatatttacacacttacaggatctactgtatagctagttaatgtgaagaaccaggtaaatgcaatgctgctactcttctgtttctaagagcgtataatcttataaaaccaattttaagtgaataaatcaaattgaatggctata

SEQ ID NO: 56872 - DNA, 1971 bp, Homo sapiens
ctttcctccaaacccctaactccctccagacacccagggaataccctctgccccacaggattgaagactgcttggcagtcctcccaatcccacacctcctgtttgccaggggaaagaacctaaagacttcgtgtgattgggaggggtggcagacaggaagaaaacatgtccaggcccctggtctccatagagaatggtgctttgtccaagaaaacgtatgagtttctgattctccgggagccgttcaatggtgaggttgatgggaagacttccttcccaaagaaaatagatcctccatgcaggatctaggagagtgactgggtgtgccaaaatatgcccagggtcctgccctcagcactagatttaatggggccaagagggtccaaaccccttgctaacataccacttctttgtttaactcctttacctttccagccctttgaggagggaccatgagaacagaaattaccttatgaaaagctacttctgttcctgctttccctctcacgtattgacggtttatttctttgacctcccagagggctgaactctttcaactctgcgctgcccagccttctcagtggacttgcccctcctaagcagagaaggcctatgaggttgcttgctgctgggaagcctggcagagccaattaccaccctctgctgcttagtgcttgggtacctcttgcaataaccagctcttagttgttccctttccctggggcttttccatttaacacatgggagcccttcccccagaaggctacttccttgttttagaggaaggtactgcccattgggagatggggacattgggacctcagcaatgaagaacccttgtgaagtaaccaggaggaatggggaaagaagcaagttgggcaggatatggcctacttccataggcttttcttttttcaggtttgatgtaagcatgggcttacatcccccaggtacatacttttacttattgtgggataacctggcactagtaggcaggtaaagtcacaaatttggtgtcttttcaccttttgactgttgacttaatagctcctctcactctgcctggagatacttcctgcctcagatgaggagccagaagaaacagagcccgacttgaatgaactccagcttcagagttcttaaggacccagcattctgggggccatttttctctacaggcaaatggaattgcttttccataacatccaaattgtaatgtggttgctgctgaaggaggaggcagcagcgaggtcctgcggtacccatggggtgatgctacttctgcatgcatctacagggcatctgacacctaacatgagacgtggcatgtgagatgagacttggcatgtgagacatagggtcactagagacccttctgggtcagaggagagagactgaattggactaaacccgtcctctgttcccagcacgtttctcatatagccctcagtcactgagggagtcccccgcaggattggagaggcacattcccttgggacagaggctacaggttggagctttttttcccctgtcccccaaccccatccccacctccacttcagaacatggcaccccacccaactggccaagtgttaagtgatgtgcttattgagagcaactccgggtgtcttttaaaatgtagagaaaaggtgacagtttaaggaaaaatatatatagaataccagaaatgccgtttacccggagaatttttttctccccatttgttttgtttttactcaatgacaccatttttagttttatttcctgatagcaaaaggaaaaaaaacacccatccctcaaaaaggccaaggtcccgtccccctgttgtcggtgatttgtttgtctttctgataggttgaaaattgtgtaataaacttgatgacgctgtcaatcttttatactgcattgtatttttttccttttgtaacaaaatatttttaaataataaatggggtgtgagctgttttatgg

SEQ ID NO: 56873 - DNA, 4433 bp, Homo sapiens
tttttttcaactccgaaacttttattgtcctggaaacgatcaatcatctgtgttagtggtacttgagggtaaaggtatacactcagttctgtcgaagcagacgtgagtgtttatgcacagcatccacaaaggcgcccacatgttctgggtccatgtcaggataaagcccatggcccaggttggcaatgtagcgatgtggtccaaagtcatccagcatctgcttcaccaactgcccgatctcctcctgggggaccaacagggcactggctacaggaggaccagcaagcctttgtcctccctatatatactagtgacaaacgcatatgtaggcatgcttctactcagtgttattcagtcattcaataaaatttatcagatccctagtatggacccaggcatgaagcataaacacaaatgaacaacagcaacaaaaagtccggtctttctagggcttatgttgtacagagtagaagaaaaggacagacagacattaaaaacaagtgcacacagaataatacaaccacaggccacaggagtgcacagtaacaggacacacagaggggccctggctgttacctcagatgcatacaaggcacaggggtccaggttgccctgcaatgtcaccgtcttccccacacactccctggaagcaaagccagcgccacgttctggtaactgcatacatggcagctcccccagccaacacccccacctcaacctcaaggcctcacccttccatggcttaccgggctttctttggggccactgtccagtcaagcccaaccacctcatagccagcttgggccagctcctccagggcaaaatgcccatccttagcaaagatgatctagaaaaaagcagatctcaggctacagagggccttgctacaaccactaatctttcttgactgtacttctgctgccctccagtggtcactccagtccatgcaggacttagcctgaaagctccacaggaccaccttcactcaacccatcccaatcctcaccatgggcactggtgccaggcctgcctcccgcaacctggccttcacttgcttggccacatcacggatgtaaggcagtgcaaacttgttgaagagctgtgggccaagatgccctgcatgggactcaaacagctgcaatgcctagttagggtatggtgaagaaaaatatgtaacacacaaagaggaagtttcccccacatacaaaatccacctcaattttccccaaatgacttcaatccctgatactgcctgaccctaaaaacccagtaattaaaaaaaaaaaaatttactttcctcagatcccagcactaactttggtgtctgaatacttagagcattaagccccactgtcagtgtcaggatgggcttggctgctcagctagatcactggaggccaaggttctttcatccctagcattaagacccctgccctctcaggtttaggacactcttgcttctcggccttacagaccaaatgcccagcctatttctctctctctcaggactcacctgggcaccagccaccacttgtcctaccagatatgggaccagagcatcagtgaggatgcgaagcagctggtgactagcctgaggtctctgatagagccagcgcttggcctgagccatggtgcttgagccaccaccctcaaccatgtatgtcatcagggtccactagagaaggatagaaagatggtgtcacagaagccagactgacccttccttttgtctaccccagaccttccagagtgatctccccgcgccccgagtccctgccctgtcccacattactggggcaccagcaaagccaatcagcggcacacgtccagccagtcgttgtcgggtaaagggtgatggcttggaacacatagccctagcttcagaggctaccacttctggaatcccgtaggcgttcttaggtcctgctcttctctttaatggctcttgggaagctgggtcctttgccaggtacccatggtcaccctcccatgcccagtgcctggagggggagaaaacatctgggttcccaaaatggaatccaggaggaaaggttctgttcagctcattccaggaggaaggaaaaggagaataaaactctgccaaactccatttctttcaaccttagtttttccctcgatccagttaggataagtgcttattgtaaaccttgactggactgatagaaggattttcaaggcgtccttggattatattctaggatcaggtttgagtgggtacctggggtacaacaaggatgtcggagaaaatgatggcagcatccagaaggaagcgacgcagtggctgtaggaaacaggagacaggttgctaggtggcagactgaaggcataaatctttccctcttttgtggacccctcacctgcagagtcagttcacagcaggcctcaggagagcgacacgtgctgaaaaagtcctgggcagcccgggtttccctaaactctgcatacagagggaagacagggctcagccttgaggccctccagagccctcccctgcccctcgaaaacttttctcctccggagttttatctagatttccagaccctgactcttacctggtaagtaacggcctgcctggcgcatgcaccaaacgggagtgtagtctgtttcctctccccaggctgctcgcaggaatgtgtcattcttcagctccggaaaaccctgaggtctggcgatcaggtgggggtgggggtaggtgtcagtatgctacgttggacggctggggaaagcgcgggttcataaggccgattcagtccaggaccgctatcctacctcctccaggccagctcccaaaccctggctttccgcccgttccgcctcctctctgcctatcagtgcacaaactccagaagggcccgccctggggcctcttccctccacttagtctctactcttccaagctcgaagcaaccagagggactggggggagggaatgaaggcccactaaggatagtttgggggtcttcgaactagtgagcctcagaaaccgggaaatgtcactgggctggttcaggggctgagaaatacccaggctgggggataaagagggatcagagttgatggtcccagaatgaagatcctggttggaaatcctgaggcatcccttgaattaaggccctgggatgaacatctcaaaaatccatggttttaggattcaggatccagctaacggagttcaggttgggaggttctccagggtggggaaaggggagtagagggatagagtcctgagttggaagactcaaattagaagcccggctagccacaccgcgtgctctggagaactcaccccaacccattcgcttccatggtcagctgtctgtaactgcgagctcaatccacaatttaacctgaatctgagcctgccccccagtccaggctccgcccctttctgtagggaaccaagagcgtcgccatgttgaagatcacatgatcggactccagcgacagctccagggctgccctgctgctgccgtagacccctaccttttttcaccgtaaagtttgctgtagcgacgaaacaacaaaggcccaaaagaaaactccgctgtaaatgtatcttacggtgacatgaggaatttgttctcatctgacagtctgggtatccggagcttggcgcaagtcccaactatgataccaacagtcttatccagccaggtccatactatagcctggacctatagtaggtgcagaggttagctctgctcaagacaccccagcctttaaggagctacaagactggggaaacagaaatcagcaatcacattaaaatgaataatgatctccagtgtccttgggattaggagtgtcaaacagaactcaaccctaatgactcaagactcctgtcagtggcaggggaaggggccattgtctcaaacactttaatcacaccacccataggatagggagtccagcagattcgctgggagtgggaggaaaaacagcaggccgaagaaccagaaaaatgactgttggcaatgacccaggctagctagaatggtgacttgaatgagggtagtagcagtagagataaaatggtagtcacaaggaaatggagagagggagattgatcaggtagcaatcaccaatcttgggtttggtcggctgggttagggtggcacagagataagtaatatggttgagtgtgggagtacacagtccaatacagtgagagctggggtgcgcttagtccagaacatacggcaaaggctggccaaaggcggggaagggcgtggtgggaagctctgtccgcggtcgcgccagctgactcatggcgggtccatggcccggcgcggtgctggagtccccccggcagctgctgggccggtgcgcttcttggcagaggtgagagcctcgcgccgggcggcgcctaggcagcgctggctttcgtgccgcgagaggtgcttacgaagctt

SEQ ID NO: 56874 - DNA, 450 bp, Homo sapiens
  misc_feature (1)...(450): n = a,t,c or g
aaacntttatgacctgattacgaatttaatacgactcactatagggaatttggccctcgaggccaagaattcggcacgagagaaacatcgagtcactttgcctggacaggaggaaccctgggacatccggaacctgctcatctggatcaagaagaatttgctaaaagagcggccagagttgttcatccagggagacagcgtgcggccaggaattctggtgctgattaacgatgccgactgggagctactgggtgagctggactaccagcttcaggaccaggacagcgtcctcttcatctccactctgcacggcggctgagggcccttctctgggcctgggcacccttagaggggagaacgaagcaatcagacatccccttgggccctgcttccaggtctccctgtcccccttgnctgncttnttncctgntctgcccctaanctccctcc

SEQ ID NO: 56875 - DNA, 1390 bp, Homo sapiens
cagcaaagaaggggagaagcgcaaccgtagtctgcctcagctctacagcaggatttaagctctggagtcagactgagttgtaatcctagctctgccctcttgaacaagttacttaatcttgctgtgccttggtttcctccgttttacaaatagcgtcatctcatagagtttttctgagagggaaatgtgaaatgctgcctccagtgcctgcacagtgtctgctacatgtcagctcttaccctggggaaaaggctggtctgtgtgtttgctgcttagacagtggcaagtccgtgttctctagaagagcctgggagatcaggaagactgaacctgctgccgtgctccgtttctggcaggtttggacatggcacctttctggctgtgcctggaaaccatttaccagaaagtgacgggcaaggagctgagatacgagggcctgatgggcaaacccagcatcctcacttaccagtatgccgaggacctgatcaggcgacaggcggagaggcggggctgggccgcccccatccggaagctctatgctgtgggtgataaccctatgtctgacgtatacggcgccaacctgttccaccagtacctgcagaaggcaacgcatgatggggcgccagaactaggggccgggggcacacggcagcaacagccctcagcaagccagagctgcatctccatcctggtgtgtacaggcgtctacaatcccaggaacccacagtccacggagcctgtccttggaggaggggagcctccattccacgggcaccgagacttatgcttcagtccagggctcatggaggcctcccacgtggtgaatgacgtgaatgaggctgtgcagctggtcttccgcaaggagggctgggctttggagtgagggcagtgcggtggaggtgagggggtgagcctggacctgtgggcgagtcccattggctgggctctggcctgatcactgggctcaggtcagggcttggttcccttgccacccttcttgctgccccatgagtgtggcattactggtcacttggaagaagacagtgactctttttccctgctgggtagcattttgtatggaacggttggaattttctgggcccagttcccacgtgcctttcgtggcagtctaacctcaggccattctcttcccctgtgtgcctcagtgtccttctcatttcagtagggacttctgaaatgggggaggcagtgtggaatactgtggatgtctgtgcagagcctttgccggcactgaaggcatggcactgtcggcagagtgtcttaacaccagatgctactttttactgtattgtagtttattgcccggagatgtggggctttttttttaaataaaataatcataataaatgttcatgatgctgaaaaaaaa

SEQ ID NO: 56876 - DNA, 1355 bp, Homo sapiens
taccagctatgacatgattacgaatttaatacgactcactatagggaatttggccctcgaggccaagaattcggcacgagtgcaatttttaatttttgttaatatcaacagcaaaagcctagtgcattgggagatgtgcaacctccctgaaaatcttttctgtttctggagtacttcaggggtggcctctggccccagagcctttgccacagtgctcccaccagcccccacctcatccgtctgtttgcagagcctcatctacaggtccccacgctgccttctttactcactctgcgcttggccgttttgttatttggcttagtctacattgggcggaagtctgtgtgcacagagtgggtgttccttcgagccccttccactcagagggccacacccagcgatgccagtgaaaggtgggcacagcctctcttcagtttctcctgactgtgatctcactggggtagaattcccctgagagaattccctcactcacggctccctttgccagagtcagtcaatcaggtctgatgtgagcaatttacacacttgtctcagaaagtccctcagggtttgtagaggactgcaggggggcatccgctgcagactcagcctttctctgcagccatcctgcagtgggggtgagcgggcacaggctgagaactgctcttgggtggtggaagcaggtgtcacggtgcaagtctccccctgcacccctcccccagcttgagccgtgtcacccccctctccctccagcatgggcctgtgtctcaggctctctggaaggtggccctgccccggaccctcttgcaggtgtcctggtttgacttggaactagatggccatctttccaggctttggtggcccaagagcagtctgggtggatggaagtggctgtcccctcctctccagcccctgccccacccactggtggaggtgctaactagcagggacgtggcataggatgggagctgggcgtgaggtgcttggggtccattctttgtccctcagcttctcagagtccggccagcccttgtgttcccgtgccccacactttcctcctccccactgcagtgagtcaatagtccagggtggggcctggcctccctgccctgattggggactcaggaggtgaggcctggggggcttcctgccccctccttgcccacctgcctgcccccgggcagcacgggagggagagcagggtgagcacgcttgttggtttcagatgcactttctgcttgcattgccgtatctgtgcgttccttcatcctggtcctggctttatggaacaccatgtttttagcatgtttttaaataaaaacggataaagtgtcaaaagctaaaaaaaaaaaaaa

SEQ ID NO: 56877 - DNA, 1470 bp, Homo sapiens
ttttttttttttaactagtcaaagtagcttccatttattcacagttttaaaaacatttttcaagtttagtcaacttcccaatataatcaaaggacaaaatggcaataaaaaatatacttcatcagatcttagagttatacaatcagttaaaaaatagatattgggttttaaacaactgacatatgctttccttttccccctttaaaggttttcagtagtctatctgaaatcactgaatcacttttcttctcctccacagaattcagaactttttcacccggaactggagaaggagcactccgtcattagctgaggggaatggcaaggatccaggggtcctccatgactacacaaccatcctcctgagcacctttaggaaatccaatgctgtctgagaagcagcagggccagatccagatctatggaaaattaatatctgcagtgcttcctgaaggtcacctcagtctttatgccatttcaaaagctagcccggggcttgagaagaaaagggaagtggcattccagccatatttggggtgcaatttaattttcattgcgtacctcatgaacaggggcaataacacattctaggacattcttccagcccacccactcttcctctttctcttcttctctttctctaacgagtggtagtgacaggatgcaagtctgcgctcttggtagataaacggagaagcaggagaaagaactattccataatcagttaaacggggagttttcagaatcctgtcttgtcatttaagtgacttactgaagtcctactaagttattgagactatatttctttactttttgcactgggacattgaagcattgagacaccagaagtccaaaagacgaaaaatgtgaaaatcacaaatttaaagaaaatgtagaggtctcagttctgaaacaccatgcttcaagtgttgtcatttttgagaacatttttaaaaggcatctaatattccaggacatacggttcccattactggcccagcaggtacacagggtctcccactttgatggtccctgggttttccagcacaaaatactgcccaaagagtggtgattttccatataactttcgttctgaagggtcacactggcgataactcttcagtgtttccagcggttccttcctgctcatgacaccggtgtctgggtccactgtggttaaaatgcatctggaacaagccatcacccttttcagttccacgtcaccaataagaagctcatcccaagaatcctctgcatagacatcgcatcctgaaattacaatattgggcctgaagttggttgctttaactttcttctctagcctggagttgagatccgccagcgacgcctcagaaaggatcaagaatgggctggtgtctgagtaagcaatctggtccttgggtcggaacaagtctgctatttgatgaggacgtctcggtcgcatgtgaggctcgaagtgcaccaggcggt

SEQ ID NO: 56878 - DNA, 1403 bp, Homo sapiens
gccaaagatcatttttttatatagacttcagccctttgtaaatactgtaactggggagtatagagtagaaaaaaagtatagttaaaacatttgttctacaaattaacctttaaaaatataattactgctaaaaatagagtgctgttacacttaaggaaaattagtgccattttggaaatgagatcttgtgccataaatacagctgaactgaatataaatgttcacaaattaatgctgtcaaaggaatgagtaaagcagaaaaacttttaaccagcaacatttcaagtacgtagtgtgatcaaacatgatcatccagaatttttatatttttttctttgtacagaggttacatattctgggtgttcttttataaaggaaacattttaaatcccacaaattgacactttctatcttcaatggactaagatttttttggtcagtaatctctgaaatttccttaaattatatacttaacatagcagagaaactggattgtttttgtatataagactgcttccacctgaaatgctgtcataagtactgggggggtgggggagtgcccatcttgtacatgatattcttagaggtaataaggtaatgatgcatgaatttattttataaactcttggactatgtatttgacatgtaaaatatgtacagtattaacgtcaaccatctctttaaagttagcctataaatattgttgtataattttctttggtcagaaacacttggactgaatagtgacactcggtaaggattttcagtgccatttagcaaaacgtctttagtctatgcaactagcaaaaatctgcataatgcaacaacacagttttcacacttcaaattttacatgaggggttcttcacgattctcctggaacccagtctagcaaaatgagaggaaaggccctagggagatttatttctgttaaatagttaactctgctgagtatgacaaatagtgtctactatctcaaccctccaaaatttgcagagtgttgggactgtcatttgtgattttttttttttttttttggtggggtagttgaataaaattgggcagctaaatttttcagttccatgtgcctcccaaataaaaaacagaaaataagtagtttttgtgaattgacttgcagacaaagtagaaactgtgctgcatgatgttattttgtaaacagatgacattttctgaccaggcacatgccatccaattttctgtcaatcacactgttgtataaagcagcagaactgaaggggaaaaatgattgttgtatacactgaattgctttgcatggtctcatttgagataattgatgtaagaatcctgacttttttatatttggaaacatcaaataaaaatggaaaaaatgatcatggctttaaaaaaaaaacaaaaaaaaa

SEQ ID NO: 56879 - DNA, 1067 bp, Homo sapiens
ggctcagttccgccatggcctccttggaagtcagtcgtagtcctcgcaggtctcggcgggagctggaagtgcgcagtccacgacagaacaaatattcggtgcttttacctacctacaacgagcgcgagaacctgccgctcatcgtgtggctgctggtgaaaagcttctccgagagtggaatcaactatgaaattataatcatagatgatggaagcccagatggaacaagggatgttgctgaacagttggagaagatctatgggtcagacagaattcttctaagaccacgagagaaaaagttgggactaggaactgcatatattcatggaatgaaacatgccacagggaaactacatcatttattatggatgctgatctctcacaccatccaaaatttattcctgaatttattaggaagcaaaaggagggtaattttgatattgtctctggaactcgctacaaaggaaatggaggtgtatatggctgggatttgaaaagaaaaataatcagccgtggggccaattttttaactcagatcttgctgagaccaggagcatctgatttaacaggaagtttcagattataccgaaaagaagttctagagaaattaatagaaaaatgtgtttctaaaggctacgtcttccagatggagatgattgttcgggcaagacagttgaattatactattggcgaggttccaatatcatttgtggatcgtgtttatggtgaatccaagttgggaggaaatgaaatagtatctttcttgaaaggattattgactctttttgctactacataaaagaaagatactcatttatagttacgttcatttcaggttaaacatgaaagaagcctggttactgatttgtataaaatgtactcttaaagtataaaatataaggtaaggtaaatttcatgcatctttttatgaagaccacctattttatatttcaaattaaataattttaaagttgctggcctaatgagcaatgttctcaattttcgttttcattttgctgtattgagacctataaataaatgtatatttttttttgcataaagtaaaa

SEQ ID NO: 56880 - DNA, 2213 bp, Homo sapiens
ttttttttttttactgttcttaagtaatttattttaaaattataagatttacagtgccttgattatgcaaaatagcataatggaaattaaaccaaatcaataaaccaaagagaaagaaaacttaattttctctagtatccatacttaaaccatctttgtaagtatctgatgtcccaaccatgtcttatgtagaaagtataatcgtttcaaatgtttcacttgcaggtttaatttctcattttcaatttttatgaactgtaatgcaatttcaaatcctattatacctagtgtttatactgcaacagcagcaaatctcacatgtgtaatcaaatgtggaactggggcacagcttctagctgtagacagaaattatacactgcattcagtccaggagagtacattacattaaccagagcgtagagtttagtacacttattgcagggttggtatttctttccctctgatctgaatcagctgagctgctgagcagacatattactgctgtggatagtaagactgctgtgggggctgagggaaggggtatgaaggctgctggggtcccgggtatggagcctgtccaggactctggtgatacactggtggatatggcatattatactggccatacgcataaggattatagcccatgggcatgggcatttggcaatacccaggatatcctggataggtgggatagggtggtccctgcgcctgtggaggaggagctgagccaggcgtttgtgatggagctggcgcagcagtcccagcccccactggagatggagcagtagcagaaggagctcgatttgctggaagcacaggtggtggaggccctggctgggggctggggcttagtaggcggcatggttcttggcgctggagttggaggagttggtgcatgtcctcctgctggtaaggactgatacgcaggtgtaggaattgaaggagcactaggttctctggcaatgctttgttgcaagtcccttaagagttcatctctttctgtcttccgtgcaaaaactatatcactgcatttgttctggaacctgaccaggatttcagtcaactcattgtaaaactttgtgccttccttcaaattagctacaagttcaacaaagttgtcatatgcagtagctaaattcttcaaaacttcttctcttaagttagcttcattattagattgtttcatttttgaaaattcctgatgtgagacctgaatatttttaagaagtccctcctgtttctttagagattcttggactttagttgtaagacctccatagactcgatctagttcagtaacagaaagagcttcttcatttatcacaccatcttgagccagggctgtcaaaaacttgcttgtcatgtcaaaattcacagatttcaagtcattctccagaccctctctttccttctttacttcatcaagatttgacaataaggattttaagacatttacaacctcactgccctgccatggtctttgctggattagcagaagggatggcagcattcagctcaggctctggccttacacaaaagcacgatggtgtcacgatgagactggtaacattctttcacttgtccatctgccctgcacagctttatctaaaactgttctgaagttggttccctctgctcttaaaggcttatacagttcattggatggtgtcctttgccaacgttccttaaattttgctcttaaatcattatcggttgcttcttcttcatccaacaaccttaatgactcatctaggatttctctatttcgttgcagtaattcaggcagttctttaatcaactgatcaacagtctggatgcctccctgttcaatcacagatctggatttagtcaatatagactgaggtacagtgtctccagacacatcttcaattgctgctggaagattaagggaagctagcaccccatttgccaaagtggtggcttctctcatctgagcaattgatctgttaaccaaatcggctttcctctgattataggcagccaaagactgctgtactgacacgggaaccatcttctcaaacagatcagtaaatttctgactgatgggtacattgaccggggtagatttcacaagtgtggctttgccaataggatctagatctttaaggtctggaactcgatcatgataaatgaagtcattatccttctttgctgcagcaagggcacgattgattttgtcagaaaaatcc

SEQ ID NO: 56881 - DNA, 1330 bp, Homo sapiens; identical to SEQ ID NO: 13088
  misc_feature (1)...(1330): n = a,t,c or g

SEQ ID NO: 56882 - DNA, 452 bp, Homo sapiens
  misc_feature (1)...(452): n = a,t,c or g
ttgnaancnctatgattgattaccaatttaatacgactcactatagggaatttggccctcgaggccaagaattcggcacgagacctttgagacattctggctgagccaatgccttctccctgtcagagtcccccagagcagagagggtcaggcttccctggaccttggctcccagagcaagccaaaataaagactacactgttgccttgggggcttgtcgggccagggccaagacggtctgcgtgctgcagggccaggacagaaatagccacacatgccggtgagaacaaagagcctctttctttctcatgttgacatcgaccttctgtgccaagtcctttgggtataaggatgctagggaattcctataggcaccaaacagaaggaaagctaggggcttggactactgggtataggacttgntntagctctnanggcctanccaagcttaa

SEQ ID NO: 56883 - DNA, 450 bp, Homo sapiens
gaactgcagtaagtcccgcttggccctggagtccacgcggattttcgaagctggggctggcaagagggccgcgtggacaccacgctccagtcgtcagcccacttcctagctgaacagcgcgaggcggcggcagcgaggccggggtcccaccatggccgcgaattattccagtaccagtacccggagagaacatgtcaaagttaaaaccagctcccagccaggcttcctggaacggctgagcgagacctcgggtgggatgtttgtggggctcatggccttcctgctctccttctacctaattttcaccaatgagggccgcgcattgaagacggcaacctcattggctgaggggctctcgcttgtggtgtctcccgacagcattcacagtgtggctccggagaatgaaggaaggctggtgcacatcattggcgccttacggacatccaagct

SEQ ID NO: 56884 - DNA, 1697 bp, Homo sapiens
ttcatgcccaaatttatttttattttgcacacataggaaacaggatcctatcaaaagagaacaaaaaagagaaacgagccaattgttgcagaggaaaagcatgcacagatctgcttcaagtttactctgaaccacggacgctccgggaattctacacaccaggagcttgtctcactccaggaagtgggcacaacccaccatccacacaatggaaacaagaatggccaggaaatgtcaccaaagtgggacttccatatgcaggatcagcgttcacagtagcacaattctaaccaagttcaagggaaaacaaactctgtctcacacaaacatgggaatacaaaattgttgagccctagccatcactgtctcttaacataatttgctatcaaaaagacaaacgaaattttagtcacggacttttgggtgcctattcagctgcacccgattccaggggcagcttagtgtgctttttcattacaaaaaataaagacattaaaaatgcaaaacaaatgacctggagggaagaggagtgtttggacccacgcagttgtcttggttgtaaacagtgaacattgtgctttgttgtctcatttagatggaggcctgcagcatgggaggtaccacgctggcagtcagcagtcacaccagggtggtcagagacactggtggcagcatctgtgcttgcaactgcattcccagggtgtctgttttggttcccaagtgtctcccacaaaattccccaggaggttctccgattaaatgtcctcagagtgaaaagcatggacaccaaatcactccgtatccacttccatgagatgtcttgatgctccagttcaatgagtaacaatttctcaagaggctctgattagttcattaaaaaataagcacccccacctcattccccgtgatacagcacatctagtaatctaggcgcctcagctaagctgcatagctcttagcacacaggacaggtcagcgttcacacatcaacactataactatgcggcggaactagctccccgctagccgtcaactactcaggagactacctgtgagatcctggggtgagctgtgattcctatccaggaatgtgcatttccgaccacttcttctttattctaattatgacaacatggtcagtgcagttgagtcagtacttctcctgtcttttcccagcaagctcctcctccttgggagcccagcacacacccgcttagacccaacacaacctcagagagagacgcctcagctggtctctctccctggaagagtccatgtgacttcccagccagatgtgccccgttttgaaagcacccttcagaacccaccactggagctgcctgagggaaggagacccccgggcctgagaatgccctggagaggcagtgatgtccagggaagacacacacccagtctgatttcaaagggcaggacgctctacatgcacttccataaacacaccaaaaaaatgggtaacagtcctttctccaaatcagaccaagagctcacaaaatgcaatgtctcagtttggggcaggaagtgatttcccatgaatttaaataaatttgcttagtggatgtcagatcactgtcaggcctccaaggcaagcctgattctaggccccatcctgcggtgagagctgcacgtgctaccctctcctggcggtgcaggagaagtctatctttaggatatgaaca

SEQ ID NO: 56885 - DNA, 2677 bp, Homo sapiens
ggcggtagctgaggggttgaccgagagacccagttgaaggcctttacgaagtgaaagaggccgggaatcgccccctacccgcttctcgtagtcctgggagcacagcagaagtgtttttctttttttaatgaacaagtaaaccatacaaattgtcaacatgggacggagatctacatcatccaccaagagtggaaaatttatgaaccccacagaccaagcccgaaaggaagcccggaagagagaattaaagaagaacaaaaaacagcgcatgatggttcgagctgcagttttaaagatgaaggatccaaaacagataatccgagacatggagaaattggatgaaatggagtttaacccagtgcaacagccacaattaaatgagaaagtactgaaagacaagcgtaaaaagctgcgtgaaacctttgaacgtattctacgactctatgaaaaagagaatccagatatttacaaagaattgagaaagctagaagtagaatatgaacagaagagggctcaacttagccaatattttgatgctgtcaagaatgctcagcatgtggaagtggagagtattcctttgccagatatgccacatgctccttccaacattttgatccaggacattccacttcctgggtgcccagccaccctctatcctaaagaaaacctcagcctatggacctccaactcgggcagtttctatccttcctcttcttggacatggtgttccacgtttgccccctggcagaaaacctcctggccctccccctggtccacctcctcctcaagtcgtgcagatgtatggccgtaaagtgggttttgccctagatcttccccctcgtaggcgagatgaagacatgttatatagtcctgaacttgcccagcgaggtcatgatgatgatgtttctagcaccagtgaagatgatggctatcctgaggacatggatcaagataagcatgatgacagtactgatgacagtgacaccgacaaatcagatggagaaagtgacggggatgaatttgtgcaccgtgataatggtgagagagacaacaatgaagaaaagaagtcaggtctgagtgtacggtttgcagatatgcctggaaaatcaaggaagaaaaagaagaacatgaaggaactgactcctcttcaagccatgatgcttcgtatggcaggtcaagaaatccctgaggagggacgggaagtagaggaattttcagaggacgatgatgaagatgattctgatgactctgaagcagaaaagcaatcacaaaagcagcataaagaggaatcccattctgatggcacatccactgcttcttcacagcagcaggctccgccgcagtctgttcctccttctcagatacaagcacctcccatgccaggaccaccacctcttggaccaccacctgctccaccattacggcctcctgggccacctacaggccttcctcctggtccacctccaggagctcctccattcctgagaccacctggaatgccaggactccgagggcccttaccccgacttttacctccaggaccaccaccaggccgaccccctggccctcccccaggtccacctccaggtctgcctcctggtccccctcctcgtggacccccaccaaggctacctccccctgcacctccaggtattcctccacctcgtcctggcatgatgcgcccacctttggtgcctccccttggacctgccccccctgggctgttcccaccagctcccttgccaaaccctggggttttaagtgccccacccaacttgattcagcgacccaaggcggatgatacaagtgcagccaccattgagaagaaagccacagcaaccatcagtgccaagccacagatcactaatcccaaggcagagattactcgatttgtgcccactgcactgagagtacgtcgggagaataaaggggctactgctgctccccaaagaaagtcagaggatgattctgctgtggcctcttgccaaagcagcacccaaatctggtccttctgttcctgtctcaggtacaaactaaggatgatgtctatgaggctttcatgaaagagatggaagggctactgtgacagcttttgatgccagaaaaggcttctgttcacaacagtggcccatggagaaagaggctcttattaaacttagatgaaagagctgcttccattgtcagggtattttctaatttcagttcaaggaatatcctaaaatttagccttgttcagaatttactgcacataaaaaagggtatttcatccagaatagatcagttattgaaagcagtgctgctaacatccattccctttcataccaccattttcaccctgtttcttcccctcctccagttctttggaaatttgtgatcgggggatcttagttgcttatttgttttgactcttgtgtgctgtgggcactggagtagagatttctggagaaaaaaaaacagtttatttcatcttgccttttgtgtttgagttatttttaatattttcctgtaaatattttgtaatattttacttgtaatgaaatggatcacaatgtcatttcctaatacaaggcaggatatgtgggaagaatatgtacaattatttgattaaaattatttcccactgacctaaactttcagtgatttgtgggaaaaataaataaatgttctacaccaagat

SEQ ID NO: 56886 - DNA, 1194 bp, Homo sapiens
acagcctccacccctgacccccatcctcttttcctacctctctgtttggtttagaaattgctcaataagtcatttggggtttggcatcctgcccagccacttcccaaacatgaagacctctctgttgctttatgttgtacatgccccatagccatcccaacgtcctccccagtcctctcctgggcaccagcaccttagaagttgttggcagaaggcacttaaactgtgggagaagtgtgcacacctttgagtcccttccctcaaggttaaagctcctgtcagactctcagaagggtctgtgggtgttgtatattagggcaaacaggggaaagcttagaggtccttctatatgtgttaataagctgtttctaagtgtttaaatttgaaaagcatcatgtttctcatgatttatgggaatgaagcaagtactgaaatcaaattaaatactccctgggtcctgggtcaagtttgaccctagccctgggggtgaggcaagccccctcctatgaggatgagcaaaaatactactctcttcgccctgagttgctttctggatctggggcttcaggacttgctgcttcagtcagcctttattagcaccaaagactttatgaagatcccacacacagacacacatcccttcccgcctcccccctgccttcagtagggatctgggctccgtgggctgggagggaccaacccctatagtgggaatggcagagcttaacgtgtactgcttgtgtgtgtgcgtgagtgtgtgtgtgtgtatgagtgtgtgttctgcctcccaccctctccccatctgctctgggtatttttgtttttgtttagttttaggtttacaacagagaggaattaatttatcagcagcctaaaactgttgtgtttttcttatggtttaaaaaacgccatgtcattgataactccctttctcccttcccttctcccggtctgctgatcactctttcatgcctgtgtatccagggtgctctgtttccccaccgttcccaggtgtacgaggcagagggccgggacagctttcctctcagtcattgttcaccccacttgaaaattcagacaagaaaactttgcttaaaagatttcatgtgtgggaaccacagttcctggctgcctttctcctgtgtatgtgtaaattccttaataaatattgcagggaaggacaaaaaaaaaaaa

SEQ ID NO: 56887 - DNA, 2557 bp, Homo sapiens
ttttttttttggtcttttatggtcgattttgtcttttttcttcttttttccccattttttcaaggatggaaaggtcagagaaaaataaaataaaacatctttcaatagtctttcctggtaaaagcagcgtctctctgggctggggagtaaagggtgtggggcaaggggagtggggagaggctgaaaccttcccccaaaccccagttttagatcctttggtttccttctcccagaagatggcagaagggcatggtgggaacagcagggagaaaatatggtgatgacaaaccccagatgatcaaggggctgatgctcctggggcccagaggtaccaccagagccttctatgagacagtgctgggcaatgggggggcccgcactgtcttgtgggctgcatagttggcttgagggggagcaggaggttaggggtggggaccagggttgcagcctactagcctcgggcagggctgcagagtgattttggtaatccagatgaactatcaataatttaaaacttgatatatatatatgtatatatatataaaaatctcccccctttccctccccccttagaagaagctaggatgtcaagagtcatggagagaggagggggaaggggatgtagaggctcctgcccaggggtacctctgatagcccaaatggtgtatacattgctactcagcacaaaggcctgtcctagtaactccaggcctgtcccttcattgtcccctctcctgggactgggcacccccatggactcttacccaccctacccctttcccccctcaagccccagggctaaggagcttttcactttcccaaagtctgtgtgttcgagtgctggcttgtccatttggcatcttcccggacaggctggccggtgggtggtgtagggggttggctgatcatggcagcaggcctgctggaagactgggaggggcaccgcttcctgccctcaccgccgccacctcctgctaccactgagtgtcgcttgtggttgccctcctcacccatggggggatctactcggaagtcttcaagacgtcggaatttgccgaggtattcttgcagtttggggtcaatgtccaaatttttggctttggaatatttcaagaaggcccagaacttctccagcccatacagttggccagcttcatagtccttcaccgtttcctcctgaaaatccttgaatatgtccagccggaacttcttttccaggccataactgtagtatcgaaaaaggcactccaaaccatatctgtagccttctttggcgtcctccagagccagctgcttgaactcctcatacatctttttgttgaagtgatctcggaggaagaaggaccagaagcggaagagtgtgttcatctcctgagactggccaatgcccaagcgtttccgctcattaaggcagcgcctacgatacttatggtagacgtgttgtgtgaagccattttccttgagcagttcatgggaaggatgctggaacttgggcaatgactgaggggtacagccatagctgccaactgtaggcgtcccttctgaggggctggagctgatggaagcagtacggggcctgtgctcacgggaatccatcacccagcccacatggctctccaagggtgggtttgaactgtgtcttgtctttctttttcgaggcatcttggcatccagtgtccgtccttctttcaccactgggtaaaaccgtgatgtctggcttgagtctttgagctgtggtgtccggggagtgcgaggggtcctggtgttgcggtagtttggtgactctgggacagtggttggtagagagcgggcgatggtggagggctcaggagcaccaaacaacttgttggccagggcatccgtaggaacttgctggaaccgaggtggcccaggaggaacttcctggttgggatccacagggggctcaggggtcagtgtgtcaaactgctcccggctgatcatattgacctttttgaagttctcgacttcttgcttgatctgggaatactcaggttcaaacttttcagcccacaggtcctgctcatagtagaagaggccatcattaatgaccttggccagttcggcgctcatcttggcacgcgaggtgtggttgcctgtgcggtccccccctgggtgccggcgcatgtaatgtggtgtctgggtgacaatgaggatcttgttgacatccctgtcatcaatctcatagtcagattcctcatcagaccaggcagtgaaggtgttcttccgcccatccatctgctccatctcctcgtcaaacagaaaatccagttcctcttgctcatcctgatccttggacatcagctgctgggaaggcagctgctgaggcagagaggtcaggtgggaaaatctggactcctctgacttcttgggccgtgctggggatggccgaggcctcttcttcacttcaatccagttctcagaatccaggtcaggcaggctggcagacaggcccttgggtagtgtctttaggttgctgacctcctctgttttggttggcactggggtgactgcacgaggagagccaggtgccgactcc

SEQ ID NO: 56888 - DNA, 1563 bp, Homo sapiens
gagaacctaccggaagatcatccctaagcggaaccgcaatcagctgtgaagccagcaccacctcagagacactgttccctgctccagggtagacctgagatgaacctccctggaggagacttatttcaatgagtccaccatgacggatgaggcacctcctttccctgctgaaggacaaaccttgtttccctgtggccctcattcttgtgctccctgaagctttcctaatattgctgtgctccccaccacccccatggcagtccctccgcagccccagtccctggccacgcccaagggaagagggaggtgaggacttgactttcctcccagagctcagcccatgtcaccctccaggccccagaatccagagtggcctcatttcctagacttgctgagaactcagcacttgtttgagaaccagtgcttatgtggtgtgcccttggcttctgggggagagcttggggcagcagaggcccctgggcagcccagccaggggagccacagccccgaggatggtcttgctctgggaattaggtgaccttcctggggaggccccaggagagtgaatcagggactcttgagaaattcctaaccagcctcctgtgacccagggagcagggtcgctaaggtcctgcccactgaggggacagccttctgggcagggacctcggggggcttcaagggctctgcacggctgtggggccctgtgcctttgtctccttgtgtctcctttcccccgaagtagatgaaacagtctcacatacccaactgctcatcaacagagcagagctgatggcatgagtgagggctgggcggggtggggcctccagagctttgcagggaaccctgggaaccctaggaacaaggagcctttgttccaacagagcagagaaggaggttctctatgttcagaccactggagaggatagagaggtaaaaggtggcgacagtttcccttaggggtcctgcctggcaggagccacagctcaggagagttgtgagggatgggacggaggctggcgaccaggcgaggcctaggccaggctcgggagacttttctgtgctcctttctacacatgccttaaaccttccttcctgtggggtgcctggaccccttccccatctctggcagctcagagggtctctgctgctctcccctgggaaatcccctcatcctgccctctggctgcctcccagctgggcttgttctctgagggaggttccggagactcatggacttggggctctgcctgtaggaaggaggctgggccggagggaccagccaccattgtctctgttcagccaagtgtgcaagtaggctgcccgccaagagggggcctctgctacccgctgctgcctgccggctgacacactgcctccccagccttcctgctaggccaccctcctcccttcccatgcttgtaaccagctctggggcttgcacctccacaaagtaaggttggcccttggaggccatgtttgggtctccggccagggcctagggctaggccactgccccaatgggtgcacaataaataacaggtcaacaaagaaaaaaaaaaa

SEQ ID NO: 56889 - DNA, 628 bp, Homo sapiens
ctgcattggcaaagttaaagggataattaactggctcagagcttatgtgcagagttccaagccccaaagttaatcctagaaccactcgataacaccaataaaaatatttatttcacatctgttatatatctggaaaatgttctaagcatcttacacatatttctcattaaatccacaggtgaccattgtgaggtagatattttgttctaattttccagatgaggaagctgagaccctaaaaggctgaccggttccctgatgtgttacctgcttctgctactgatccaaactgcagaacttctcattcatccccaaggcctccaggcagtatccaatggggaatcagctctaaaaggaaccagaccaacgttttccagccccttcattctgtagcttccctctgtgtgaggaaaggatagaaatgttcaggacatcatcatacaggctcctcatctacaaagttccagtagcagtgacgcctacacggaagacttggaactgcaaacaggctggggtcacctcagtgacatctgacgctgtccaaccagaagttcgatttttgttctgggggtgaaggaggaaacagactgtactaaaggactaaaataatttgtctatactaaaaaaa

SEQ ID NO: 56890 - DNA, 1088 bp, Homo sapiens
ttttttttcatgaagaggatgggacctgtttggcccatgaattcaattgactcattggccccatcacaagagatcagtgactcaatgctcagcacccagctggcaatgtgcccaggaccccctgcacttcccaagcagtgagcgcacacccaatgggtaagcccatgaacccagtttatgacactgcgttgggcaaaactcctgtccccagcactgagcatggcctaagccccatagcagctggcaagggacccaactgccctgcctgcctctagctcccagcattgctactgtgcaggccaagggtactgaagttagtcccactgtcccctgtccatgcatgttggagggaccaggccatcgtggtggggtgggacaggagtatagttgtggccaagggcttgtgagtgggcctcctactccccagcacaggtgcaggaggaactctggaagcactgctctctgtcagtgatacagcttccaaggtgttcttgagtagcagacattgtccctcagaaggggtgaccccacgggcatgcgcaccctgttccagcgggggccttttttgtagatgggcttgacggagccaggagcccagcgcgtcaggtaccggttgagttggggtttgctcttcggaacaactccttcaggaagccgaggccttgtgatttggtaaatagacctgctcggtggggcccatcttcaacaacactccctcgaatcttgcggtgttccttcccctggcaataggccctgtgaatctttcggggcaagcaatccctcccatgaggccggatgaaactggctaagcaagcagaacatcgtccatagttatacttgtgcttcaggttccaacggcagatggggcactggcccagaggggttaggaggatttggactctccttgggagtcgctgtgatacggccttcaattatagttgtcttcccttcttgggtctccaccacttccctgaacccgcgagctggaagccgagacccagctggtcgctgccgggcccgctagtagcccacggagaagccgcccacagccggacaccagagccttgagggccgccatcttcaaaaac

SEQ ID NO: 56891 - DNA, 605 bp, Homo sapiens
atggctgctatatacctggtagatgtgacccaaactgcagttattcaccagtattttgccatcagttatattccatctactgtctttttcttcaatgggcagcatatgaaagtggattatggatctccagatcacactaagtttgtgggaagcttcaaaaccaaacaagacttcatagatttgattgaagtaatctatcgaggagcaatgagggggaagcttattgtccaaagtcctattgatcccaagaatattcccaaatatgaccttctctatcaagacatttagtacattaattgctgtcaaagatgaagaagaaggcacatcttgacacagtacctgaatccagctgtgctgtgtttctggagtcctttggaaacatgtgtcccagaggagaagaggtttgacttgcgtgtagaaaacccggcccctgaggaaaagaccccactggttctctgatgacctgggatgcctaactgtctactccctgcaagcctcagagcagccaagtcattggtgttcattttccccacagtgatttttgtaacttctctttctaatgtttttctttatccctttaatacagaaccctcccaaacaaaaaa

SEQ ID NO: 56892 - DNA, 1177 bp, Homo sapiens
taaaaattatctgctagggatgataggcctgggtttctcgttgacatctagatgggcctgattagagcagtcatctcctggtaggcacaaaataatcaccaacagtaatgttgtatctgtaatgtttgtttgctttttaaagttttattcttgatttcttgtaaacatccattgcactgaggccgtatcattccttaagacagccctacatcttgccttggtaatcccttagataatgtggaaactcaaaccgttaggctccagtcatcttagaccatttcccatccgttttgtattttctcgtcctgaaagcagctgaactgaaagtaagtaataatatgctggaccagtgggaacggatgtggggagtatttgtggtgtgctaaaatactgtaattatctgtgaggctgcctgacacgcttctgccaatcttgttttcatcattcattctgcaaacgtttatggagggccttctttgagcacagaggcaaaactgaaagcttcagggatttgctgtagctgaggagccctgggagcacagcccatcaagcaagggatgtgatggtgtcctaaatggagtgacagttctcctgggaaaagagatcacgtggattccggtcaaatcggctaaggcttgtggttctcttgagcaagtctgttccttctggaaaccaaaagtgcccttcatctttagagacattttactcttccatccaccttttcagactgagctgtctctactatttaggggttgaaaatccattacacagtcactttacgttaacattgggtcatcttatgtttgtatgagacggatgtgggatttgaggggaacattgtcattcccttaaaataactatcatgaaaaaaatagcaacagtatgtaaagggaccaagagtggcagcctttagggaaaatggagcagagaagagctgtgaacaaagctcatttatttgaaataagcgtgctttatttcacatagaggggcatcagacgttacatttcattcggacaaattactgaacagccgaagtgattgtttccaatgtaggttattataattattggatacaaagatttaactagtgtttctgggttggatttttgaaatagtatgcaagtcataagcacagtttcaataaaacacgtattctggaaaaaaaaaaaaaaaaaaa

SEQ ID NO: 56893 - DNA, 1128 bp, Homo sapiens
ggagactatcacatgattacgaatttaatacgactcactatagggaatttggccctcgaggccaagaattcggcacgaggccttgacgaggtctgagcgaccatggaccggccggggttcgtggcagcgctggtggctggtggggtagcaggtgtttctgttgacttgatattatttcctctggataccattaaaaccaggctgcagagtccccaaggatttaataaggctggtggttttcatggaatatatgctggcgttccttctgctgctattggatcctttcctaatgctgctgcattttttatcacctatgaatatgtgaagtggtttttgcatgctgattcatcttcatatttgacacctatgaaacatatgttggctgcctctgctggagaagtggttgcctgcctgattcgagttccatctggaagtggttaagcagagggccacaggtatctgcttctacaagaacatttcagattttctctaaccatcttatatgaagagggtatccaagggttgtatcgaggctataaaagcacagttttaagagagattcctttttctttggtccagtttcccttatgggagtccttaaaagccctctggtcctggaggcaggatcatgtggtggattcttggcagtcagcagtctgtggagcttttgcaggtggatttgccgctgcagtcaccacccctctagacgtggcgaagacaagaattatgctggcaaagattatttgcaggtgtcttccctcgaatggcagccatcagtctgggaggtttcatctttctgggggcttatgaccgaacgcacagcttgctgttggaagttggcagaaagagtccttgaagcagagacaagcctcacctccacttctgtcaagagaggggcctgcagtgtaaaccctcttccgctgagcagctgtctgaactataggccccagtgctgaagaccagttgtgctaagataccggcatggagattgtgccatccgtggtataggctggctggtatgaagtcattggcctgtatgccagagagctaagagaagaaaacggggtctgtggcagtactctgaacaatttcctcagaacctcttaataaataagtttggtaatgctg

SEQ ID NO: 56894 - DNA, 445 bp, Homo sapiens
  misc_feature (1)...(445): n = a,t,c or g
tttganatncgttatgacatgattacgaatttaatacgactcactatagggaatttggccctcgaggccaagaattcggcacgagctcagcctatcttcggggcaattgctgagcttcaggatgggctattaatgtgggataagcccaggtgcaaggggaggagggcaggctgggagcagagcggagaatgcccatggccctttattccttcttccctcggtccacgaacaggaagaggctgaggccatgctgggcagggtctggatgcccactttccatgcagcagcatttcattgctcaaaaccatccttcctttcccttcgcccttgtttcccacattcccttcgtcctgcccaagggcgggactgaagagctggaagaaagcagtcagtaccctcccaacggcccccctcgaaggtctccactctcctctgggctcctcct

SEQ ID NO: 56895 - DNA, 564 bp, Homo sapiens; identical to SEQ ID NO: 22334

SEQ ID NO: 56896 - DNA, 1397 bp, Homo sapiens
tttttttcaaaaattgaataagtatttattgttccagaaggtacattgctttttatacatatttcataaatgatacaggattttacacatgttcaatagtttgctatttgtttaaagaacttttctccatgtcctccctcccttgcttcccacacaccccaaaaagatttgcctcgttgcactgtgctgtttcttcttaaaaaccctatgcacaaacaggataaatgggttaaaaataattcacacaacttaacaaaaataaatgagggaaggagctgacgactgggggtggtggagggagaaggaagtgggcggagggtcaggaagtggagacatgcatcctttcattccgtcatgccaatgaaaggggtgttggcaggagtagcagcagcagcagcaatcctggctggccttcaacctttgcaaggcacctggagtctgggtttgtcatttaaagtttttcttttcatacacaatgatcccaaaggaggaagaaaaagagaaagaaactccttgccacaatgaggaaggatgaatcacgtgaaagaaaaggccaatcagtggtgtggcagcccccatcatcctttccatcctgcccctacagcagttaaaaacaggatattagacacagattcctttgactcttcaagcgcagatgtcatctggaaatatggtagaaaatgttttgacaaagtataagattaattctctttctctcaatttaagataagaaaaaatagggtgaagagagtgggcttgaaggaagccctagaaatgtattcctatataaagataaattgcaccctttgagatccacacacttgatttacaactgaagttgtggaggtgggagggctcacaaacagtgtggaagtgtgtgtccttcgagatgaacaaagcctccagacaaggcagtcccatctggctggcctggaatgctgtcacacaaagcagattagcaataaaattattctggttgaaatggctacagagccatgattcttagccaatttgtaaaccttacatcttcctgatttggtagtacagctgaacaccccctttccctctgatttgtgttctggagggagaggggattatcaatagataagtatataaaggagggcaattattcctcctgtgaaagactaattaataaaacaaaacaaaaccaacaacctcatgcagtgttgccagtgatttttagacactgatccagagcactgggatatatagacatttaagaaggtattaagagataatctaaagtgtcaattattaaacagttataagttggttccaattatcaaatggaaaaaatgagtgtaaccaagaggtacaggtaggtggtcagtaaagggatgctggaaggaaagattcctggtaactctgcagagact

SEQ ID NO: 56897 - DNA, 2271 bp, Homo sapiens
ttttttaacagtggtaaacagtttttattcaggcaatgaaacatggaaaaaatatattagtaatcattataataatttgtgagtataacttttacaaatagttacttgacatataaaaagggaaattactgtgcatataaaatttatgtagatgaatattccacacaacacaatcctgatagcagtagtcaacgcagcactcatccctccagatgaggggctcctcacacacttcatggcacccgtgggaacacagtggaagcagatgtgcaatgaacatttacttggcacattagtataatgggtatctattggcaaacacacacttgcttaaccgccaatactgaaaagtttactgctacctctgagatttaaaagaaatgcctggatcctatcccgacggctgagaaggaccgaggctgaggctctggtgtggtcacctacacgctgcccctgtatctggactggggatggtttgagttcaaatttgtacatgtccatctgaaaattctttataaatacagaattagcagttaatgatgtgaccaggaaattactgttttgagtatatgtcagataccactaaaaggcagagggggagaaagtgacatcttgacagttctaaattaaaggatcgatacagggaaggttccaggccacatctccaggctcctgagcctggcctccctccattacaagttaaagcattacacagaccaccacaggcccagcattgccacacaacattctccatattagaacttataaccaggaatatatatttatataatagctgtaaccatattatagttaataaagtcattccttaggaatcttgtttgtccaaatctaactgcatgctaagaggcacagaaatgggattgcatttggacaaaaaactacaaaaaagtgcaatctttagtctccaggatgcaagctctggcactaggggatgggtcttccctggagagatctgccgctgatagtctcttccagaggagatcctttgagaggagagtctgttacatcagtttctttactgttactctatggagactcaaggatttagtggtaagttgcctttttaaaaataactggaatcctggaggccagtcaaaccttttttggacagatatctcctcgaaatacttctttattaaagtatttgaaggagatgacttcttagacctttggcttgacattctgggattcccagactatattgttctttcataagcaaataatctgttatcttttagattcttcagaataaatacatctttactttaaaatccctcgcttgaatcatgtaatctttcaaaacctagtttctatcttcctaacaacaggataaagtcagaaatgcaagtcagaaagcaagctcacaatcacatgaccacaaagagacaacagtcagagacagttcatgagatggctaccaattataatgaaaaaccaagaggaagttaaaagggggcttcagaactttcactccgactaaaaaagaatgtgctgaaatcacttccaactcagtatacacagacttaaccaatgcttgctcttaaaaaaacccttttgagcttgagtaaccactgagctgccctttgttacctttatggaaaatgagtgcttcactccagctgcttttacccagcccaggaacatctgggggcagtttacactccctgtttataattagagtgaattcagggctatctaataaatatctaagtatttgtgtaagagttgtacaaagtatgggtaggttgaaagggtaactggctggaaagaaaattcaacttgagctatcctccaaaacgaaacataaatcttccctcagattccataccattctggaaggctgccaaatcctaggtttttcaccatcatgtgcttctgcacttcctaatttgggctgagtctgaagaagctagaaaccacgtgagaaaactgggcttcccggtatttccagagcagttttacagaacaaaaggtttgggtaggtcactggctggaaggagactctccaaccttgactgtgactatctgggcagccacggggggaattgttcagttggcctcacgttgcattccccacttaaaatactgctggataaaggctatctacactttggcaaagtcaaaagctaaagaaattgctctggatccagaatctcaacaggatcacctaatattcccaaaccaacatctaggccagcagctgccttctactttcctttttcactcctggtttttttttttttttttttt

SEQ ID NO: 56898 - DNA, 826 bp, Homo sapiens
taccaatctgaagggggagctgccgggagttggagcctgcgatgttcgagaccatgctgctgttctgcccgctgcgggaacgggctgatcgtggaggagggacaacgctgccaccgcttcgcctgcaacacgtgcccctacgtgcacaacatcacccgcaaggtaacaaatcggaagtacccaaaactgaaagaagtggatgatgtgcttggtggagcagctgcctgggagaatgttgactctactgcagagtcgtgtcccaaatgcgaacatcctcgtgcttacttcatgcagcttcagacccgctctgcagatgagccgatgaccaccttctacaagtgctgcaatgctcagtgtggacaccgctggagggattagggccaggatggcccagctgccctagtgtgtgcttgccttgtccctcggggtagatgcttagctggcagtatgagttgtgtgtcctgagggtctttgctagtgtggtggaaagataaaccttttgaggtgaagagccagggggtcaggaaatatggcctatctgccaggcagggtggatgaagtcatgaatgtctgggagtttttctgtgtggggaggagacagagacccataactaaatatgctctgtgtaaagtcctattctttcatcttccactttattggcagttgacattcccttactcccaatcaacactcttaaatatttgtactgtttgtaaaacttagtacatgtccctaaatatttaactgttacttgtaaacttgtgtaatttattatttattttaatcaaaattctgaatatttcatttaaatgaaagttggaaaaa

SEQ ID NO: 56899 - DNA, 1131 bp, Homo sapiens
ttttttttttttttaaggagtggctgagaatttaatactggtaaacactataaattgtaaatgtaagttgtaaatgaccttgtcactggagaggggagaaggaactggagtcagacgtcccagcagaaacagcagcggcaacatgcggtaggcacacctaggtgcaggctgggctacagggacagccaagctgagcaaggacaggtccccgcagcctagactggggcaccgcttcgttctcggtctcactccccgctgtgccgtgctttgcctgtgagacggcggcgctgggccttgctggtacgaggggcccttgggggctttttggagtcctgggcccgtcggggatgtttcctcttgacctttttgcggctgtgtgcatgtagtgatgctgtgagggaggagatccgctgagagagcagggggtctctggacttcctgggcaaggctttggttggtttctccgtggatgacgcctcctcctcagacctgtctccagcccctccctcaggtggggtcagcccgagcagccgggcccccgagaggtccaggtcactgatggtggtcacggtgactgtgtggttggggtggtcatactgcaccgactccgtctttgctgtcaccaaccggtccagctcatctgcctcctccagagcctcttctctctctgccagcatcttcaagtattcctggtggcgctcctcccgaagcttcctctgctcctctttcagccgctgcttaatctcctcaatggctgccttctttcgctcgaccttccgcttgtggaagcctgtcagatactccccgctaccatgtgccatttatttatctggccagacgctgaggctcagaggttctgcttcctgatacgggacctggcacaccaaaggagcccaataaatgtctagggagcgaatgaatgaacttaagccactctcatttcattggctcatcatttatcaaccacggctgggcgcctgctgtgtgccggaccgatggactgggctgggctagggtggtcgaagccactgctctgagacccgagcttccggctatctggcggcgcacagacactaggcgaggtggggaggtcaagaagggagaaggtggcggccgagaagggagaagcgc

SEQ ID NO: 56900 - DNA, 1340 bp, Homo sapiens
tttttttttgagacagaagccagttttataaaacataaataatcatttatactccatgattagcaatggatcctgtctgaagtaaacaaggacaattaatacagtacaagatatttgtggttttgttttttataacccactaagccaagatttgtatctctgtatggaactgattttcaaatggacagaaatggtctttgatctttctgaaccacttgtcttcaaattcttctgaggatacagtcaccaaggcagtcagggctacggagccaacacacttcacctctgggtgaacttcatcttttattttttctgggatatcttctcccataacctcagctatcaacagcaaagtgtcttctttgaagctgaaccctttcattttatcttcaatttcctgctgagtccttaagttcctctccaaagcaaacgatgtttgctgaggttgggtaaactgaagcagaagcctggttcgtataaaagaggcacatgctttcagctgagtctctatcaacactgtttctctcttttctgccatacagttttggatatttgtcagagctttctcatttttctggctattactgctattcgcttccacagaaaataaagagctctcaggcaaggtttcaggaaaacacaaaagacagtcttttcctgagtgtggaaagaaggatttgatagttttgtcacttgaggtgaaaactgtgctgtttctgagatgacgcaagtgctgctgaaagagctggccccagattcaggtaagcctctgccaatttgccccagttccaaggattaaaaggatgcaaagaaatcagtttctgcaggcagaaaattgttttctccaagttctgcaaacttgaacaaatagcaagctggaggtagagtaccgtggttaaatggtctgtgttggttgctttattttccaagtttgcagcaatctccagcgcctccatatgcctacccaggtgagccagacaccgagcctgaccttcctggacatcccttttcatggcaaaattggttgatgacaatttttcagagatactggaatactcctgcagtgctttctgatactcttgtcgtctgtaggccaggtctcctttgaatttcttgagagtcagcacttcaacatcatcactgctttctgtttcttcataaaaccactgccacagcttccttagcattctgttctttgaaatggaagggtatcccttctagttagatgtttagctcaggccatcattaccaacaggtccaaagcagcagtctgtcttctcctgcaggggccgccgcgcctctcagcgccacgccgccgccatcttgcatttcaaaccggc

SEQ ID NO: 56901 - DNA, 1546 bp, Homo sapiens
  misc_feature (1)...(1546): n = a,t,c or g
ccagagacaacttctaagtttctctttatttcttttggaaacaacctccattcttcatctctcaatgtagtcctggcctagtgaaaaagaaggcttttctttctggcctccagagactgcttcctttgtaggaaaaggaacaataaacacttcccattaggtttctgtctccagataccaatcagggaatgactggccaggactggaacttaacggccttgagaacatgtggggatttgtctttgagccccattggcttgtgatgttttcctctgtcctccctgaggacagttgctcctgtcctggggggggctctgcctcccaccctccccagtccaggatgtctgaggtggttgcaggctgcttgctgcccagtttccagtctgttctggtccagggaagcaccaccccatggcccttgctgcttctggcaggggtcctcaagagctcaccatgtcccagtgctggctcatgagtgaggactcacatgggttgacgacgatttccttgccgttctcggtgccatcaccgaacatatctgtatcgaggcagaggtgggatgctatgtgctcgatgtgggaaccagttttggtccattgctgtcggtcatctccattcttgcaaaggacaagaaccactggggcgccagggaacaaggtgaatgaactgaacaaggcaacaagctccccctggaaggaatctgcctgggtgtaatgtgaaaggccccatacctgggactttgcatcttcgcctttgaccttggcacaggggctcaactttaggtttggggtttcttggttgttctgcctttgagattcccaggcacttctgtctctgtcggatattgcccttctggatggagaactccttggggatgctgagttcagggtagatattctccaggtaccacttgaagctctggcagcgcagattcttcctcaggtccaatctgctctcaacattcccgaagggcctctccagggcgaatggccgggcagcgtaatagtattgcttgtattcatccatccacacttcagctgtccgcttggtgttctttatatacgtgttggcatttccatcagggaaaacgtaggggtgcttcttccggaagacgtgccccactcggctgcaggggacgatctctaggctgcccccgcacatccacactcggaaggagatttcaaagttctccccaccccagatgtccatgtccatatcatatttccccaggtaatcaaaccaagctttgtcgatcacgaagagccctccagctatgataggagtcctgatgggctccgtggggtccaggcgccgagccttctgctctggggagagctgctcccactggaagtggaggctccagtcaaacccccctctgagctccgaggcagactcgatgtaggtgaaggtgtccaggttaatgatatcgatcacctcgtgccgctcgtgccgaattcttggcctcgagggccaaattccctatagtgagtcgtggataantncaaagagatcacgnaaagggtattngtnanntnccaannnnaac

SEQ ID NO: 56902 - DNA, 1600 bp, Homo sapiens
tctcttttagcagcaagagcctgctttctgctctcttctcttgacttttccagatcaagttcctttaaaagaatactcgcattcttatttgcttctgcagcttgctggtctttagccttcacaatggtttcgacacattgatgacattttttcaacagttcctacagcaggaaatagaattatgtaaatatataatgaaagaggccaaataaaacttaagctgatgagcacattaaagtccagaggttaaagttcaaactgaaaagtcactaaaccaaattaagttatcctttgagtccaatctttcacaaaaataagacaccatttccctaaaaacctgcatgtccttaggaagccttctcattaggctaatggtttagtaccttagtgtagtcactgtgactatggtccacagtagaaatctcaaaatagtttatcaaaagtattatacccctctattttgcaaatggagaaacaaacgcataaagagatcaggtgaccaacctttcagaatataaaaagaacaagttcctaactgcacactttggcatatcattccacaaagaacaaaaatgtgcttcagtagcatattaaacttaccttatctgtaattgttgctatgtatctcatgcattctatatcagaagggaactgatttacttcctttaccaaatattgaacaacttttacatgacccttgcgaaatgctgacataagaggtgtgattttccggttatctgctgcatccacatcagcacctgcttgcactagcaactgcacaacatcaaaatgacctccattggatgccagccaaagtggcgtatttccctttttgttacgaacatcaatgtgggctcccctatgaatcaggagttcacaaaatttgtagtgacctttgtctgctgctatggttaaagcagtatctcttgaggaaggcacagggggagcattaacatctgctcctttatcaagaagaactcttccaacctctgcataccctccagaagctgcttccatcaagggggtaagacccgtctttgccctatgttcaacattggcttttcggtccagaagcaaactcactacttctgctcggccctggaaacaggccagggtgagagccgtgttccgattggtctctatttgggcattaatgtctgaacccatatcgagcagcaattttactgcaggaacatgtccattcattgcagccaacatcaggggagaaatacctagtttactcccagtccttgaattaatttctgccccagcattaagcagaatcttaatgatattaacatatcctccagacgcagctagactcagtggtgtataatcagatacgttcctatgttctttatttgcacctcgagccagcagcaagtctaccacctcctgacgtccaccagaacatgccaatgaaagcggagtatccttagttcgttcagactgtgcttctatatctccacctttatccaaaaggatttcaacaactccaacatgccctgctgttgctgccaggattagtggtgtgaaaccttttttgtctctgtgttcaattttggcatcccgtgcaatgagcacagatacaagttcttcc

SEQ ID NO: 56903 - DNA, 505 bp, Homo sapiens
  misc_feature (1)...(505): n = a,t,c or g
cattagctatgacatgattacgaatttaatacgactcactatagggaatttggccctcgaggccaagaattcggcacgagcgctttgctgtcttctccattgctgtctcctcagatggacgagaagtactaggaggggccaatgatggctgcctgtatgtctttgaccgagaacagaaccggcgcacccttcagattgagtcccatgaggatgatgtgaatgcagtggcctttgctgatataagctcccaaatcctgttctctgggggagatgatgccatctgcaaagtgtgggatcgacgcaccatgctggaggatgaccccaagcctgtgggtgcactggctggacaccaggatggcatcaccttcattgacagcaagggtgatgcccgggatctgatctncaactctaaagaccanaccatcaaactctgggatatccgacgcttttccagccggganggcatggaagcttcacgccangctgncacacagcaaaactggga

SEQ ID NO: 56904 - DNA, 1341 bp, Homo sapiens
attcggcaccaggaggggtccgcccccccgcgcatggggaggtaggctcggaccggcccgcggactgctgcagtccttcgcgccctcctcgccctccccaccgacatcatgctccagttcctgcttggatttacactgggcaacgtggttggaatgtatctggctcagaactatgatataccaaacctggctaaaaaacttgaagaaattaaaaaggacttggatgccaagaagaaaccccctagtgcatgagactgcctccagcactgccttcaggatatactgattctactgctcttgagggcctcgtttactatctgaaccaaaagcttttgttttcgtctccagcctcagcacttctcttctttgctagaccctgtgttttttgctttaaagcaagcaaaatggggccccaatttgagaactacccgacatttccaacatactcacctcttcccataatccctttccaactgcatgggaggttctaagactggaattatggtgctagattagtaaacatgacttttaatgagtagtgtcttctttatcgtttgcgatttttactaccttttttcaaaagaaaaattgatgagttttgtatagctggtcagatacaaataatagtgacttcacagtttagtaattataatgggtacttgttaaacatttggtactaaattatgttgctgcaaagtaattaaaattagtatctagagctagtttctggtgaattattcatttattttgtactgttgttaggcagctctgtagttgctaatttaaccaataagtcaatttgctattcatgaagaaacgattctgagaatcctgtcaggaattggggaatgaaaaaatacacaaaataatggtctttgtcccagtagagttcatagtctatttagtgtgcatgtttttccttaatgatgtatttgatctgacttttttccttctcaaaagaatcatacttgggattacaggtacatttgatgttatatgatggataagtgaaaagtttttaaaggagattttataccttttcacattaaaaaaggtatttatattattactttgtagtgattgtcttaagaaaaaatatagcccaaatgtatagtaaaatcagcagctcaagaagaatttctgcttctctttgtagttgatgctttgttttttcctgcagtcagaaattccttgtatttgtcaaatgtataatcagcttgtattgtttttaaattaaaaaaaaatttgaataattaacttttgccatgggacaagatacaaaagtaatttcatataaagggcctctcccacccctgttctctggaaaaaaaaaagtcgacg

SEQ ID NO: 56905 - DNA, 1298 bp, Homo sapiens
  misc_feature (1)...(1298): n = a,t,c or g
cttttaatgggganccccccaaaacgggaaaaaaacgtggtccctgaaggccgnaatgcancgctgggaccaaaaaggctgtgctcggaccccaggtgaaaanaggacacgaaagccggagcgtaggtgtgtttattcctgtacaaatcattacaaaaccaagtctggggcagtcaccgcccccacccatcaccccagtgtgcaatggctagctgctggcctcctccatctggtccctccagcctcacagcctcctcctgaagccctttccttccaggctccagaagagcaggagacaaacacaccccactgaggcccagctttaataaagtgcctgatacagagccaggggacagaacccaggtgatacagctcccgacagccatcccaggacgacagagggtcgagggagaccctcggaagcccccagtgactccagacaaaggggcagccccaaaggcgcctccaacagttggaaaacctccctgctagagggcagaaaaggaggcctggccctttaagagccaagctaatggcagctggctgaggggctaagaaaacagcttaaggttttgtcccgtttccttcagagtcccccaaccctgaaggagtttgcgcaaaaataccctaaagttttccaggaggtggggagggtcaccccagacccccccaaatgaggttgagccttccagcaagggatagtggctgggagggtcccagacggggaggacagacccgagggcacttgtaggggaggtggaaagggtctcagactccgcactggaaactggtgtgggcagaagggtgcccagagagggggaagggtttgtccaaggtctcagggccagagccaagacctggatgcccagcctcccacctctgggacctccccaccgcccccacaacctccacaaccccacaaattctctggccgggcctccagacagcttctacccccacacaatctctctttctggtgctggaaattgagggggcaacaccaagttcccagctccttgggacaggaccccattatcccagcagagtggggagtgattggggggtccattcctggggctctgaaccaaggcctcatgggaaaggacatgtccttagcctcagattgactcagaaataccccctctaccctgattgactgtgcgcagaccctgactgcacaagaaagacacccctgattaaccacatagactcccaaatccctgattcgccaacagattccccaggccctgattggctggaggatacatcctcctcaaggccctgattggctgggagac

SEQ ID NO: 56906 - DNA, 2571 bp, Homo sapiens
atcataaaactcaattttattcaataaaataataccacaaaagataaaatgttattcttttatttatgttaaataaaaacatgagaaaatccttttttaaaaagggtcagaatattccttatgtctccaaaccaagtccatggatgcaaagaaatgctgagttcttgatacactttcatgtcataataaccaaaggagacagcacgggctcgagtctttcagctgccgcttaggaaagtcacatgcagtatttgggaaagcaaggaacagaacacaggcatgagtattttctggaaatacctcctgccctggcaatgaacctcagtaccaaatatttttgttttcttttttgtggtcctgataaatttttaagccacacatcctactgaacttcaatgatacaatttctcacaattccagaattctattggcagtacagtttacttgggccaacgtggataatcttataaattttaaaattacatacaatagaacactattgcaaattttgccagtagaaacatgaccccaaggaactgccatttccaaaacataactgggcacacatttacaatgcacctgctaggttttgaattcatttgtcatttctgatctacccttaagacatatgcttgaatctctgaaaacaaaatgctagattcatgatttctatacccacatactccataaatccatcacaaaccctacagtctgatttagcctacggcaaatgattcatccaataggccatggtatgttcacaattcttcaatcttattcaggttgtaaagacgtttttctacgactggagtcactaagaatttctctgttagagaaagcatcattttcacctttggcacactgccaagatgatactttactacagaatttatgaaactacaatttagtaacttgcaggctttattaaaagaaaaagaaaaacaaagaataatttaatataaccccatgtcccaaaactttctagttttttttttttttttttagtgcaagaaatgctgcatcattgaagcacttgagaattaccatgaaatctaacaaaaaatgtcatcaactcaggagtaataataaaaaagagaaacaaccagagaggcacacagattgttgtttttttaaaaggatttttatactatattaaaaaaccacaaaataaaaaagggatcaatcaacatatatcttagaagtccttccaagagtcttggtatgcaacagccatggaggctgtgacctttttccttcttttctcagcctgcagttcatttaaggatcaccggagatgactcgtgctctagttcttaaaatcaaacttgttctgccaaatccaagaccctgaatttgtccaaattgtagaaacatgcttttaccacccgtccaccaaaatacctcccattcaagtcaacaaccgctttaattgctgattcaactctctcaaattctaaaaatatccgtactgcttcatcatcaggggcaccaggaatttcaaatatcacacattttccaactttgccatatttttcacattcttccttggtttcaacttccaagtcttcatccacctctcccgcaccaaccatgttccttagtaagaccactttagtaggacacttaagtatttcagtcagcggatttgaatctgacttcttggatgcatctttctctgtggcgtcgcccacgatgatcttgccgccacgcttggctggtcttctccactgacaaggcagtgctcaggccctgctcatgcttccccagaccctgggccctcccggaagccgtacttctgcatgatcttgtgcgccaccgtgccccccatgttagcgaggaaggagttgctaggtccgggttggagatctcggtctgtcttgttcctcgtacactgggggaggaatggctgctttggaagactgtgatcgaggtcttgagtcctcttcataaggaaaatctcggggtaactctttgtctttctctaccagagaagtgggtggggcaatggcagctccgcccatacttcttttcctcctctctcgctcataatcttcatcttcatcagaatctggatctggtctccttgcaaacccacttgcttcatgtctgtctttacgccttttttccctttcttctatttccttttgtctttccagctcccgctgtctctgtcgttcctctctttggcgcttcactactttctcataatcattaggaaacatagggtcatattcgtcagctaagggaatcagaacttcccctgcagaaaacccactgggaacaggatccttcagcccagctgctacatgcggtggagtgtccacaatttgccggtcatctgaggagccacctcgcttcaggtcaatgactggggcgaggactgtactttgtttcgtcctttggctctttgcctgagtgagagctgccttcttcacctgaagctgagactgcagaagtttgaagtttttggaccagccttctgtttttgagtcactggtctccactcctaggtcatcgtacagggacatcttttcttcagtttaatgccggcccgcccggccgacctcgtgc

SEQ ID NO: 56907 - DNA, 425 bp, Homo sapiens
  misc_feature (1)...(425): n = a,t,c or g
accncnnncntttgantaccagctatgacatgattacgaatttaatacgactcactatagggaatttggccctcgaggccaagaattcggcacgagggagcttggtgagagtgacgctgccatggggttgggtccctgaggccttcctcggagcattgggtgccaggggctgcccaggcttcctgagtggcccacctgggtgggaggctgccaccgcggcctgatcatgccctctgtgcccacacaggtctctgagcggcccctgatgttcctgttggacactcctggcgtgctggctcctcggattgaaagtgtggagacaggcctgaagctggccctgtgtggtgagccggggctggggctggggctgggaccggggcccctgccaccccacctttagggctggctttggcacagggccccta

SEQ ID NO: 56908 - DNA, 552 bp, Homo sapiens
attgagagaggaatcatcttattcctcaggagaattgtgaattttcttgaaatcatgttggactacctgtgctttctgctctggaaggtgattccccaggcacttcagctctgctgctgggccagtctctcagagaaaactgcctccttgcttcttcctggaaaggaagcccagggctttcttaccttgtttccaggggtacagatgacttcgtttcaagggcttctgtttttcaatagcattgcccattttaaagccagaggacacagggcccttcccagccccagcgtctttccggagcagcaactgaggaccgagtcactggctgaaaggggatatctcttggacatcccaaaccacccagcggcagaacccaggcagcctcacaagggaagcctgaggaatctcattctcaagtctttgccttctgcctttcaaaatccctttggccccagggaggaaatcagaagaaagggcttgttatcgccctaccggtgcctctcaggcatggtctatattaagaagctctttcctcagcatccttttgacacc

SEQ ID NO: 56909 - DNA, 1912 bp, Homo sapiens
ttttttttttttccaattttatatgaagttttattctcaaaatataaaaaaaaaaaaacaaaccccacacaccaagggactaagatgatgttatttcacagcacttgcttgcctcagtctttacgaagaacacaattccaaactaatggacaagttcctccctgtgctctaggtcattcaaaggaggcaagctcctttgtcaaatcaggagctccatcagctgatcaggagcccagatgccagggtggattttctcagtgggatctagtattgctagaagagccttccttacatggcagaaacaggcacatgggcctcttcccttagaatgcatctgtctcacatgcttggggactgctgtgcaggaaacaccctggtgtggcctggcgaggcagcgtatacatggcccccaaaaactggtctgcaattcttcccgcttctcgcagcccactcagcagagcaccatgcactgtggctgggtagttacggatcgtatgttctcccgcaaagaagagtcgtggaatcggctgtggggcacctggaatcgaggggcccaggagtgattggctgagccattaaatcatagtcatttccagatgatcctgcagcaacataggaataagagccccgagcccagggatcagcacgccaacgagacaccacagtttctttgggctgaggtactgcactgctaccaaaaatccctttgagaatggccaggccatcggccaacaatcacatcgtcacttatgttttccatgataccagcagcttctccctgccaactagtgccaaacagtattggagctttaatagaggttccaagaagaggaagagctcaccccctgctggcagtcgtactgccaacatgcccgaacaaattgacacttggatccccagaacacccgatccaaaacacaacaccaccttgttaaggttgccaaatcccatcctttggactgcagatgttttccactcagggagaggtggcacaaactgaacggctggtggctgctgcttcagcacacccaggggaagggtacagagaactgcgtcgcatttataaataaaggtttgactcgtggagcgggtattcacagctatcacttcacatcctgaagccgtgtagcgaaacctgtcgcactgctgtattcagtttaatgtctaggccttctgctaaagccacaggcacacacgagtagccattccttactgtcaggtggctgccagtgaactcaaagtcatcatcctgatcccagtgcttaagggagagagttgagagaggtgtggcattaagcaaattccaagatttgcaaaatgcccaatcaagtatttgtctgtctcttgatgagagatatacatcacttgggggattcgcttccaactcctgaagtttttcttctagctttccttgtgtttcagctaattcatcatattccttgcatagggcggtcagatccctgtgtttgcttttcactaagaactcggcagtaatatctctgggtggctttacttcagatgcttctttgtattgctgatggagttctttaattttctctttcaaatttaccatcttattaagaagttctttcaattcttcctgagttttcactatcttcttccaatgttcaatctgctcatctttgacatgcttctcttgtaactgaatgacaacttccaatgcctggccaagggacacaggcttattattgaggacattgaagtctagttgatgactaaggtaagatgtagcttctagcaaccggttaaactcttgctctaccatttcatctttctctttaggaaccttgacagtgtcagcttgtccgttggcttcataaagtgggcatttttgcttgatcttggccagttccatatttacttgtttgctgaccacagccataggattccc

SEQ ID NO: 56910 - DNA, 2135 bp, Homo sapiens
ttaattgaattagcattgagaggaaggttacaactagaggcttgtggaactgagacgtaaaagtctattaacaagaaaggtaatctgtaagtcagatgctccaacaggggatgttcttcttgatgaagctctgaagcatgttaaggaaactcagcctccagaaacggtccagaactggattgaattacttagtggtgagacatggaatccattaaaattgcattatcagttaagaaatgtacgggaacgattagctaaaaacctggtggaaaagggtgtattgacaacagagaaacagaacttcctactttttgacatgacaacacatcccctcaccaataacaacattaagcagcgcctcatcaagaaagtacaggaagccgttcttgacaaatgggtgaatgaccctcaccgcatggacaggcgcttgctggccctcatttacctggctcatgcctcggacgtcctggagaatgcttttgctcctcttctggacgagcagtatgatttggctaccaagagagtgcggcagcttctcgacttagaccctgaagtggaatgtctgaaggccaacaccaatgaggttctgtgggcggtggtggcggcgttcaccaagtaactctgctcggggtgaaccattctcctttctctcaagtaaaccagtagtttttcttctgttgacttctggttttctgtaatttgtactttcccacactataattggcttctgttttacaaaatggtgggtggctttttcttttttgtacgtgtacaggattctgctggtacgagaggccttcctctttctgtttttaaaaaaagttttactgccatattggcattccattccctgttgccatcctcactgttacctgttttgggtttctggtctactttgactttcaaagtacctccagcctcctcatacgcacagcttttggatgacctcagcttgagtttctccatatgtgcatgtacatctaggcattctgcctacagttcagacagaagtcacaaaaaggccttcaactcaccaaaggtaaatatctgtatctattaggacattttttacataggacttcagttgagatgtatacttagcaaaattatttttaaattgaaacagcacagtaaatacttaatataaaatgtcccttggggttttgcttcccatgtaaatctattgtattattacacttgttataattttaactataaaggtccaattgtttcacagagccagtttgggatgggctgcattccatttatgctgtatatagtttgaattatatataaattaccccttcttctggccacccctgctcccatcttagtattttgcaagatctaatcagttgtacacctggtgcccctcgcttgcttcaatcatggttatttgatggcaaaatcgacctcttgtcgctgaaggagagagaaaagatgtgtgtctgattggtcctgggattttttgagctgtgccatttatggtactctttgcctatgcatcccctttttagattttttttaaattttatcttactgtttttataatttctattgggaagaggcttgtgaccagtaccaatcttgagtttctttttctgtccacaagtaaattaatatctgctctgaaatgtcatttatctactcacacattcttggggaaaaaaatcaaatgtcagtcctagcagatgttgcatgtaaattggtagcaagtaatgattacaacccagaggattaagaattttgtaacagaaagctctatgttttaattttttatatacaattaggataattagcattgtcagactataaacctttgctttttaaagtttatttttactatttctttatcactttattgtatcatcaccattggtttcataatgtaaatactatatgttgaacaaattaaatgtcaaaattttttattaccatagtccatgttaatagtggggctttcaggtgtttagagattttttttgttgttgttaacattcattgcaaaagtactagatggtgtataactctagagttgaattttaagggattccctaatatgtatactatctttttatctgaagtaataaataaacaatgatcttgaaagtgcctgaaaaaaaaaaaaaaaaaaa

SEQ ID NO: 56911 - DNA, 1696 bp, Homo sapiens
cgggaggtggctggggagtgaattttctggaaggcgactttaaaggcgcggtgactgagcgaagggcgtttgggtactgccgtcgccgccgcccagccggggaggggtgcgttagtgtcaggaagcgggctgcgccgaggtcgtagcggaaccagctggcgaccccgcagaatgaaccacaagagcaagaagcgcatccgcgaggccaagcggagtgcgcggccggagctcaaggactcgctggattggacccggcacaactactactagagcttctcgctgagcccggcgggccgtggcggataacgtggaaagggcagatgctttacagctgtctgtgggaagaatttgtgggagcggtatgaaagaccttacaagcccgtggttttgtttgaatgcgcaagagggctggtctgcgcaggagaaatggactctgggagcgccttaaaaaggaaatatcgggaaccagaagtttcaagtgtgggtgagggttaacgatggctactcagtgaagatgaagatgaaatactacatcgagtacatggagagcactcgagatgatagtcccctttacatctttgacagcagctatggtgaacaccctaaaagaaggaaacttttggaagactacaaggtgccaaagtttttcactgatgaccttttccagtatgctggggagaagcgcaggcccccttacaggtggtttgtgatggggccaccacgctccggaactgggattcacatcgaccctctgggaaccagtgcctggaatgccttagttcagggccacaagcgctggtgcctgtttcctaccagcactcccagggaactcatcaaagtgacccgagacgaaggagggaaccagcaagacgaagctattacctggtttaatgttatttatccccggacacagcttccaacctggccacctgaattcaaacccctggaaatcttacaaaaaccaggagagactgtctttgtaccaggaggctggtggcatgttgtcctcaatctcgacactactatcgccatcacccaaaattttgccagcagcaccaacttccctgtggtatggcacaagacggtaagagggagaccaaagttatcaaggaaatggtataggattttgaagcaagagcaccccgagttggcagtcctcgcagactcggttgaccttcaggagtccacagggatagcttccgacagctccagcgactcttccagctcctccagctccagttcgtcagactccgactcagagtgcgagtctggatccgagggcgatgggacagtgcaccgcaggaagaagaggaggacgtgcagcatggtgggaaacggggacaccacctcccaggacgactgtgtcagcaaagagcgcagcctcctccaggtgacccagcaaggctgttgtctgtatggaaggacacgctcgcggcaagggcagggcctggggagggtggcctgtccagtcctgcagacaaggggaggcctgacagagcccaagaatgaggacaccctcggcacgggaacccattcacttagcgtttgctccagtagctttccctctgctaccaatgcagataaacgcggcttgttttactcaggcaagagaatgtgaatagtgccaagaaaatcctttacattatttaataaaaattgaatccattttctatcttggaaaaaaaaaaaaaaaaaa

SEQ ID NO: 56912 - DNA, 1272 bp, Homo sapiens
gccccgttggaacttcctagtgggaatgatgggagaagtttggggcagggtatccaagaagtcagactgtggtcaagtaggtggtcccttgccctggctacagaacatggaagcccctagggatgcaagtggacttgggcagaggaggtcacaccaccccaccaaggtagacttagattagagatgacttgcatctgttacttcccctttttccatgggtttcatggcccctcatgatatttgccttctgctcctagaaggcacagactactttcaacctgcctcgcccttcactgccacccctcccttctcccttgataatgggagcatgtggatggggtgtctgcgtgtgcaaacgggttccctagcaaagtatttgtgggggtccaatgcaaggaggcagggaagaaagggggcctgcaaaggaagcagtagagtgacttaaacatcttgcgaggcagcctgcctggtttatgggagaactctgaagcccatgatgttttcctggaaggctgttcctacagacggggtttataagtactgatactggacaggatgagaagggagtaggatgtcatcctgtctcaggcctcggataggaagctgcctgccagcaagaggagactgatgtgccccgggtgcaccccacctcctttgaggtccaagatgctcctggggagttgaccgacatttgggaagataataggaggcattggggaaactgctccccaatatattcctcttttcctttcttcaagctgcgtagcagggggcctttagctagtttctcccgagaggggcgggaagtacagctggtggagacagtgctgggagatgatcagaaatctcagggcacagcctcaggtctacctggacactcatccactgttggagatgctcaacagctagacacagatgctcacagccgacctgtggcctcttgctctgaagccatcccccatcttccctagacacagcagacatctgagaaagcttcagcatttctcttgctaacagattcagaaaagtgtctcaaagcagagcacagagttatttggtgtttgctgaagacagcctttgtgccacaatcacttattaaataagcgatcaatttcccattgaactgaacatgcaacatttatcatacattcagttctcattcacactccttaagatttggtcagaatttttatttctgttcatgtcttctacttttctactcctgtatgaataaaatattgatttgattacagtggctttgactataaaaaa

SEQ ID NO: 56913 - DNA, 3295 bp, Homo sapiens
  misc_feature (1)...(3295): n = a,t,c or g
gcgagcggaaagcagccgccctgaggacattaaggatatgaccaaagaccagattgctaatgagaaagtggctctgcagaaagctctgttatattatgaaagcattcatggacggccggtaacaaagaacgaacggcaggtgatgaagccactatacgacaggtaccggctggtcaaacagatcctctcccgagctaacaccatacccatcattggttccccctccagcaagcggagaagccctttgctgcagccaattatcgagggcgaaactgcttccttcttcaaggagataaaggaagaagaggaggggtcagaagacgatagcaatgtgaagccagacttcatggtcactctgaaaaccgatttcagtgcacgatgctttctggaccaattcgaagatgacgctgatggatttatttccccaatggatgataaaataccatcaaaatgcagccaggacacagggctttcaaatctccatgctgcctcaatacctgaactcctggaacacctccaggaaatgagagaagaaaagaaaaggattcgaaagaaacttcgggattttgaagacaactttttcagacagaatggaagaaatgtccagaaggaagaccgcactcctatggctgaagaatacagtgaatataagcacataaaggcgaaactgaggctcctggaggtgctcatcagcaagagagacactgattccaagtccatgtgaggggcatggccaagcacagggggctggcagctgcggtgagagtttactgtccccagagaaagtgcagctctggaaggcagccttggggctggccctgcaaagcatgcagcccttctgcctctagaccatttggcatcggctcctgtttccattgcctgccttagaaactggctggaagaagacaatgtgacctgacttaggcattttgtaattggaaagtcaagactgcagtatgtgcacatgcgcacgcgcatgcacgcacacacacacacagtagtggagctttcctaacactagcagagattaatcactacattagacaacactcatctacagagaatatacactgttcttccctggataactgagaaacaagagaccattctctgtctaactgtgataaaaacaagctcaggactttattctatagagcaaacttgctgtggagggccatgctctccttggacccagttaactgcaaacgtgcattggagccctatttgctgccgctgccattctagtgacctttccacagagctgcgccttcctcacgtgtgtgaaaggttttccccttcagccctcaggtagatggaagctgcatctgcccacgatggcagtgcagtcatcatcttcaggatgtttcttcaggacttcctcagctgacaaggaattttggtccctgcctaggaccgggtcatctgcagaggacagagagatggtaagcagctgtatgaatgctgattttaaaaccaggtcatgggagaagagcctggagattctttcctgaacactgactgcacttaccagtctgattttatcgtcaaacaccaagccaggctagcatgctcatggcaatctgtttggggctgttttgttgtggcactagccaaacataaaggggcttaagtcagcctgcatacagaggatcggggagagaaggggcctgtgttctcagcctcctgagtacttaccagagtttaattttttttaaaaaaaatctgcactaaaatccccaaactgacaggtaaatgtagccctcagagctcagcccaaggcagaatctaaatcacactattttcgagatcatgtataaaaagaaaaaaaagaagtcatgctgtgtggccaattataatttttttcaaagactttgtcacaaaactgtctatattagacattttggagggaccaggaaatgtaagacaccaaatcctccatctcttcagtgtgcctgatgtcacctcatgatttgctgttacttttttaactcctgcgccaaggacagtgggttctgtgtccacctttgtgctttgcgaggccgagcccaggcatctgctcgcctgccacggctgaccagagaaggtgcttcaggagctctgccttagacgacgtgttacagtatgaacacacagcagaggcaccctcgtatgttttgaaagttgccttctgaaagggcacagttttaaggaaaagaaaaagaatgtaaaactatactgacccgttttcagttttaaagggtcgtgagaaactggctggtccaatgggatttacagcaacattttccattgctgaagtgaggtagcagctctcttctgtcagctgaatgttaaggatggggaaaaagaatgcctttaagtttgctcttaatcgtatggaagcttgagctatgtgttggaagtgccctggttttaatccatacacaaagacggtacataatcctacaggtttaaatgtacataaaaatatagtttggaattctttgctctactgtttacattgcagattgctataatttcaaggagtgagattataaataaaatgatgcactttaggatgtttcctatttttgaaatctgaacatgaatcattcacatgaccaaaaattgtgtttttttaaaaatacatgtctagtctgtcctttaatagctctcttaaataagctatgatattaatcagatcattaccagttagcttttaaagcacatttgtttaagactatgtttttggaaaaatacgctacagaatttttttttaagctacaaataaatgagatgctactaattgttttggaatctgttgtttctgccaaaggtaaattaactaaagatttattcaggaatccccatttgaatttgtatgattcaataaaagaaaacaccaagtaagttatataaaataaattgtgtatgagatgttgtgttttcctttgtaatttccactaactaactaactaacttatattcttcatggaatggagcccagaagaaatgagaggaagcccttttcacactagatcttatttgaagaaatgtttgttagtcagtcagtcagtggtttctggctctgccgagggagatgtgttccccagcaaccatttctgcagcccagaatctcaaggcactagaggcggtgtcttaattaattggcttcacaaagacaaaatgctctggactgggatttttcctttgctgtgttgggaatatgtgtttattaattagcacatgccaacaaaataaatgtcaagagttatttcataagtgtaagtaaacttaagaatcnaagagtgccgactta

SEQ ID NO: 56914 - DNA, 1916 bp, Homo sapiens
ttttttttttttttcttcctacaaatgtagaggtttatttcaacaaaatgtgtaaagagtgcatctgaagctcctgctcatcacagtatgtgtccatcaaattctgagacaagtgaaggctgttttgtgaacgaagagaacagataatatggcggtctccgtccaagcaggtcttggtcaatatccatcatttatactcctcctgccttagtagccttgcatgtttgaggggctgtgggaatgtcagattgctcatgttctgtgcctccaacttgaaaaaatccttgtccaggggtaagacctacagtaaggagctctggggatgggggaggaggcattacagggttctagagaggaaacatactcgtttgtgtcataatttggtggggagaggggaggtaaatgagtgtaacccaccctgcctctgaagacatgcctggacaggcctcctggggggtgcaggacttcataccacttgtagatatgtgggatttgatttattgcaaaaaagcatagaagaataatctggtcaaaaatgaatccaattcttactaggtaagcaaatagccagcaatggtcaatgcattttcctggactgagaattgtcccccaccactttatgcccttttctgaaggtgctgaacacctgtaccttccaccagggcagccgggctgaggctctgactcctgggggctgtccgctccatacccagccatacagtgcccacctgcaacccagaaccattgaaaagtccagccaatctatccgcacagattcctcctgaagaaggggaggtggagctcgttcttgtgtgcaaaactacagggttaaggctcagaactgtggcttgtccaagaacgttcataccactgcttctcaaatgtcttagtgatttcctccttggtcatcagtgacaaagtgcagttagctgcactaaaggaacgcggatgctacaccagccctgatcacctgccactcttgctttaggaacagaggaatcagtaagttcttttcttttcttgaataaactagttgttgaaagtaaactctctccaccacctgaggaagcccctgatgccagtcaggaggggccagtaagcctggaggacagcagcaccatgactgagttgtaaataatcttaaggtcatgtggattctgtgtttcctggaagcctccctcatcaggaaggccagctcctggtgctgagggtgtagctgtcaccagggtcctttcagagctgtggggagacctgctgcctgtctacactctggggaagagagtagaaccgttagctgctaggacagtaatcctggaactagggaagagtgagtgtggaggcaccattaacctctcaaaaccatccaagctccaggcttcataggaacaactttccaagtcctcaaaacaaacagactatctatctatctcactggctctccacatggcataaataactagtttccaccagtgcagaaagggcagttctcttctggctcctcctctgccaactcaggcttcaccacctgtggaactgctggggcccctcaagcactggccttgcagctcccagccacatgcgacagctagtccagcagtgacgtgcaggcgagaggcaggccaacaactacctttccctttgtcctcagagactgaacccaaggttgaggtcccctaaatcaagaataactggttctattttctttctctgcttcttggctcacagttttgccctcatctttgagttcctatggagcttgtagtagattttatgctctaatttttcttcataaaaggtaccgtagtgtggttaaactgggaatcattcctctccagtgcctactgtgtgctgggctaagagtcggggtaataaacaatggacttgaggcttcctcctctccttagccctcctctgct

SEQ ID NO: 56915 - DNA, 1273 bp, Homo sapiens
cggacgcgtggggtggagctgttcgaggactcgcgggtgtgcagtgcacctatgatatgtgttttagaaatagccattaaactttggtttgaatgaagaatgtctctcaatccacctatatttctcaaacgaagtgaagaaaatagttcaaaatttgtggaaacaaaacagtcacaaactacttccatagcttcagaagatccccttcaaaacttatgtttagcatctcaagaagttcttcaaaaagctcagcaaagtgggagatcaaaatgtctcaaatgtggtggttccagaatgttctactgctatacatgttatgttccagttgaaaatgtacctattgaacagattccacttgtgaagcttccattgaaagattgacatcattaaacatccaaatggaaacagatgggcaaaagtactgctatacatgcaaaactctttagcccctggaatttggtaaacatttacacgtatccgtgtattccagaatatgaagaaaaggaccatgaagttgcactcatttttcctggacctcagtctatctcaataaaagatatttcttttcatctgcaaaaaaggattcaaaataatgttagaggcaaaaatgatgaccctgacaagccatcttttaaacgcaaaagaactggaagaacaagagttctggtgattttgaatgacaggcaagtgcaaaggcacaacactgaaaaaaattatatttatagatagcacctggaaccaaacaaacaaaatattcactgatgagcgacttcaagggttgttacaagttgagttgaaaacaagaaaaacttgcttttggcgccatcaaaaaggaaagccagatactttcctttctacaattgaagccatttactactttctggtagactaccatactgatatattaaaagagaaatacagagggcaatatgacaatcttttatttttctattcttttatgtaccagttgataaagaatgccaaatgctctggagataaggaaacaggaaaacttacacattagtttttaacaagccacttatgtctttttattttgctaacattaataaacttatatttgtgctttgttttttcttaagaaataatccatatataatgcctgtaagacccattttgaaaaaaattccagtttcatatatatcacttcatatttcttgaaggaaaattgtatctggggggaatttttcagagatacctgttgattgaaaaacttacttcagaagttatttgctcagtgaaacctcagtttcat

SEQ ID NO: 56916 - DNA, 1295 bp, Homo sapiens; identical to SEQ ID NO: 13138

SEQ ID NO: 56917 - DNA, 877 bp, Homo sapiens
  misc_feature (1)...(877): n = a,t,c or g
tttttttttgttccttgaggtgcatagtagcttgtttatttgaaatctttctatgttcttgatgtaggcacttatagctataaacttccctcttagcactgcttttgctgtatcccataggttttggtatgttgtgtttccattttcatttgtttcaaataactttttgatatccttcttaatttcttcattgatccattggtcattcaggagcatgttgtttaatttccatgtgtttgtatagtttccaaaattcctcttgttattgatttctagttttattccattgtggtcagaaaagatgcttgatattatttctgttttttaaaaatttcttcagacttgttttgtggcctaacatatggtctatcctggagaatgatccatgtgctgatgagaagaatgtgtattctgcagccgttgggtgaaatgttctgttagtgtcttttaggtccatttggtctaaagtcagtttaaacttggtgtttctttgttgattttctgtctggatgatctgtccattgctgaaagtagggtgttgaagtccacaagtattattgtattattgtattgtcttcccctttagatctaataatatttgccttacatatctgggtgctctgatattgggtgcatatatatttacaatttttgtatcctcttcctgatttcatccctttatcattatatagtgaccttctttgtctctttttacaatcttaggtttggtagtctgttttatctcatgtaagtatagctacgcctgctcttttctggtttccactcgtgccgaattcttggcctcgagggccaaattccctatagtgagtcgtattaaattcgtaatcgtgtcatagaagagcatcngtagtcaaag

SEQ ID NO: 56918 - DNA, 1802 bp, Homo sapiens
cggacgcgtgggcggacgcgtggggctatacatgtgtgtggagtttctctggaagtctgagcgatatgaactcattgctgatgtcaacaagcccatcattgctgtctttgagaaacaacgagacttcaaaaaattgtcagatctctactacgacattcatcggtcatatctgaaagtggcagaggtggtgaattcggagaagcggctgtttggtcgctactatcgtgtggcattttatgggcagggcttttttgaagaagaagaaggtaaagagtatatttataaagagcctaagctgacaggtctgtccgagatttcccaaagattactcaagctctatgcagataaatttggagcagacaatgtgaagataatccaggattccaacaaggtaaaccccaaggatttggaccccaaatatgcctacatccaggtgacctatgtgacgccgttctttgaggaaaaggaaatcgaagaccggaagacagatttcgaaatgcaccacaacatcaaccgctttgtcttcgagacacccttcacgctgtcgggcaagaagcacggtggggtggcggagcagtgcaagcggcggacgatcctgacaacgagtcacctgttcccctacgtgaagaagagaatacaagtaattagccaatcgagcacagaactgaatccaattgaagtggcaattgacgagatgtccaagaaggtttctgagcttaatcagctttgcacaatggaagaagtggacatgatcagactgcagctcaaactgcaaggaagtgtcagcgtgaaggttaatgctgggccaatggcctatgcacgagcttttcttgaagaaaccaatgcaaagaagtaccctgacaaccaagtaaagcttttgaaggagatcttcaggcaatttgcagatgcatgtgggcaggcccttgacgtgaatgagcgcctcatcaaagaggaccagctggagtaccaggaagaactgaggtcccactacaaggacatgctcagcgaactctccacagtcatgaatgagcagattacgggcagggacgacctgtcaaagcgcggagtggaccaaacctgcactcgagtaattagcaaagcaactccggccctacccacggtctccatctcatctagtgctgaagtctgagggctctgcagcatcagacccacctctaagagaactttctgaatttgcagctaatctcggggaagagaaagataggtttaatttatttgaagttttcatggtgttaatatttttgtttacctcgctagcttcagaattttgccaacctctgaatttgcacattttgtataatttttttttccttggagcagtgttgatcaagccaggtggaatattggcccatgaaattccagtgaatgtgtagctcaaatgcaaaccctaagtttgctgtccagttattgtatggtcagtaccccagtcctagtacacatattttaaaggttaaagtgaatgtttttgtaacatttaagccatatttccagatgtaaataaaagattgtaaaatatacggtttttacccaaatttaaaagatcctttttagttaatactatgacagtactaaaaatatatgaataacatttcagataccattatattaaaatatttgtgtatgtgtacaaaagcgttgataaatactaatctttaaagtttgtggagttcctttatttgtaatatatgtgctcttaaaagcaatgggatgtgaaattatgaaagtattttattgttcatagaaataaaaaacacagttactttgcaaaaaaaaaaaaaaaa

SEQ ID NO: 56919 - DNA, 2162 bp, Homo sapiens
  misc_feature (1)...(2162): n = a,t,c or g
ctgggttttctccgcactgatctgagagctgggcggcgtccacacctaagaacagcagctccaccaaatgaagtccctctcacgcagctccacagcgctgtctcgtgaatggacagtagccacttacaaacaaatcaacatttttaaaaagaaaatgtaaaggtgtgttttggggcatttgtggaacttacccatggggactaatatggaaaaggtctgtccatagtggttccctgaagactggaattacttcagcaaaacttccccatgaacagctaatgtgtagtgaaagaatgagctagcaaatgagttttagcggggacaaaaaatcaaacaaaaaagtgaatgcttagaaccttctcaaagcagtcacaagtacagacacttcacttagcctagggggccttccagggttcttgtggctgttgtcagagcaggagctgggggagggaagacttgttctctctttcttgaggggtggcattaggaacttacgaaaccagagacctttccctatgacttggcagtatgtgaatatcctctacacttagttattgataaacttcttaaagagatctgttattttcaggtagtgccataatctgcacttagcattggcttgcttcagttgtttctcttcccagccagtatgccacaggtgaactttcggggttgtcattaagtaagttgtgaaatttctgtaataacaaaggcagtccgcattcttccctttcccccaaattcctagggcaaaacttttttatggtgctgttaacatgggagtcacacaagccgcctgactttttctcattgccattagtaatgactgatggaaaacccagccaccactgtgatgcgaaatgatcagtctgttgcctgaaacagcccagtcctcttaactgaaacagcattctacttcttgttccaagatgagcctctgcaatattctggcaatttaatataccccctacaaaagcactccacagcttttacactattttgactttgagttataactagtattattcatgttttcataaaaagaatttagtgacccagagctataatcatccatcaagtcttccacaataattcccaactcataaattgctttcctaacaactagcaaaagctattgttcataatggcatttctaaagcttttgggcactgtgtaccaggatgaggaagagaagaaatgaggagcctgtcttttaatattccagtatttgtgtgtttgattttttttgacaacagtacatatatctatttctctagggatatggaagtaagtggagaagggcctacctttttaaaggacaaatataaaaatagcaacagtatctttgctaatcttactaatggatattgattaaaaaaaaaaaacctcagtactgcatcactgtgttgggatcgtaccaggacaatagggtcattccatatgataaaactaaaggactaaatttgttttataatgatgtcttagagggactgaaaagtttaaggaggcgatcaaactaaaatgtcttaatggctgtgtgacacacgtaaggnaaggaaagggggtcacgcacatcatgtactggaatgatctgcattaaacattgacttgtcttcagaaataagactgaagggttttgttgttccttacagttttcgtgttacatcacctaaagagatttcttttaaaaactttctagactctttgcaaaatgtatattactaacatagtttggaagaaaaattgagtagtggtaagttttgttcaagcacaatgttgaatgttaagcttcctgtattaattttagttcagttaatggttcagcccatacaaaggtgctatcctagggattttatgaattcctgaaaggaaaatagaatatgatcaattccttgccctgtggaagagtgcagaactgtggttttgttttcctttgacttctgtaaaatgtgaccgtttgacatctgtggtagattgaacggaatatcacagctgctgagtttactccatagctttcaaaccttttttattttaagaaattcttgaaaaaccctatgttccatgggaacataaagttattatagtgcctcctaaggggttaatataaatcaaggaggaagtttatatttaaggaagaattggagtgacgtatcctagaaaaa

SEQ ID NO: 56920 - DNA, 1133 bp, Homo sapiens
ttttttggactgcagcaatacctcctttatttgatccctgtttatgtccacatatgtactgtattatcacagatgcaactgatttatcatagagcactcagaaaacatggaaaagtatttttaaaaatcgaataatcctattcaagtcaaccagtgttaaccccggtgtgcttcctgccagtctgttcctccccatgggagtcacacaaaatgaaaatctcctagaaagagaaattcctctgtcctctgacttcttcacttagtacgctgcgaccttcccatgttgttcaacatcctcaactcggagcgtcactggctggaggtggtctataaatggaattggcttaactatctcttcactgaaaggtggacatttagggagtgtccagttttcagctgtcataaacaactgccttagacggcaaagaattcacaggtcaatcgttcccttcgctttgaacttcttcgcagaccgttcacttgaccgaagctggaatttgctcccgtaaatgtaggaaataaagccatcggtttccacagtgaacacgcagtttagcttggggataactttcaggcggtcttctttggtgataattttgaaaatgtgctttgtttcctgtaagaaaggattcctgtaatacccaacattaagaggggccatttggaattttgtcactgaaataaataagcccccgtgaaagatctgcctttaaagagcttggcctgaatcatctgtggctgcgtgtctggcttgagccccactgcacaggtccctgatgtactgtttcccaaagttcatggagagggaggaaaaggctgtatctctgctgctctggtttaatgtcaaagagccgcagctccctcctttgcctggcagagaggcctttggctttcttcttcttctccttgcgcttgtggcgggtgaagtactccaggaccaccgccttgcgctgcagctggtcctcgcgggcctgcgggctcatgcggggcgtgctgcgcttcaggaaggccctcacgaaggcctcggcccgctgtgctcctgaaggctggacatcggagtcattcgcctctttctgagacaatgcatggtagatcacactcttcattctcggaccgcttccggcgctctctag

SEQ ID NO: 56921 - DNA, 1649 bp, Homo sapiens
  misc_feature (1)...(1649): n = a,t,c or g
gtcccaaaataacggtcatcctactgggtttatcccacccttaaatatgaagcctgttacctccagaagcttctgagaagaatgatgtgaaaagacagggagtgggttctaggcaaagaaaacataatgaccattcagaggagtcagtagcacagctcacagataaagtattttattactatctgaagttttcttttgttttcatgcaggacattttaaaaacgtatatggcagcagaaacttgtttctcaatagaaaaaatacattcagaggcatttctgggatagtctatctgtgttagtatttggtgctatctatgtccagccaagttatctaccctcaaattctgactaatcatgtttgtgctttgggtatttaaaattacatacatatatattctttttgccaaaaacaaaagtcttgcttcttgtcaaatgattgctaaagtagatcttacattttttgttattatgtatatatttatacacacccccaacacacttagtgatttctgttatttcctagggagcacagctttaaggctatgagatacaactaaaaggagcccatctatttggttttccagccaattattgtactcacatttcaggggagaatctgaaattcctgtcatgtttacagcaacaatctatcattcctggctagctctcagcctctctctccttccatagggttagaattatgtcattttgttacttagtggccacgtctatttctgagaaagactggttacatttatgtggcatctcaggtatcattaaggaaaagccagagcaggggtgagcagaggtcaaaaccacagacgcagcagggccatttgccgcctttggccgggatcacaaccactgcagtctcccagcaggtaggccttgccaagcctaaggctccccatccaatctagacagaggggcgctcagagcagactttgccgtagccatgtctggtgagcacaacagggaatgaattgggcactccactcccccgtctctctggcccagccctgaactagatgagctgcatttcatggagcccattttaaaacctctttccttatgactttgttactcaagtccagagttctctgtgcacttctgctagataaggagtgtaagccctgccccccagcactggnagcacgctgggccctccccacacaggacaccgtgccagttccgggggaagctgactcaaatccaacctggaaatcctccatgaaaaccaaaatggacttgtctttttatttggatagtgtaatatccattccattttataaattttttagggtttttctcgttgtaatattgtacagttttgcatggcctggtgtgatcattttttggttagaatataatgctgacaaatgtggatggaggggaagatactgctttagcctatcactccttattttattttgtttggttttatgccctcagtgtcttagggaactttttaagagatcctctgctaccaaacaatgatgtggattcttttgcacagaaatatttaaggtgggatggtaaaaaatgtcacaaaagactcctcaccaatactttatgttgatatcacttaatattaaccagactttgctgtattgcaataaaacagagaactgttaaaaaaaaaaaaaa

SEQ ID NO: 56922 - DNA, 3478 bp, Homo sapiens
gcgtcgacgtcgacgcgcgtcgagggtatcttctttttttattccagataactacttccactcacaatgagatgaattgtctttttacagaatttagggattccaagttgcctggttttaatataatacatattcacaaaatttacacagctcatgcataccataacttatacagagaacagtttagcagtctgcttaaaatgttaaaaaaaaaaatcataaaaagccattgttctgttacacataatctgtactgaagtcataagcatcatcctcttcaatgattttatccaaggataaaaggccttgtaggactgttcacctggctgtagtctcctcaggacagtgcctcccctgtctcttctggcaggcaaacatggcctggggctggtttttccatccaacttctttcatcaacagtttcctgggtcactgtctttgtcatcctccctctcctcctgcttcctttctttccgttttggcaattcttcatgtatgtccttttcttctattattcccatttggtcagaccggaagactggaaaaggatgctattggccaaatgagggcccttgatggctcttatgctctgtgcattgttcttttccagttcttccagattgaagccgcttttcatgtctaccacaatactctcattaaaatatggaggaggagtccaagatgtagggggatggcaatagtaagctaatgaggcacctgtccactcagaccacagcagtttggcagcaccttcaacatttgggattccacctttttggtgcatacctcttctctgagcaagcacagtaaaaaattccagagaattcctgtagcctgggacagtatatttcagtactacctgtcgagcatcagcctgggaaaggatggcactggcagcctccatcggttttactacttcaaatacttgctggacttcgcagagcaagcgcagaggaggaattaagtggagatacgatgaagctcggactatctatgattgtgatctgtttggtccaaggggacaacttgcatgctccttgtaagccccatggatacaccaacattacacatctgttcttgttttaagctattgataatgctgcttttccccacatttgggaaaccaattactccaacccgaatggctttgctgcaagtttcctgaaaacctccaagaagtttccaaaggccctctttcccaaagcagacttcacttctgaatggagcagcattcttctttgccttcacacgcttggttatcttccctttatcctttggttttgttgaggctctgaacaccactgttggcaattctttcttcaaataatttagccagctctcccaaattctcctttggtaccagatctgatttatttaatataagtaccagctttttctgtccactctggacaatggcctcttctacctgaggacatctgcaaccaagaggatctctggcatccaacacctctaggacaacatcggaggcttcaatcacctttttaagttcttggcagtacagcttctttgaattctgtttgcccgacttggctttgttctcaagttttgcaaagcccaaactcctttttccataggttccacatttgatggcttaatatcaggattagtttcaagttttcttttcttttctagttccttctgcctgtcaagtttctgctgctgttttagttcttcaagcctctgtttccttagctcagcttccctaagaagagcctccttaaagggagcactgtttggaactcctgggtctttcctaggcttcttgtgaccccgctttttagcctcctttcttaattttcgatgatgttctcgaacctttttttggattttataccgcttatggcaggtcatgcgtttacttgctttctttaactctttttgcactactcatttgtcctgggctctgcttcttgctcttttcttgcaccaactaatgcggtgtcgctggcggctgaggagggcggagagttctgtggtgaaatagtgggaaggattcatgtaggcatcgggaagagcctaagtccacattataaaataggaagttgatgcggggtacagttactcccggaccggcggcgtgaaagtcgtgatatcatcgttgaactattagctttgaagtttaaatccaatggagaagactcaagaaacagtccaaagaattcttctagaaccctataaatacttacttcagttaccaggtaaacaagtgagaaccaaactttcacaggcatttaatcattggctgaaagttccagaggacaagctacagattattattgaagtgacagaaatgttgcataatgccagtttactcatcgatgatattgaagacaactcaaaactccgacgtggctttccagtggcccacagcatctatggaatcccatctgtcatcaattctgccaattacgtgtatttccttggcttggagaaagtcttaacccttgatcacccagatgcagtgaagctttttacccgccagcttttggaactccatcagggacaaggcctagatatttactggagggataattacacttgtcccactgaagaagaatataaagctatggtgctgcagaaaacaggtggactgtttggattagcagtaggtctcatgcagttgttctctgattacaaagaagatttaaaaccgctacttaatacacttgggctctttttccaaattagggatgattatgctaatctacactccaaagaatatagtgaaaacaaaagtttttgtgaagatctgacagagggaaagttctcatttcctactattcatgctatttggtcaaggcctgaaagcacccaggtgcagaatatcttgcgccagagaacagaaaacatagatataaaaaaatactgtgtacattatcttgaggatgtaggttcttttgaatacactcgtaatacccttaaagagcttgaagctaaagcctataaacagattgatgcacgtggtgggaaccctgagctagtagccttagtaaaacacttaagtaagatgttcaaagaagaaaatgaataatgttaagccattcttgattggacctcatagcttattttagttaatcttttttttgtcttttagccttaccaccttttaaaaaatttgttattctccagaaacagtaaataggtgagtaggggtggtgcaagtgaattcgttttcatttagaagcccctctgtacagataatcaaaattcaaagttgaaagaatcaaaagcagccacagttatgtaggtctgatttgaatgtcataattgcagtgacaggacattgccaccaactctatcctactaccatcaatgttgtgtttattccgtcaataaaaaagacttgcttccaggaatttttatccatacactttctaactgtactatctgggcagttccaagccagtttctattagctagctggaccaaagaccacaaatctctttttttcctaaac

SEQ ID NO: 56923 - DNA, 315 bp, Homo sapiens
cacaagaatagcatttctgctcatctgcatggtcgcagtcacgagccagatggcctggtttgccacagttgtagcagcattgctctcgctctctcttgggctccttgcagtccttggcaatgtggccacctctaccgcagttatagcaggcatcctcctgaagatcacaatccttggcaagatgaccagactcaccacagcgatagtcgacgcggccgcgaattccagatctatgaatcgtagatactgaaaaaccccgcaagttcacttcaactgtgcatcgtgcaccatctcaatttctttcatttatacatc

SEQ ID NO: 56924 - DNA, 1705 bp, Homo sapiens
ttttttttttttttaccaagttcataattttattatactctgaatagagatgatatttaaggagcagagaaaatgactatacaaaagatttatagaacattcatttacatactggatatattctttacagtatcagaaaagtaaaaatatgcactaacaaggcagagaagacgttacaaggtatttgatgctgaggaataaatgcacagtgacttttaacatggctatagcttaacactggaggaatacaacaatacgttcttttactgagtagttagtaggaccctggctataacatgcgttgggcacagttcgtgaactctccgcatttactccccagggcagtacgtgcctggtccagcgggagccctggagacaaaatgcctggaaacgttccttttcctgtggccctagagccggtgtccacggtgggggctctctcacggtttctgagcccacagtacaatctgtgatgacacacagcttgttctgtttaatgcacatgtaacacaaaaggaagaaagaaacttcctataccagctcttcagaaatcgtggaaacttgcttcctttggttcctcagagggagctatctgcttggagcaaattccccgatgcccttgaccacgtttaccttgtgtaaaaatcacacctggccaatgagttcaaaaaagcacgtttgcagggccttcctgaatgccgtcgaggcatggccttcatgagggccattcgcgggcaccccgatgtctctgtgattccctggcaggctgcgtttctcaatactgagaccctagtttgctctgacttctaaatgagctctctcatccttcatcagaaggataaggaacctggcctgccactctttgggttaaacatgggtagagaccgtcctcaggatgaggacctcttggggaaagtacaaacctctgctccctgtggccacattcctgcagtggatgaaaaaccgagatgctagaggcctctgctaaagacatcagggtcaacacatgaggatctgctgaaaatgccagcacctcctgacagtcatgccaccgcaagttagagaaggaggtccacaacgaccaaggcaaacatttggcacagaaatgaggcacttggtttggtgcatcaataggagctaaaaagtggaatggtccacctgctttcacacacgcatacacgcacgcatgcacacacgcacacacacacaacacccactgtgatttggctgcttccaactctgcctgtttctaagttttcctcggcccctcactttaaagcagagttcacaaagcacattcccaaaccccagctccctgacaggagcttgtgacaccagtgtggcctaagaatgggggatttgacttttgaaagcagaggagggaatttcgggctggatcgcaatcaggacagtcagcatgcctgcagagcacctaggctgtgagaggatggggccaaggccttattctgatgtggcccagctccatctttcactctggggatgttccagggtcacaaattcccccaaacctttgaccacgaacagattcaagcaggaaaaccagggcattggaatgttgaaataagcctgaaatacacttgattcagtggcttagatgatggcaaacagtggcactcaaaaacagcttgtcagtaccggggtttcttctctttttcctcatcctcccttctgctcacacatgccc

SEQ ID NO: 56925 - DNA, 495 bp, Homo sapiens
  misc_feature (1)...(495): n = a,t,c or g
ttgaantcaatagctatgacatgattacgaatttaatacgactcactatagggaatttggccctcgaggccaagaattcggcacgagcgctgaatttgcccaagtcacaaattggtccagctgctgcttgcgtgtctttgcatggcacccccacaccaacaagtttgcagtggccctgctagatgactcagtccgtgtgtataatgccagcagcaccatagtcccctccctgaagcaccggctgcagcgaaatgtggcgtctctggcctggaagccccttagtgcctctgtcttggctgtggcctgccagagctgcattcttatctggaccctggaccctacctccttgtctacccgaccctcttctggctgtgcccaagtgctgtctcaccctgggcatacacctgttaccagcttggcctgggcccccagtggggggccggctgtctcacttacccgtggatgctgctatccgggtatggggatgctnacaaa

SEQ ID NO: 56926 - DNA, 1923 bp, Homo sapiens
  misc_feature (1)...(1923): n = a,t,c or g
gacagagcggtcggtgacagcctcaagggcttcagcaccgngccnatggcagagcagaccgccaccttcctgccacagccttttccccaaacctggtatcaccccctctcctccctccctaatcccacctctcgggcctggccactccaccccaccccttccaggactcagattcagactctgagggaggagccgctggtggagaagcagacatggacttcctgcggaacttattctcccagacgctcagccttgggcagccagaaggagcgtctgctggacgagctgaccttggaaggggtggcccgggtacatgcagagcgaacgctgtcgcagagtcatctgtttggtgggagctggaatctccacatccgcaggcattccccgacttttcgcttctccatccaccggcctcttattgaacaacctagagaagtgaccatctttccctaacccagaggccatcttttgagattcagctattttcaagaaacatccggaacccttcttcgccctcgccaaggaactctatcctggggcagtttcaaggccaaccatctgttcaataatttcatgcggcttgcttgaaagggacaaaggggggctactcctgcggttgttaaaaggagggaacattaggttacctgggagcgaatagccggggctgggaacagggagggacttggttggagggcgcacggcacccttctacacatcacactgcgtcagcgccagctgccgggcacgaatacccgctaagctggatgaaagagaagatcttctctgaggtgacgcccaagtgtgaagactgtcagagcctggtgaagcctgatatcgtctttttttggtgagagcctcccagcgcgtttcttctcctgtatgcagtcagacttcctgaaggtggacctcctcctgggtcatgggtacctccttgcaggtgcagccctttgcctccctcatcagcaaggcacccctctccacccctcgcctgctcatcaacaagggagaaagctgggccagttgggaccttttctgggggatgattatggggcctcggaggaggcatggactttgactccaagaaggcctacagggacgtggcctggctgggtgaatgcgaccagggctgcctgggcccttgctgagctccttggatggaagaaggagctggaggaaccttgtccgcaaggaggcacggccagcattagatgcccagtcgggggcgggggtccccaaccccagcacttcagcttcccccaagaagtccccgccacctgccaaggacgaggccaggacaacagagagggagaaaccccagtgacagctgcatctcccaggcgggatgccgagctcctcagggacagctgagccccaaccgggcctggccccctcttaaccagcagttcttgtctggggagctcagaacatcccccaatctcttacagctccctccccaaaactggggtcccagcaaccctggcccccaaccccagcaaatctctaacacctcctagaggccaaggcttaaacaggcatctctaccagccccactgtctctaaccactcctgggctaaggagtaacctccctcatctctaactgcccccacggggccagggctaccccagaacttttaactcttccaggacagggagcttcgggcccccactctgtctcctgcccccgggggcctgtggctaagtaaaccatacctaacctaccccagtgtgggtgtgggcctctgaatataacccacacccagcgtaggggggagtctgagccgggagggctcccgagtctctgccttcagctcccaaagtgggtggtgggcccccttcacgtgggacccacttcccatgctggatgggcagaagacattgcttattggagacaaattaaaaacaaaaacaactaacaaaaaaaa

SEQ ID NO: 56927 - DNA, 2201 bp, Homo sapiens
  misc_feature (1)...(2201): n = a,t,c or g
ggggccccgtgatctcaacggtcctgccctcggtctccctcttcccccgccccgccctgggccaggtgttcgaatcccgactccagaactggcggcgtcccagtcccgcgggcgtggagcgcggaggacccgccctcgggctcatggcggccccggtccgcatgggccggaagcgcacgctgcctgcctgtcccaacccgctcttcgttcgctggctgaccgagtggcgggacgaggcgacccgcagcaggcaccgcacgcgcttcgtatttcagaaggcgctgcgttccctccgacggtacccactgccgctgcgcagcgggaaggaagctaagatcctacagcacttcggagacgggctctgccggatgctggacgagcggctgcagcggcaccgaacatcgggcggtgaccatgccccggactcaccatctggagagaacagtccagccccgcaggggcgacttgcggaagtccaggactcttccatgccagttcctgcccagcccaaagcgggaggctctggcagctactggccagctcggcactcaggagcccgagtgatactgctggtgctctaccgggagcacctgaatcctaatggtcaccacttcttaaccaaggaggagctgctgcagaggtgtgctcagaagtcccccagggtagcccctgggagtgccccaccctggccagccctccgctccctccttcacaggaacctggtcctcaggacacaccagccagccaggtactcattgaccccagagggcctggagctggcccagaagttggccgagtcagaaggcctgagcttgctgaatgtgggcatcgggcccaagnngccccctggggaggagacagcagtgccaggagcagcttcagcagagcttgccagtgaagcaggggtccagcagcagccactggagctgaggcctggagagtacagggtgctgttgtgtgtggacattcgcgagacccgggaggccgggcacaggccggagctgctccgagagctacagcggctgcacgtgacccacacggtgcgcaagctgcacgttggagattttgtgtgggtggctcaggagaccaatcctagagacccagcaaaccctggggagttggtactggatcacattgtggagcgcaagcgactggatgacctttgcagcagcatcatcgacggccgcttccgggagcagaagttccgactgaagcgctgtggtctggagcgccgggtatacctggtggaagagcatggttccgtccacaacctcagccttcctgagagcacactgctgcaggctgtcaccaacactcaggtcattgatggcttttttgtgaagcgcacagcagacattaaggagtcagccgcctacctggccctcttgactcggggcctgcagagactctaccagggccacaccctacgcagccgcccctggggaacccctgggaaccctgaatcaggggccatgacctctccaaaccctctctgctcactcctcaccttcagtgacttcaacgcaggagccatcaagaataaggcccagtcggtgcgagaagtgtttgcccggcagctgatgcaggtgcgcggagtgagtggggagaaggcagcagccctggtggatcgatacagcacccctgccagcctcctggccgcctatgatgcctgtgccacccccaaggaacaagagacactgctgagcaccattaagtgtgggcgtctacagaggaatctggggcctgctctgagcaggaccttatcccagctctactgcagctacggccccttgacctgagcttatgccgtgaaacagcccccagcccccgtctgtcccccaacccaggctagccagccttttaacaacatcttttggggtacaattagaatctaagtgtttgcagccatatgtgtcatgtagaagatgcctagccctggggaccttgtgaaatacgcaggaaccagggataccatctggtccagtggtttttaaacaaagctgcttagcacctggaattccctggtcagggagatggagtcagtggggcattgcagcttggaatctattttatgtcaccagttggtcctcatcaaataaaatttccttaggagtgcagagggctcattgggaaaataaaaataataaaaataaataaaacttcctaaaagaaaagattgaaaaccaaaaaaaaaaaaaaaa

SEQ ID NO: 56928 - DNA, 337 bp, Homo sapiens
  misc_feature (1)...(337): n = a,t,c or g
gattaacaacaataactaataatagaacaattataacaatatattgttataattgttctattattagttattgttgttaatctcttactgtgcctcatttagaaattaaactttctcatagatatgtatagatgggaataaacacagtacgtaatacgggtttagtactatctgtagtttcaggcatcccctgggggtcttggaacatatctcctccagataagggggggactactgtatccctttatttaattactggagagactaaacctttttaaaaatgctttgcagacattggtaattattttgtgaattagctatgcatgtcgntttctca

SEQ ID NO: 56929 - DNA, 376 bp, Homo sapiens; identical to SEQ ID NO: 13154

SEQ ID NO: 56930 - DNA, 1849 bp, Homo sapiens
  misc_feature (1)...(1849): n = a,t,c or g
gggcaggaagagcagcaagtaaagaaaaacacagattgagttgacaagaaggtgccagcaaaaaagaccaataaggagtccggaaaagcagaagaaaaaccaggagaatgtggtatcgtggcacccaagagaaggttttttctaggaggaggaantgatccattgtgtaaggtcactttggtggcagttcatggatcaatagcttgaggtgacaagacagcagacacgacgtgggtctctgggactgcctgtgccgttgtgggcagcccctccagagccctgagtcacgcagccttcagaggcacccatggctacgagaagcacagtctctgcctgaggctccagagcggccctttttccccagcagcagaccttgggacctgtgagcgctgcatccaattaaccatgggaagggtcagcaccagccaccagccccttaggtgaggactctgcctggggctctgctgatggttccgaatcatggagctgcgcgcggcactggtcctggtggtcctcctcatcgccgggggtctcttcatgttcacctacaagtccacacagttcaacgtggagggcttcgctttggtgctgggggcctcgttcatcggtggcattcgctggaccctcacccagatgctcctgcagaaggctgaactcggcctccagaatcccatcgacaccatgttccacctgcagccactcatgttcctggggctcttccctctctttgctgtatttgaaggtctccatttgtccacatctgagaaaatcttccgtttccaggacacagggctgctcctgcgggtacttgggagcctcttccttggcgggattctcgcctttggtttgggcttctctgagttcctcctggtctccagaacctccagcctcactctctccattgccggcatttttaaggaagtctgcactttgctgttggcagctcatctgctgggcgatcagatcagcctcctgaactgggctgggcttcgccctctgcctctcgggaatatccctccacgttgccctcaaagccctgcattccagaggtgatggtggccccaaggccttgaaggggctgggctccagccccgacctggagctgctgctccggagcagccagcgggaggaaggtgacaatgaggaggaggagtactttgtggcccaggggcagcagtgaccagccagggcaaatggcttagaagcaggccactccccagcctgctgcccagcactcactgtgctcaagccgccagggctcatcatggtagctgggagctgtggacgggaagttccccaggtggtggggccaagccagggactcatgacttttgcccctcccttcagagcctggtcacacaaggggcgagcaccaggccagccctgggactggccagagctgggccccaaactgcgctggaatcgcagcaggagaggggagtgggctggttcttcccaccacttcccaggctctgacagccgagactcatttccaaaggcacagcagctttctaaagggactgagtttggactgggttttggaccctcccaggggctggagcttcatcaccctgggcagtgtcttttctcagagagcaggtttctttatagtttggaaataaatggttcacggtccactggccgccttgtgttgctggagacgtgggggcagggaggggacagtgtgggcctggcctctcctttcctttccctgcctggagccttcttcaaatgtctggtcttaagccaggcctccttcattttctcgctcctgttagaacaccagtcccctccccagtggggccccactgcacctgctggcaggaaataaatgaatgtttactgagta

SEQ ID NO: 56931 - DNA, 564 bp, Homo sapiens
ctcattagttagatcaatcacaagtcagcctctatgaatattttcatatatctcctatcaagttacatttaagtgtttcactgagttccggcagagaagaagctaaagattcaaaacaaaatggaggactgattccagttcattctttaaatcttttgctgaagagtattggtgccacactgacagatgtacaagatgtagtttttaagcttgcattttttgaactcaactatcagttccatacaacatccgatctacagtctgaagtcataagacactattcaaaacaggccattaagcagatgtatgtactcattcttggacttgatgttttgggaaatccatttggcttaattagagaattttctgaaggtgtagaagcatttttttatgaaccttaccagggagccatccagggtcctgaagagtttgtggaaggaatggcactaggacttaaggcactagttggtggagctgttggtggattggctggtgctgcctccaaaatcaccggtgctatggctaagggggtagcagctatgaccatggatgaagactaccaac

SEQ ID NO: 56932 - DNA, 1996 bp, Homo sapiens
tttttttttttttttttatcaaatgaatactttattagagacataacacgtataaaataaatttcttttcatcatggagttaccagattttaaaaccaaccaacactttctcatttttacagctaagacatgttaaattcttaaatgccataatttttgttcaactgctttgtcattcaactcacaagtctagaatgtgattaagctacaaatctaagtattcacagatgtgtcttaggcttggtttgtaacaatctagaagcaatctgtttacaaaagtgccaccaaagcattttaaagaaaccaatttaatgccaccaaacataagcctgctatacctgggaaacaaaaaatctcacacctaaattctagcagagtaaacgattccaactagaatgtactggtatatccatatggcacatttatgactttgtaatatgtaattcataatacaggtttaggtgtgtggtatggagctaggaaaaccaaagtagtaggatattatagaaaagatctgatgttaagtataaagtcatatgcctgatttcctcaaaccttttgtttttcctcatgtcttctgtctttatatttttatcacaaaccaagatcttaacagggttctttctagaggattattagataagtaacacttgatcattaagcacggatcatgccactcattcatggttgttctatgttccatgaactctaatagcccaacttatacatggcactccaaggggatgcttcagccagaaagtaaagggctgaaaaagtagaacaatacaaaagccctcgtgtggtgggaacctgtggcctcactcttacttgtccttccattcaaaacagtttggcacctttccatgacgaggatctctacaggtaggttaaaatacttttctgtgctattcagccagaaatagtttttgtgctggatatgattttaaaacagattttgtctgtcaccagtgcaaaaacattacagatgtctgggctaatacaaaaacacataagaatctacaactttatatttaatactctattcaaatttaactcaaagtaatgcaaaataattagaagtaaaaacttaattcttctgagagctctatttggaaaagcttcacatatccacacacaaatatgggtatattccatgcacagggcaaacaactgtattctgaagcataaataaactcaaagtaagacatcagtagctagataccagttccagtattggttaatggtctctggggatcccattttaagcactctcagatgaggatcttgctcagttgttagactatcattagtttgattaagcaactgaagtttacttcataaattactttttcctatatccaggactctgcctgagaaattttatacattcctccaaaggtaagtattctccaaaggtaagtatttgactattaacacaaaggcaatgtgattattgcataatgacactaaatattatgtggcttttctgttaggtttataagttttcaatgatcagttcaagaaaatgcagatcatatataactaaggttttaacacccagtggttgacaaactatggcccacaggctaaacccagcctccccttgtttttataaataagttttattagaacataaccacactcattcatttctgtattgtgtatagctgctttcacgctatactagcagaactgaatagttgtgacagagactgtatggaccgtgaagcataaatatttaccatctggcccattctaaaaaaagtgtgccaattcctggtttacactaaaatatagagtttagtgggaagcctatttgaaatgtgttttttttaggggctgtaattaccaattaaaattaaggttcaggtgactcagcaaccaaacaaaagggtactaattttttatgaacaatatatttgtattttatggacataaaaggaaactttcagaaagaaaacgaggaaaataaacgggggaaacgggaaaaacgggc

SEQ ID NO: 56933 - DNA, 888 bp, Homo sapiens
  misc_feature (1)...(888): n = a,t,c or g
ctttcctactggaacctgggcttggctcctggctgttgtctctctcccctaggttcccgctgggaaggcttgataacaaaagcaggcttttaccagacaagcaaagatcaaaaaaagatgcaaacctttgtttgtttaatggaaattcctcagggttgctttcctgtgtattccaaagctatgacggaatagtttgaatagtgtgtgctcttgactcatccatgacccctaagctcccaagatctcccaaatccgcaggccccgtttggcagagttgtggctcatggggatgacagagcagaatgtttagggtttctgcccaagagggagaccaataaaaatagggatggacaaagccttacgatgtcccctacttcctaaagagaaggtaagaaatcccgtgctgaacatccactaggttctgggtatatactttatacacacatggcccctttattcctctcagtgaccctcagggtaggtctcactacccaagtgttagagtgaaggacgctgagactcaagaagaggaacaggtcagggtcagacagagctggaatttggacacagttctgtctgactccagatattccttgtatcacacaatactgtcttctgaagcaagtgattgtccccaacacacacacacacacacacacactctctctctctctctctctctctctctctcagcagagctgaggataaagaggaatatcctgcacacttcttccttctgtgtcagggaacatttgcttgtctacagctcgagtatttgttaaacactcagtagcacccaaaccctggagcccttagcagtttccttttgcttgttttactaggcaagagtaggcatgtcgggggncggtggggacattgaatcaaact

SEQ ID NO: 56934 - DNA, 557 bp, Homo sapiens
  misc_feature (1)...(557): n = a,t,c or g
ttctatgacatgattacgaatttaatacgactcactatagggaatttggccctcgaggccaagaattcggcacgagcaattctttgaactgttgaaagatctcctgacaaattgttactgatattgtgttaagcaataatcttaaccttcccagtaaatgaactggaatgcccaattttaagtttctctatttatgaagaaacaaaatacaggggtcatagtcaggatactgcctatggtacattttaaaatttctgggtctactaggatataatctttcttaacctcttttgagatttgatgtcagttcaagggaagcattccattgatgtcaggaaggcagctatttgttgactgaaattctggtactctggcataagctcgttctaaaaatccacaaatatgttgttaatagaatgggaccatacttttcacttgggggcctacccgctagaggtgagatgtcatccttgagatgtttggaagactttgtgagatttttttttcttttgcaaactagacgtgcgccagcttctctgacctaaatgtanctccag

SEQ ID NO: 56935 - DNA, 1036 bp, Homo sapiens; identical to SEQ ID NO: 13166

SEQ ID NO: 56936 - DNA, 405 bp, Homo sapiens; identical to SEQ ID NO: 22401

SEQ ID NO: 56937 - DNA, 533 bp, Homo sapiens
ggaatcttgttaaattcctgtgtgcaggaaaggaagaagtagccaaaatgagcgggcgtttctaggactcattcaagaaacagtaggattcacccaagatctccactagctcctgtgatcctagctcccagcttaatgaggctctgcaaccattctcccttttattcctcacctttacctcacttggaacataaagggtgtttaaaatgggaagacaggctgggtgtggtagctcacgcttgtaatcccagcactttgggaggcccgggcgggtggatcacctgaggtcgggagttcgagaccagcctgaccaacatggagaaaccctgtctctactaaaaatacaaaattagccaggcatggtggcgcatgcctgtaatcccagctacttgggaggctgaggcaggagaatcgcttgaacccaggaggcggcagttgcggtaagccgagatcgtgccattgcactccagcctgggcaacaagagtgaaactctgtctcaaacaaacaaacaaagatatccaattcagtcatc

SEQ ID NO: 56938 - DNA, 6119 bp, Homo sapiens
  misc_feature (1)...(6119): n = a,t,c or g
ccctaacatccttcagctccagaaccaatgccaaatcacctaactccaggttatatgacaaaaaaaaacatctgtttaggacattctttagtgggatttgtttttctggtcacagtcacaatgacggatttaaaaaaaaaagagtatctcaacttcctattgggagtacatgttttcccctgattttaaactcatgggacaaaaagaaagtgttgactggcatctggcaagataattaaatatctgaaacaccctgaaggaaacaaagagggtactgtggtcaagagtaaggtggacaggataccatagaagatatatccagtgtatataatgataactgctaaaacaccctcaaaactcactagcagaatgtaatcaagtttattttcttgttcaaagtccaatatggatgtttttggtcaagtagctattatgccctaaatagtaactcaggtattcagacttcttctatgctatgactccatcaccgtcaaaacatgtgcttcaaggttaccttgaagaggaaggaggaagagaataatggaaatggctcagccaccctttaactgccttggtctagtattgaaacatcacttccactcattttccactgttgagaactactcacataggcctagatgcatggagctgggaaatgcagtttacctgtgtccagaaagaggacatttgggtgagcatctggccagtttcttccacagaagcaaaggtaatagtggtatgaattcaggaagatgaaaatgagctcactggggaaagagtattcaaggaagatggagcatgtgcaaagactctcagtacaaacagtttggaaagcttgaggaataaaaagcaagtctgtgtggctggagttttgtgaaaggggaggagtgggttaagatgcagatggtgatggtgacggaggcctgggcaagatcacacggggcctgaaaagtttgtcttttgttctcgaggcagtgagaatccattgaaggattttaagcagagaagtgacataagctgatttacattttaaaaagatcacatggctgtgtggaaaattaattgctttagggacacgagtagaagcaattagaccaccagtaaggcagttactgcaggagttgggtatcctaaaacccagatggctggtcagagaattcacctgggaaggaggatgaccaggggatgaaaggttctaattactggtctctgtgaaaagctgtagagagttttgtgcagttacataaatggttgggtttggagctgagcggtgtctctgccaagatcatgttgtttcttttagaactgtgttcccttaggactggactatattatgggaacagaagctggagcacaccaataactgcagaagcagtaactatttatttggagaactctcaaagggatgctgaacaagcatgaggcacggataaccaaacccaattttattcttgtctcttaccaccctccaaattttattcactgggaggtactctccctgctatggagaaaagctgcagcgaggttgtgatgttcttaatagatagtcctgtgatcagtttaaggaacaaacataatctcaattaattagaatgtctaatcctgtgtaacaataatctgcacctgttgcagttttaaatccctttttcctctcccagctctgccccagctaagtctaggagcctgcactgggaaagggaggagtgattggtatgctcttccctctcctcggctcctctctacctaatcactgctgattgctctgggcccaagtgatgaggagaggtaaacagataaatcattttgccctgactgggtatttctatgcactgtgggcctggaagatatttcctctcccctattctcactctcaaatgataaactggcttcctgctcccctgaaaaaaaatcaaagcaatcagaaatgaacttctggggccctatcaggaactctggaagagggctttcataatggagcaacctcttaccactgccatttacctcaaacaggccctccacattactcagcaatccttaccccactgcattctgagttctctctcatctcaatagcactcgacagctaacaacctgcccatcnnnnnnnnnnnnnnnnnnnnnnnnnnnnnnnnnnnnnnnnnnnnnnnnnnnnnnnnnnnnnnnnnnnnnnnnnnnnnnnnnnnnnnnnnnnnnnnnnnnnnnnnnnnnnnnnnnnnnnnnnnnnnnnnnnnnnnnnnnnnnnnnnnnnnnnnnnnnnnnnnnnnnnnnnnnnnnnnnnnnnnnnnnnnnnnnnnnnnnnnnnnnnnnnnnnnnnnnnnnnnnnnnnnnnnnnnnnnnnnnnnnnnnnnnnnnnnnnnnnnnnnnnnnnnnnnnnnnnnnnnnnnnnnnnnnnnnnnnnnnnnnnnnnnnnnnnnnnnnnnnnnnnnnnnnnnnnnnntaactctcctggttttactcctacatctctgggtgaaccttctcctcttccatcaccttcactgcttcattttcctttacccatccatgacatgctcctcagttctattctgagccattttctcttctcattatcttaccctgaatatctcatctattctgactttaattaccacctctaggctgctgattcccagacccccagcacagatttcacgcatgtcccacttcctaaaatccaacactttgaatggcatcaccagcctacccacagttgagcaacctggaacttacttcagattcctctcttaccaacctcaacatcccaccaattctacctaatgaagttctcctgtctgcctacttcttccatcatgactagtcaacagtgccctcatcttgtgccctagtacctgggtttctataacacccctgttctcatctatcccactcaactggaccctgtcattccttatctctccctaggtgaataagtacactggctatatctcaaatgacaagctccgggaatacaaagataaacatggcttgagaaaacaacagccaaatgcacaaaggaatcacaatgcaatatttagaagctgaagtagcactcttcacatagtactttgagagtacagatgaagaactgattttgctttgggagtagaataggaaacaactaggctgttcggaaagatgagcaaactgccagtccgatgaatatccagcagaaagaacagtacgtgtagaggcactgtgtagtgcctgcctaatgattcacagcccagcctccaaacatgccctctggactacagcctgtttcaaaacctccatccccttattagaggcatccaactggctcagggcatagaacctatgatctcccaatgggtactgtcaggtattcctggaaacaagtacaagaggccatatctttatacctgggcacatggcagataccttttgggggaggcctagaatctatcattcaaactcaccttccctcagcaccttgcctatagctttcccaggacatgctgatctgagtccactgcaaggcagagatagtggacagactcttccgccaatgaacagcccaatgcccccaagcccacatggcatcaacaagttgtttatgaacagagacccagctccctcactacccctccaaggacagaagctcagaatctattaaaagtcattaaatagcctatgaagcaggcctgttgaaaggtctagcctctcccagaggcttccttagtcaacaaatccattctttacccctcagcctccaaccagcctagggaagatcttcaaaaaacaataaggcttacaacacataatagtcatagctagtttactgagcacctcctatgttcccagccctggctacagatttctccagttaacccacacaaccaccctgcaagacaaaaattctaccattttccaaatgaggaatgtgatatacagagattaaatgactttaagtgcctctgggtagcaggccaagaattaaatccaggtctacctgattccaaaatctgtgctctcagctatatacatcccaaagtcccacaggacaataggtgttgggagtggcttgatgctatatggttccaaaaatggagatgaggggagaggggaaagataaaccactagaaatgctcggtatggggacaaccaaacagtctcaagttggtggctcagactgatgtcttgagccaagatgttggtggacaaccagttgcctcagagtcaaacagcaacagctgcctgtctgcaaccttgaaggcctgggcaaactgaagctgaaggagcagaagctatgggtgagcagaggaagctgatctgtagacagatcagatgacagcagagtggagatggcaggacaggaaggccatgtggcttcttagttggaaagaagagcaaaacctaaagatgccttgaattccaaaccatctagttttcataacacctgaagtgtcatgagacagatatccccatgttctcacaataaactctttattgtttagctagccccagtgactttatgcatcttataaccaagaagccttcagtagagcaagtctgagccagaggttttatcacactttgtcctcagggtccaccaggaaccaggtcttggctcacagccaggctggaaacagtcttcacagttctgagcctggagtttgagatctgcctcccctttcaaggaagatccagaggtcacctgcgcttgtagagacatggctgaagctgcaggcctgaaagctgagccttgggccctaccagagggggcccagtcttttggaaatcaaacaagaagaaatggctgttggtcaggtccttggagacaatcttgaagcctagcttggtcacagcccgcagaaaggttcgaacatcctcaaagcggctgctgacctcagccactttcaggagaccccctggcttcagtactctatttgcctcctctaggaagtccctgatgttggttcccatcagtgaaaggcaaaacacagccacatccacagactcatcctccagaggaacctgggccatgtcacacacagtgaccctagggtccagagaagccaagtcaaagcaatgcacagggttccggatacttgaagccaagcggcaatccccacagccgaagtcagccaccactagggatgcaggccgctggcgaagatccctggcgatgcggtcccactggctgcagtggccacttcttcacttggctctggaagccgcggtggtagagaagaaaagcctcagggtcttcctggaagagacgctgtgcagcactgctgggccctgagtacaactgttcattgaggtagcgaaatcgggccccatccagccgctgtgccatgcgggctcgcaaagcccctgcccgagcctcatggctgtctgtcctgggaacaggagacacctctgtcttctctgtgggggcctcagctggggcctggtctggcacctgaggtggctgaaacttgttcttacatcttctcttgttcttttgccggttccgccactgcttgcggcttaatgtatgagggggtttaggggaagtggacccagggctttgctttggtggatcatttgtagtactacccttccaggctttgggacctgtttggtcaacattgtccaggtgctgggctgaatttataggggcatgtttctggcatttcctctttcttttctcatcttcagcagagtcactgccaacaagagcctgtttgtggcatttcttcttcctttctacttcttcctcagagtcactgcaaggtgggccctgtttttgacatttcttcttccctttcttccctacttcagcagaggcactggcaaatgatgcctttttggggcatttcttcttcctttcctcctcctcctcctcagagtcacttatacataggctggggggatgctgggaaagagatgctgcctctagggcccgtaatgtggccaagagctggcggcgcttggagcccttgttttgcgaggaggccgcaggcggaggtcgtgagattacgggcccaaggcccgcggctactggggccgcctcggcccactcaggctcttcgaacatgagggtcgggagggcagggtcgccgagtccccgctcttctccacgtgcacagcgctcctctggaagtcggagcgct

SEQ ID NO: 56939 - DNA, 1369 bp, Homo sapiens
ttttttttttttaaagaaacagaataatttttattgctaggttaatttattacaaagataataatagtctgttgaacttagttacagttaaacacactgtaccgattcaaaatcattatactagtttgatagggaggagggatgggggagtgggctggggttccaggaattggaagtatcagggtggaaataggaactttataccaagccccatgaccagctgtgcttcaagtgagttttaaaattaattggtcccttccctgaagagggtctggctcagaagaaacaggaactggtagagctgcaccctgtccacagtgatccactactaaaaatactcatacctaggaggaccttaaacttctgaatgctggttcagtaaggctccactgtaaaatcaaacatcttttgtggtattcatttttttattgcttgatgtctggaacagttaccgaaactagacctgtatcgcgcatctctactagtgcttgggcctcaaagcagtgctcgtcacctaactgcacaaagaaatgctattaggtccaattgtgagataagctgaattataaatacacaattttcagaacgacaggcacttaaagctcattaagtaaaatacaaaaatagattatattaataagaaatatttagtgttcatcaaattgtaaatctaggcttttgccattttttaaaaaggatactggaaactgaaaagagatgacattcatatgaacaatgcatttttcaaacttttgttctgagcgctgaacaatctaagaaattttagcgcaatctaagaaaaaagacttaccacaaagcacctaaaataacattgtagatgggtgggaacgctgtcaaccatttcttagtttccctcccaagtctcagtatcaaggcatcaagattacattccacaaacgattgtcagccttcggaaatcaggtcagtgtgcctgtatgtcagagacgttaaaacccttaggagggtagctctccttcctgtttgctcttcccccacaggcgcaagtgagttatgcttcggattctgcgcctctatgttcatttggatttccatcatcgtcatctggttgatcgtttaacagtacatattttccatcattggttagtggtatggacagcattaattgagccagtgcttctggatccttctgaacctcaataatttcttttcccaaattaatagcataacatatcttttcgccttctgagttgctttcaaaaatgtatgtactcagagattcttctccagtggattcaggaacacggatgacaaaaccaaccagtctcttgttttcttgatgagcagcaaattgtgtgacactggtaagttcaaaattggcccttgatac

SEQ ID NO: 56940 - DNA, 3030 bp, Homo sapiens
cggctggattagggctgaatctgtgggaaccagaccacccctgagacaggaggcagccctgatgcctctccagggcctgggcctgcagcggaaccccttcctccaagggaagcggggcccggggctcacgtcttccccgcccctcctgcctccttccctgcaggtgaacttccacagcccccggagtggccagaggtgctgggctgcacggacccaggtggagaagcggctggtggtgttggtggtacttctggcggcaggactggtggcctgcttggcagcactgggcatccagtaccagacaagatccccctctgtgtgcctgagcgaagcttgtgtctcagtgaccagctccatcttgagctccatggaccccacagtggacccctgccatgacttcttcagctacgcctgtgggggctggatcaaggccaacccagtccctgatggccactcacgctgggggaccttcagcaacctctgggaacacaaccaagcaatcatcaagcacctcctcgaaaactccacggccagcgtgagcgaggcagagagaaaggcgcaagtatactaccgtgcgtgcatgaacgagaccaggatcgaggagctcagggccaaacctctaatggagttgattgagaggctcgggggctggaacatcacaggtccctgggccaaggacaacttccaggacaccctgcaggtggtcaccgcccactaccgcacctcacccttcttctctgtctatgtcagtgccgattccaagaactccaacagcaacgtgatccaggtggaccagtctggcctgggcttgccctcgagagactattacctgaacaaaactgaaaacgagaaggtgctgaccggatatctgaactacatggtccagctggggaagctgctgggcggcggggacgaggaggccatccggccccagatgcagcagatcttggactttgagacggcactggccaacatcaccatcccacaggagaagcgccgtgatgaggagctcatctaccacaaagtgacggcagccgagctgcagaccttggcacccgccatcaactggttgccttttctcaacaccatcttctaccccgtggagatcaatgaatccgagcctattgtggtctatgacaaggaataccttgagcagatctccactctcatcaacaccaccgacagatgcctgctcaacaactacatgatctggaacctggtgcggaaaacaagctccttccttgaccagcgctttcaggacgccgatgagaagttcatggaagtcatgtacgggaccaagaagacctgtcttcctcgctggaagttttgcgtgagtgacacagaaaacaacctggggctttgcgttgggccccatgtttgtcaaagcaaccttcgccgaggacaggcaagagcatagccaccgagatcatcctggagattaagaaggcatttgaggaaagcctgagcaccctgaagtggatggatgaggaaacccgaaaatcagccaaggaaaaggccgatgccatctacaacatgataggataccccaacttcatcatggatcccaaggagctggacaaagtgtttaatgactacactgcagttccagacctctactttgaaaatgccatgcggtttttcaacttctcatggagggtcactgccgatcagctcaggaaagcccccaacagagatcagtggagcatgaccccgcccatggtgaacgcctactactcgcccaccaagaatgagattgtgtttccggccgggatcctgcaggcaccattctacacacgctcctcacccaaggccttaaactttggtggcataggtgtcgtcgtgggccatgagctgactcatgcttttgatgatcaaggacgggagtatgacaaggacgggaacctccggccatggtggaagaactcatccgtggaggccttcaagcgtcagaccgagtgcatggtagagcagtacagcaactacagcgtgaacggggagccggtgaacgggcggcacaccctgggggagaacatcgccgacaacgggggtctcaaggcggcctatcgggcttaccagaactgggtgaagaagaacggggctgagcactcgctccccaccctgggcctcaccaataaccagctcttcttcctgggctttgcacaggtctggtgctccgtccgcacacctgagagctcccacgaaggcctcatcaccgatccccacagcccctctcgcttccgggtcatcggctccctctccaattccaaggagttctcagaacacttccgctgcccacctggctcacccatgaacccgcctcacaagtgcgaagtctggtaaggacgaagcggagagagccaagacggaggaggggaaggggctgaggacgagacccccatccagcctccagggcattgctcagcccgcttggccacccggggccctgcttcctcacactggcgggttttcagccggaaccgagcccatggtgttggctctcaacgtgacccgcagtctgatcccctgtgaagagccggacatcccaggcacacgtgtgcgccaccttcagcaggcattcgggtgctgggctggtggctcatcaggcctgggccccacactgacaagcgccagatacgccacaaataccactgtgtcaaatgctttcaagatatatttttggggaaactattttttaaacactgtggaatacactggaaatcttcagggaaaaacacatttaaacacttttttttttaaggaaagaattggtatatttattatgttctgtttttctaaataaccctgtggacaagggaagcccctgccactgccactacccgctccagagctttaaggaaaatgaagtgagacccctccccttaggcctggggagccatagggctggcttctctgtgggtgcgtggacgtggggttgggagctgggagtctattttttgtattatgttttgagctactgtagttttggcgtggcactattgtaatggaaataaaatacttgtacggagaaaa

SEQ ID NO: 56941 - DNA, 1780 bp, Homo sapiens
tttttttttttttttttaatatcataactttattcaggagataatcaaatacaatacagggctgacactgacacacagctatgcataaaaattatataaatctccttgctagattttccagaagaggcccagtcataaaaaataaagagaaaccaggagagtgcctaaatgactgcagtgtttcaagcgtaacgatttccacactcccttgtactgaaggcagccccaggtgaaggtggtcccactagcaggaagattaggaggcagcagctatgcagaagccatgtctcctggccctgccagagctcaacggtagaccttgctgaactcctggagggcccaccgcttgttctctgttgcctgcttgagtacggtgtactctttcaccagcctgtcaaactcctccccaaggacctcataggagttcaggacctgtcttgagttctccatgtcctgctcctgtaggtgaatggctccctccaaacggtccctaatcagacgatgaacttccactttctcaacagtgtaagtgtcggacaaaatctttagctcctccatcctcagcttaaggatcatagcaccgcacttgacttccaggtactgggcattgatgcggtctagctcggattgagtcttcagccggtgttcttgaagaagcctctgcaggcaaagtgaggcagcggagaagcacctgggagtaagcagcactcttcttctccagcagcaacatctgctccttctgctggctcttggcatcctggcactgctgctgctcacccaccaggacctctgcgagtttccacacctttgctgccttcacggtttcactgtcagcatctgagcaaaggggcagaggactgaattgggatcatagtagcagagcagagtgaaacatttctttttgagctgctcctctacttcttgctgtagccgagccctcatccacacaaaatcctctgagagtggcatgagttccagaaggtccgctttctccagccccagcagtggaggtatctccctctcctggctaggacctaagagccgcatcagttcagttacaagcagccgctgttcaagggtctcatgaaactttttgtcctcagaagttacatttgtgtcttgtatcttcacatagtagtccacaagcaactcttgaatgactctgtgtaaaatctcagacctcaaccatgttgtcttatgcagtcgaacttccttccatgcctgagcctgctcctttgctagggtgaggcttaagccactctcatccacatgctgtgagagattcaggagaagcttgctgaagtatgggttctgtaacaggtcctctttactcaggttacaaggaggaagttgtttgctgcacacttgttgaagtatttccatcccttctccaggtgagcagaaatccccggatgccatttgattttcttgggattctaatctgtggaacagggcccgagatgaatcaaaatgcagaacgggctctccggcgcctactttcccttctgtctggacggtccaaggattcccaagagcgacgacggtctccggccactggccggaatgactctcccagagctcctcttccccgaagctccgcccgccgaccctctaaagcaaacctgcacaccctggggcagctgaagctctcaaggcggtgccgagaacctcggctggggagggctggccagcagcgtctacaccccagaacccgcccgcgccggggctccggaacctctcgttcgggccgggcgcaggggctgggggaagcgaggcccgg

SEQ ID NO: 56942 - DNA, 2007 bp, Homo sapiens
tttttttttttgaggatgacttaataatgtaatttatttgaaatacttccagaaaagtttaaggccattatacaaaaacattcatttcatcaaaacattcattgaccaccttcccataggccaacacttgacaaacctcttttcccaacacactggctgatggcttctaaaagtggctgatggcgcctacaaagaatcattcattcttttcttcaccaataaaggctgttcttggctttcctctgcttctgtctgcagcaggttcacttgctgtatcaataacgacttgagaaagcagttttaaataaacttgtaatagaaaaaattcatcatgtttaagacctataaatacagaaatatgttttacagggtaaaattgatcacaatatccttgttttcaaaaaataataaagtatataccttgtttttatattgatatatcttgtcacacagcttgaatgcacatgatatatgtacataataaaatgacatcaatgcatttactgctttcttttctgtaaacttgaaagacagattaaaaaaaactttttggcaataatttagaataattaccactagtgctggtgtgggtataattttgcacaggtcctccttaatatttacactagcagggagctcttgtaggtacttagctgttgtaaggtctgcactttaccctgcactgtaaatcaaggctggacaaagaggttactaatctggctagctgattctaattaatcagagttaatgaaattggcctctggagaacataattacaattctgattatagcacagaaccagagatggcaaattgacgacccaaaagcagagcaggaaagcccaaagctctggcctttctcagaaggcactggaccatgcttttctctcaatggctcccacagaaggttctgacgaagtgcttttcattccaaattcttcctctcctgtgtttctataaacagtgtcatcgatagagtcatggtctctcttccttgttgcttcattcattctctaaaataatgagtaggcctaggcagatgaaacacaatgaatacagggccttcttgttatcctggcagggccttcctaagccctttgggttctattctgatgttttaggctagcaaccaactatgagagacacctcctggtgccatgtgcatttcagttaaagattcagagctggcagccgcttctgtcctggcccttttaaggtcagcctctattttatgtcctaatacattcttgcatcaaacttgcactggatgaagttgcaaagttcagacaatgcatcctcctttgcaaaattaagccttcagaatccccagggatgttttcaagctttctagttgagtaagatcaaaccaagttcacttcatgagttggtctttcctgattctctctctaataccatcccaatacacagatgagttcctcatgccctatttacaaggccgtctaaattccgtgcctttagctaccacatctaagagctgggaaagtggtacagaagcacaagaggaaggactcttcaaacaatctatgtaaaacagtagttttgagattctttttctatttttttaaaatccagcaggacaactgaaagtaacttgtttgagtacctctccatccatccagacacttgggaaatacaacacagggtaatagttgccacagattccagcttacacagacagattggcagttacagtactagggacaaaggtacagatacgagagactgggccaacatgtatactttcacaaaagtatgaaaaagtgcttctccaaaccgttccatctgtggaatgcaaatactgtacaggtaagatgcaggcctgcttcccgaagtgcacatgcttctgtcagacgttactttcaccgtgcctgcctgtttccacaggaagagtctgtctgttccatgcgctcacagtcgaggctgacctcactcgtgtccatactacagtctgactcactgtccgattggtccatctgctcaagttttg

SEQ ID NO: 56943 - DNA, 1270 bp, Homo sapiens
gaaacagagcagagaaagttggcgatgctgtcggggattctgctgggcaatggcaccctgcccgccaccatcctcaccagtctcttcaccgacagcttagtcaaagaaggcattgcggcctcatttgctgtcaagcttttcaaagcatggatggcagaaaaagatgccaactctgttacctcgtctttgagaaaagccaacttagacaagaggctgcttgaactctttccagttaacagacagagtgtggatcattttgctaaatacttcactgacgcaggtcttaaggagctttccgacttcctccgagtccagcagtccctggggcaccaggaaggaactgcagaaggagctccaggagcgtctttctcaggaatgcccgatcaaggaggtggtgctttatgtcaaagaagaaatgaagaggaatgatcttccagaaacagcagtgattggtcttctgtggacatgtataatgaacgctgttgagtggaacaagaaggaagaacttgttgcagagcaggctctgaagcacctgaagcaatatgctcccctgctggccgtgttcagctcccaaggccagtcagagctgatcctcctccagaaggttcaggaatactgctacgacaacatccatttcatgaaagcctttcagaagattgtggttctcttttataaagctgatgttctgagcgaagaagcaatactgaaatggtataaggaagcacatgttgctaaaggcaaaagtgtttttcttgaccagatgaagaaatttgttgagtggttacaaaatgcagaagaagaatccgaatcggaaggtgaggaaaattaaatggctcaacaagcacaatacctaggttaccacacaccactttttgattgggaatgctgaaccatttgagaagagaaacttggcttctgttttcgcaaaggaaaaaaaaaataggataggcttcccttgtgcagagggagaaatggttttgtttttgttttgtttttaaatggagccctgaggcatcagctattatacttgggactctacctctcactcactatatgctaacttaaagccattcaacaaggagtcaagtagatctgaaattaaatactcaacagactcctccttttttagctgtatttttcaggtactgtgtggtgaccgccccactggtgtctattacaggccactttggtagttgtgtatctgctcatgtatgtgatttgacaaaccagttttttaaaataaatggctttttaaaaatctggaaaaaaa

SEQ ID NO: 56944 - DNA, 2074 bp, Homo sapiens
cggccaccaagatgtcgtgagagatctgagcttcacacccagtggcagtttgattttggtctccgcgtcacgggataagactcttcgcatctgggacctgaataaacacggtaaacagattcaagtgttatcgggccacctgcagtgggtttactgctgttccatctccccagactgcagcatgctgtgctctgcagctggagagaagtcggtctttctatggagcatgaggtcctacacgttaattcggaagctagagggccatcaaagcagtgttgtctcttgtgacttctcccccgactctgccctgcttgtcacggcttcttaccgataccaatgtgattatgtggggacccctacaccggcgaaaggctgaggtcactccaccacacccaggttgaccccgccatggatgacagtgacgtccacattagctcactgagatctgtgtgcttctctccagaaggcttgtaccttgccacggtggcagatgacagactcctcaggatctgggccctggaactgaaaactcccattgcatttgctcctatgaccaatgggctttgctgcacattttttccacatggtggagtcattgccacagggacaagagatggccacgtccagttctggacagctcctagggtcctgtcctcactgaagcacttatgccggaaagcccttcgaagtttcctaacaacttaccaagtcctagcactgccaatccccaagaaaatgaaagagttcctcacatacaggactttttaagcaacaccacatcttgtgcttctttgtagcagggtaaatcgtcctgtcaaagggagttgctggaataatgggccaaacatctggtcttgcattgaaatagcatttctttgggattgtgaatagaatgtagcaaaaccagattccagtgtactagtcatggatctttctctccctggcatgtgaaagtcagtcttagaggaagagattccacttgcacggcaacagagccttacgttaaattttcagtccagttatgaacagcaagtgttgaactctttctgcttgttttgattcaaagtgcagttactgatgttgttttgattatgcaactaagtaggcctccagagcctctctagtggcagagcagctcacactccctccgctgggaacgatggcttctgcctagtacctatccttgtgtttctgatgcagtggtagcattggttcaagttctctcctgctgtggtcagagttgcttcgatgttggccaagtgcttttcttcttgggctcccttctgacctgcaggacagttttcctggagccatttgggtatgaggtattaatttagcttaactaaattacaggggactcagaggccgtgctcctgaccgatccagacactattactggcttttttttttttttttttaacaatggtgtgcatgtgcaggaaatgacaaatttgtatgtcagattatacaaggatgtattcttaaaccgcatgactattcagatggctactgagttatcagtggccatttattagcatcatatttatttgtattttctcaacagatgttaaggtacaactgtgtttttctcgattatctaaaaaccatagtacttaaattgaacagttgcaaagatgtcttaattgtgtaaagaattggtgtagtcatgactttagctgatactcttatgtacgagatctgtctctgctgtttaacttcattggattaatcagctggtttcaactctactgcgaaacaaaaatagctccttaaaagtactgttctccttcagtggcatgtagttatctaatcaagacacctcattcaaacaaaacctgccttaggaaaatttaatatattttaaattattttaaaagaaatacaacatcttattctttagctttcttaatcggtgctttatggaggccagtgtaacgttacatgactcgttgagaaagttgaggaatttcctctaccacctttgttgcttgaagaaaaacatgtcttttcaaaatgagaggctttcattgaagaaaagaaaaaaacaacagttaaaagctaaaaaaaaaaaaaa

SEQ ID NO: 56945 - DNA, 1796 bp, Homo sapiens
  misc_feature (1)...(1796): n = a,t,c or g
attaccaatttaatacgactcactatagggaatttggccctcgaggccaagaattcggcacgaggtcactgggagagagctggatgcggccccgttccgagtggccgcgggagccacaggtgcccctctacgtgcccaagttccacagcggctgggagcctcctgtggatgtgctgcaggaggccccctgggaggtggaggggctggcgtctgcccccatcgaggaggtgagtccagtgagccgacagtccataagaaactcccagaagcacagccccacttcagagcccacccccccgggggatgccctaccaccagtcagctccccacatactcacaggggctaccagccaacaccagccatggccaagtacgtcaagatcctgtatgacttcacagcccgaaatgccaacgagctatcggtgctcaaggatgaggtcctagaggtgctggaggacggccggcagtggtggaagctgcgcagccgcagcggccaggcggggtacgtgccctgcaacatcctaggcgaggcgcgaccggagacnctggcnccccgttcgagcaggccggtcagaagtactggggccccgccagcccgacccacaagctacccccaagcttcccggggaacaaagacgagctcatgcagcacatggacgaggtcaacgacgagctcatccggaaaatcagcaacatcagggcgcagccacagaggcacttccgcgtggagcgcagccagcccgtgagccagccgctcacctacgagtcgggtccggacgaggtccgcgcctggctggaagccaaggccttcagcccgcggatcgtggagaacctgggcatcctgaccgggccgcagctcttctccctcaacaaggaggagctgaagaaagtgtgcggcgaggagggcgtccgcgtgtacagccagctcaccatgcagaaggccttcctggagaagcagcaaagtgggtcggagctggaagaactcatgaacaagtttcattccatgaatcagaggaggggggaggacagctaggcccagctgccttgggctggggcctgcggaggggaagcccacccacaatgcatggagtattatttttatatgtgtatgtattttgtatcaaggacacggagggggtgtggtgctggctagaggtccctgcccctgtctggaggcacaacgcccatccttaggccaaacagtacccaaggcctcagcccacaccaagactaatctcagccaaacctgctgcttggtggtgccagccccttggtggtgccagccccttgtccaccttctcttgaggccacagaactccctggggctggggcctctttctctggcctcccctgtgcacctggggggtcctggcccctgcgatgctcccccatccccacccacttctacatccatccacaccccagggtgagctggagctccaggctggccagggttgaacctcgcacacacgcagagttctgctccctgaggggggcccgggaggggctccagcaggaggccgtgggtgccattcgggggaaagtgggggaacgacacacacttcacctgcaagggccgacaacgcaggggacaccgtgccggcttcagacactcccagcgcccactcttacaggcccaggactggagctttctctggccaagtttcaggccaatgatccccgcatggtgttgggggtgctggtgtgtcttggtgcctggacttgagtctcaccctacagatgagaggtggctgaggcaccagggctaagcaattaaaccagttaagtctcccagg

SEQ ID NO: 56946 - DNA, 1456 bp, Homo sapiens
ttttttttttttttattcattttgcccaaatctgagttttatttttgctggaatcaggtcatctggcctggctgtcccaccaacccagctgggagcctctgagtggcctgccagcagcatctcattacaaaacagccccctggaaccaggtagccaaggaagcggcccacctgaaaggcatttagattgagaagaaaaactgcaccttcctgacaaaggtcaggggttcacggtgaagggagggctgctgggatcacagggacagcagcatcttctagcagcttggccataccagccacttgaggtcctaactgcagccaaggggccgttctgcacatgtcgctcaccctctgtgctctgttccccacagagcaaacgcacatggcaacgttggtccgctcagccactggttctgtggtggaacggtggatgtctgcactgtgacatcagctgagtaagtaacaacgactgaggatgccgctgacccagggctggggaaggggactcccagctcagacaggcttggctgtggtttgctttgggaggagagtgaacatcacagggaatggctcatgtcagccccaggagggtgggctggcccactggtccccgggctccttctggccctgcaggcgatagagagcctcaacctgctgccgcttctccttggcccgggtgatggccgtctggaagagcctgcagtagaggtgcacagccagcggagagtccgtcattgccgggtacagggtaggtgatgaggcaggggttgcagttggtgtccacgatgcccactgtggggatgttcatcttggctgcgtctcctcacggccacgtgtggctcaaagatgttgttgagcgtgtgcaggaagatgatgaggtccggcaggcggaccgtggggccaaagaggaggcgcgcgttggtcagcatgccgcccctgaagtagcgagtgtgggcgtactcgcccacagtcacgggcccatgttctcaatcaggtacgagaactgccggttgcggcttataaacaagatgatgcccttgcggtaggccatgtgggcggtgaagttcaaggccagctggaggtgcgtggctgtctgttcccaggtcgatgatgtcgtggtccaggcggctcccaaagatgtacggctccataaacctgtgccgacagccagctttgtgtcccagatggactcgggcatcgaagaggcttctcacggaaaacagttccttgacattgaagaagtcagagtgcttgaggggctcattcaaaatcttgtcgttgaaatcggtgctgtcctccgactcgcggatcataagggccgtcgcgcttccaagcgtcctgcggctggccgagcaggccggggggtcgccttcccgagaaagcccaaccagcgcgacggggcccgggcacccgcgccgagtattcggggcagcgcggccgaggatgtcgccatggcc

SEQ ID NO: 56947 - DNA, 1510 bp, Homo sapiens
tccgtctgtgtgttcgagtggacaaaatggcgaagatcgccaagactcacgaagatattgaagcacagattcgagaaattcaaggcaagaaggcagctcttgatgaagctcaaggagtgggcctcgattctacaggttattatgaccaggaaatttatggtggaagtgacagcagatttgctggatacgtgacatcaattgctgcaactgaacttgaagatgatgacgatgactattcatcatctacgagtttgcttggtcagaagaagccaggatatcatgcccctgtggcattgcttaatgatataccacagtcaacagaacagtatgatccatttgctgagcacagacctccaaagattgcagaccgggaagatgaatacaaaaagcataggcggaccatgataatttccccagagcgtcttgatccttttgcagatggagggaagacccctgatcctaaaatgaatgctaggacttacatggatgtaatgcgagaacaacacttgactaaagaagaacgagaaattaggcaacagctagcagaaaaagctaaagctggagaactaaaagtcgtcaatggagcagcagcgtcccagcctccatcaaaacgaaaacggcgttgggatcaaacagctgatcagactcctggtgccactcccaaaaaactatcaagttgggatcaggcagagacccctgggcatactccttccttaagatgggatgagacaccaggtcgtgcaaagggaagcgagactcctggagcaaccccaggctcaaaaatatgggatcctacacctagccacacaccagcgggagctgctactcctggacgaggtgatacaccagggccatgcgacaccaggccatggaggcgcaacttccagtgctcgtaaaaacagatgggatgaaacccccaaaacagagagagatactcctgggcatggaagtggatgggctgagactcctcgaacagatcgaggtggagattctattggtgaaacaccgactcctggagccagtaaaagaaaatcacggtgggatgaaacaccagctagtcagatgggtggaagcactccagttctgacccctggaaagacaccaattggcacaccagccatgaacatggctacccctactccaggtcacataatgagtatgactcctgaacagcttcaggcttggcggtgggaaagagaaattgatgagagaaatcgcccactttctgatgaggaattagatgctatgttcccagaaggatataaggtacttcctcctccagctggttatgttcctattcgaactccagctcgaaagctgacagctactccaacacctttgggtggtatgactggtttccacatgcaaactgaagatcgaactatgaaaagtgttaatgaccagccatctggaaatcttccatttttaaaacctgatgatattcaatactttgataaactattggttgatgttgatgaatcaacacttagtccagaagagcaaaaaaaaa

SEQ ID NO: 56948 - DNA, 427 bp, Homo sapiens
tgagtttggtccgcttttcctttctgctcctcaggggagcattgcttccttctctcgcagtgaccatgacgaaattagcgcagtggctttggggactagcgatcctgggctccacctgggtggccctgaccacgggagccttgggcctggagctgcccttgtcctgccaggaagtcctgtggccactgcccgcctacttgctggtgtccgccggctgctatgccctgggcactgtgggctatcgtgtggccacttttcatgactgcgaggacgccgcacgcgagctgcagagccagatacaggaggcccgagccgacttagcccgcagggggctgcgcttctgacagcctaaccccattcctgtgcggacagcccttcctcccatttcccattaaagagccagtttattttctaaaaaaaaaaaaaa

SEQ ID NO: 56949 - DNA, 303 bp, Homo sapiens; identical to SEQ ID NO: 22425

SEQ ID NO: 56950 - DNA, 1040 bp, Homo sapiens
gaccgccagtcgcaggtgtgctgctgaggcgtgagaatggcgtcccgcggccggcgtccggagcatggcggacccccagagctgttttatgacgagacagaagcccggaaatacgttcgcaactcacggatgattgatatccagaccaggatggctgggcgagcattggagcttctttatctgccagagaataagccctgttacctgctggatattggctgtggcactgggctgagtggaagttatctgtcagatgaagggcactattgggtgggcctggatatcagccctgccatgctggatgaggctgtggaccgagagatagagggagacctgcttgctggggggatatgggccaggggcatcccatttcaagccagggcacattttgatggtttgcattcagcattttctgctgtgcagttgggctcctgtaatgctaacaagaagtctgaaaacccctgccaaagcgcctgtactgcttttttgcttctcttttttctgttctcgtccggggatcccgagctgtcctgcagctgtaccctgagaactcagagcagttggagctgatcacaacccaggccacaaaggcaggcttctccggtggcatggtggtagactaccctaacagtgccaaagcaaagaaattctacctctgcttgttttctgggccttcgacctttataccagaggggctgagtgaaaatcaggatgaagttgaacccagggagtctgtgttcaccaatgagaggttcccattaaggatgtcgaggcggggaatggtgaggaagagtcgggcatgggtgctggagaagaaggagcggcacaggcgccagggcagggaagtcagacctgacacccagtacaccggccgcaagcgcaagccccgcttctaagtcaccacgcggttctggaaaggcacttgcctctgcacttttctatattgttcagctgacaaagtagtattttagaaaagttctaaagttataaaaatgttttctgcagtaaaaaaaaagttctctggaaaaaaaaaaaaaaaa

SEQ ID NO: 56951 - DNA, 3787 bp, Homo sapiens
agcagcaggtaggtgccatcagggacaagaacagcacctcccagggtgggagaccccaggcctttctggcagcaggtctggatggaaagtggacaggaggctcacccgtctgcatcccctgctcctgcccctgctcggctacaaaaaccaaagggacagcagctgaccacaccccggtagccactcctgcataaagctctcccctcctgtgaccagctgaggacctcaggctgcagcggagccatgcccagatacacggtgcacgtacgtggggaatggctggcagtgccctgccaggacgcgcagctcactgtgggctggctgggccgggaggccgtgaggcgctatatcaagaataagcccgacaatggtggcttcacctccgtggatgacgcgcacttccttgtgcgccggtgcaagggcctgggcctgctggacaacgaggaccggctcgaggtggccctagagaacaacgagttcgtggaagtggttatagagggtgatgccatgtctcctgacttcattccatctcaaccagaaggagtttatctatacagcaagtaccgggagcctgaaaagtacatcgagttagatggagaccgtctgaccacggaggatctggtcaacttgggaaagggacgctacaaaataaagctcaccccaacagctgagaagagggtgcagaaatccagggaggtcatagatagcatcataaaagagaaaacagttgtttacggtattactacaggttttgggaaatttgccagaactgtaattcctatcaataagctacaggagcttcaggtcaacttagtacgctcacattcttcaggtgttgggaaaccactaagtcctgagaggtgtcggatgctcttggctttaaggatcaatgtcttagccaaaggatacagtggcatttccctggagaccctcaaacaagtcatagaaatgtttaatgcctcctgcctgccctatgtcccagagaaaggaaccgttggtgccagtggagaccttgccccactctctcatcttgctcttgggctagttggagaagggaagatgtggtctccgaagagtggctgggctgatgctaaatacgtgctagaagcccatggattgaaaccagttattttaaaaccaaaagagggcctggcactcatcaatgggacgcagatgatcacatccctgggctgtgaagctgtagagcgagccagtgctattgcacggcaggctgacattgtggcagccctgacccttgaggtgctgaagggcaccaccaaagcctttgacactgacattcatgctcttcgacctcaccgtgggcaaattgaagttgcttttcggtttcggtcactcttggactcagatcaccacccatcagaaatagcagagagtcacaggttctgtgatcgcgtccaggatgcatacaccttgcgctgctgtccacaggtccatggtgtggtgaatgatacaatagcatttgtgaagaacatcattaccacagaactgaacagcgcaacagataatcctatggtctttgccaataggggagagacagtttctggaggaaacttccatggtgaatacccagccaaagccctagactacttggccattggcatccatgaacttgctgcaatcagtgagagaagaatcgagcggctctgcaatccctccctcagtgagctgcctgccttcctggtggctgaaggtggtctgaactctgggttcatgatagctcactgcacggcagcagcccttgtttctgagaacaaggctctgtgccatccctcgtctgttgactccctctccaccagcgcagccacggaggaccacgtctccatgggaggatgggcagcaaggaaagccctcagggtcatcgagcatgtggagcaagtgctggccatcgagctccttgcagcctgccagggcatagagtttctacgtcccctgaaaacaaccactccgctggagaaggtctatgacctggtgcgctctgttgtaaggccctggataaaagatcgcttcatggccccggacatcgaggcagcccacaggctgctcctggagcagaaggtttgggaagtagctgctccatacattgaaaaatacagaatggagcatattccagaatcaagacctctttctccaacagccttttcactgcaatttctgcacaagaaatccaccaaaatcccggagtctgaggacctttaatgggctttgtcatgaagtagcagatgagagggcagtcagtttagcacaaagcaatactaggctgaaggagagacctgagaactttcctaggtagatcaatccattgtatcattcagttcttctaaagcctacgttggttaggctgatggcagtattatagttgctaaattcagcactgtgttcctgttgtcgtggttcaagacccaccaggtattttcagattataaaacttttctttctttcttaacagtttcaacaggccactcactcttaagggtgagaagaataaccacaattgtatgtgcctgttttttactcttagcattagatgaattcaaatttggaaacagattgatagcaattttttctaaaaacattagacttttgttaacctttttttttttttttaaatttgcttcaacaagctctccaccagttgactttctttggctaattttactttgcatgatatgccttaatatgccttcataaataaccattttaagtcataatttgtccttaagctgcttttttcttctattaattggatcatagtaaagagtagtcaatagggtcttcagctattaattgtagaggtgattaaaaccaacaaggagtttcatgtgcaaaggagataaggaatgaatataaagattgctatttgggtggctcttattaaactgtgtattttgtacttatcactacacgtatcccccaaatgcttacatgggagtttgaggttagtattttcacttccttggtgttagtactctattcacattcttattgtaaccttcctcatttcacagataaggaatctttggggattaaccaacctcctttctgtaatggtaatcattaaaataagtcctattgataaaggtcagatggagccctagagtgtattactgcatctatttttttccccgagaagataaaggaccttcagggatggcttaagtgtatctgtccagatgaaggatgggtcacatgacctcttggcttcccaagtctaagctctgtgactttgcaccagtgtgtgcatatatgtgcaaggcccttcaagtggtctgaaaccgtggctctaaaaaccacagctggtggagaggaggacagacacacttgccaccttgcctacctaattgccatctaaaatgggccgaacagtggatttcacaatagagttttcaccctttagatttacaacctgtcaggtggaaactgaagtgaaaactgctgcccacagcaattcagggagcaaaaaatgtgctgaggagactgtttacctaaaggttgttcttggtgctattctttgtcaaaatgtgaacacacacaaatgaggtttgtgcattgtcatccgtgggctgccattgagccagtaacccccagtggtctcatggtgctcttcgctccagtttggggaatgctggattctttcagcccctgcagccctccaggtcaaaatgacactttgtcactgagttttctacacagctctattagtaactgacagcacacgccttcaagggaacttcaagggaaacatggaataaactaagtctcaattgca

SEQ ID NO: 56952 - DNA, 1941 bp, Homo sapiens
gccctttccatgtctatccccagcctgggatgcagcgattccgaactgaggcggcaatgcggctcctcagaggtcccagtcacctctgcggggcatgccagaaaccactcagccagataaacagtgtggacaggtggcagcggcggcggcagcccagcccccagcctcccacggacctgagcggtcccagtctccagctgcctctgactgctcatcctcatcctcctcggccagcctgccttcctccggcaggagcagcctgggcagtcaccagctcccgcgggggtacatctccattccggtgatacacgagcagaacgttacccggccagcagcccagccctccttccaccaagcccagaagacgcactacccagcgcagcaaggggagtaccagacccaccagcctgtgtaccacaagatccagggggatgactgggagccccggcccctgcgggcgggcatccccgttcaggtcatctgtccagggtgcatcgagccgggagggctcaccagccaggagcagcacgccactccactccccctcgcccatccgtgtgcacaccgtggtcgacaggcctcagcagcccatgacccatcgagaaactgcacctgtttcccagcctgaaaacaaaccagaaagtaagccaggcccagttggaccagaactccctcctggacacatcccaattcaagtgatccgcaaagaggtggattctaaacctgtttcccagaagcccccacctccctctgagaaggtagaggtgaaagttccccctgctccagttccttgtcctcctcccagccctggcccttctgctgtcccctcttcccccaagagtgtggctacagaagagagggcagcccccagcactgcccctgcagaagctacacctccaaaaccaggagaagccgaggctcccccaaaacatccaggagtgctgaaagtggaagccatcctggagaaggtgcaggggctggagcaggctgtagacaactttgaaggcaagaagactgacaaaaagtacctgatgatcgaagagtatttgaccaaagagttgctgggccctggattcagtgggaccccgaggaacgagccgatgtgcgtcaggccaggagagacggtgtcaggaaggttcagaccatcttggaaaaacttgaacagaaagccattgatgtcccaggtcaagtccaggtctatgaactccagcccagcaaccttgaagcagatcagccactgcaggcaatcatggagatgggtgccgtggcagcagacaagggcaagaaaaatgctggaaatgcagaagatccccacacagaaacccagcagccagaagccacagcagcagcgacttcaaaccccagcagcatgacagacacccctggtaacccagcagcaccgtagcctctgccctgtaaaaatcagactcggaaccgatgtgtgctttagggaattttaagttgcatgcatttcagagactttaagtcagttggtttttattagctgcttggtatgcagtaacttgggtggaggcaaaacactaataaaagggctaaaaaggaaaatgatgcttttcttctatattcttactctgtacaaataaagaagttgcttgttgtttcagaagtttaaccccgttgcttgttgttctgcagccctgtctacttgggcacccccaccacctgttagctgtggttgtgcactgtcttttgtagctctggactggaggggtagatggggagtcaattacccatcacataaatatgaaacatttatcagaaatgttgccattttaatgagatgattttcttcatctcataattaaaatacctgactttagagagagtaaaatgtgccaggagccataggaatatctgtatgttggatgactttaatgctacattttaaaaaaagaaaataaagtaataatataactcaga

SEQ ID NO: 56953 - DNA, 1287 bp, Homo sapiens
tttttttttactgtttgagatgtttatttctagtttttagtgttaaaccccagctccatatttattccttaagtgtttcccctcaccctgggaagaagcttgttgtcgtttttgattgtcctctgccagcagatctgcacgagatgtgtttcttcagtctttcccacttgtgagacaaatctccattaaagtctcaacaaatgcaactgtcccttgtagagtaagcaagcctaagagtgctgcttctctgccctggccctggctggtcagagtactaggagttcttggatttccgctcttttctggccctggaggccatgaggctgaagaagagcccaggagccagagttcgaagataaacagccaaggaaggcagtaagtcagccaggatcacatctttcttcttcttccccacagcagcaagaacatcctgggccacctccacagggcttcggccctgggctgtggtggtgtccataactccatacctagatccatccgcggtgatggcatttacagagaggttggtgtggatgtagccggggctgatgacggtcacctcaatttcatactgttcccatctcggcacgcagacagtcaaagaaagcctgggttgcgtgcttggaggctggcatatgcctgatcgaaaaggaatgctcatcttgccctggatgctgctgatggcgacaatgtggccttgcctcctcttgatcatggagggcaggagtgctttcgttagagcaactgggccaaagtagtttgtctccatgaccctcttgtccacatccactgtggtgtccatgatggtaccacggtagctgatcccagcattgttgacaagtatgtcgacatagccaaagcactgcaggatctcagctgctgctgcaactatggccccagagtctgtgaggtcgaaggtcaccaagtaaggcttgtgtgtctgcaccttggtggcatgagaagcggtgagttctctgatgagctcttctagggccccaccattccggccacagagcaccagtttagcacccgcagcatagaagacttttgcacattctttgcccagccctgaggtggcgcctgtgatcaccaccacagcattccgcaggtaggccttcccgcgcacccactgcagcagccggaagaggccgaagaacgcccaggcagccgaacagcaggggacaggatggctgtggcaggtgatgaagtccatggccttcaccttcggcagactcttcctggtagccggagagacagtagtcaatcaacttcatcctcccgctctgg

SEQ ID NO: 56954 - DNA, 2714 bp, Homo sapiens
gaagaattcagtaaagtcacagagggtttggtggacgttattctctatcatcaacccgatgacaaaaagaagaatcgggggttctgcttccttgaatatgaggatcacaagtcagcagcacaagccagacgccggctgatgagtggaaaagtaaaagtgtggggaaatgtagttacagttgaatgggctgaccctgtggaagaaccagatccagaagtcatggctaaggtaaaagttttgtttgtgagaaacttggctactacggtgacagaagaaatattggaaaagtcattttctgaatttggaaaactccgaaagagtaaagaagttgaaagattatgcatttgttcattttgaagacagaggagcagctgttaaggctatggatgaaatgaatggcaaagaaatagaaggggaagaaattgaaatagtcttagccaagccaccagatcagaaaaggaaagaaagaaaagctcagaggcaagcagcaaaaaatcaaatgtatgacgattactactattatggtccacctcatatgccccctccaacaagaggtcgagggccgtggaggtagaggtggttatggatatcctccagattattatggatatgaagattattatgattattatggttatgattaccataactatcgtggtggatatgaagatccatactatggttatgaagattttcaagttggagctagaggaaggggtggtagaggagcaaggggtgctgctccatccagaggtcgtggggctgctcctccccgcggtagagccggttattcacagagaggaggtcctggatcagcaagaggcgttcgaggtgcgagaggaggtgcccaacaacaaagaggccgcgggcagggaaaaggggtcgaggccggtcctgacctgttacaatgaagactgacttgctatgtgggattacaccagaagcttgcagtggagtaatggtaaggaaatcaagcaaccttaaatatgtcggctgtataggagcatattctattgcagaagaccttcctatgaagatcatggaatcaaatacgggacattgaactaatacttggactttgatatgaatttctttaacaattttctctgcagtgcaagttattaaactaaagctactctattttcaaaatgtgttccaacagaaatccttcataactcctagcatggtatcttaataaagaataaagttcttttaaaaatctgctctaagtagatttttccccttttttaaattaaggatcccaacagtggtattttgaaatattctcttgaatttgtgcatttaaattttattgcagtggtatagatgaatgccactgatggtatccttaaattttatttctgctcaccaaggttaatcatgattgtctatatcttttttatagtgatcacttttgaattgtgttcagatatgcagtttcaggtgtaatcatcagagctggttagtcaggcattccagatagtggttcttttcagaacctttttaaaagggttggttaactacctcagtagcagaggattgaactataccctgtctgtactgtacatagaaaatccttgcttttgtcgtattttgtggctgaaaaagcagccttgcttcttcagatattgtagttatttggatgtataatagtttagcaagatgttacttttgtaagacatcagatgttcaaaaaagtgcatccgaacttgtactaaatactgcagtgtccctttataaaaagtcagactaaaactgacaattgtacagcgaagcctgacatttggatattttgaagttttttcataaatcatagaaattagtatatggctgtagtttagctttttaggtaaaaggtatgtttcattagtgcatttcttcctgctgatcactgtaaacatgtgaatcagctttccatttcttatgcaggtcatgataacttgtagagtagagtacaatcatttgtgctatgtttttaattttctaaagcaccttgatgacagtgagtgtccagtggtgaagcatcctctattgaaccaccctcaaaaatttttttgccaagtcctaagttgatagcttaaagtaaaaagtgaaaattatagtttcattaggacttggtgtaaagaaatcccctccccccttccccaaagggatactgcagttatatcacatacccaataggcaccacgatgaagatcagagcttatacttaattaaggttttatacacaccagttccccagtaaatgcaaatttaacaagaaaatcagacatgtcatatgttcaaaatgctcatggcaaacaatcattttgcattcctgcaaataaaattgttttatactgtaagctggaggcgagtgtaacttatttttgtaataaagtttttattttttttatgtgtcattaatataaatgtgtgttagtgtagaaatcttctggtttaaaaacttagaattgcacacatttcagtatgtttatttgtacttacataattttagaatagtggttgccaatagcctgtatgtttcacattaattggttttttgttatctaaataaatcattttagtatgttgtatgtcagttactgggatagctgggacatagagtgtaatttaaaatttgtcaataagtattcattggaatatatgtaaatgtgccttgccggttattgaaacttatctacaaaatgagtatggggtgacaaaaattagtt

SEQ ID NO: 56955 - DNA, 1794 bp, Homo sapiens
gcggctcagccctcggcccgcaggatggatggcgggtcagggggcctggggtctggggacaacgccccgaccactgaggctcttttcgtggcactgggcgcgggcgtgacggcgctcagccatcccctgctctacgtgaagctgctcatccaggtgggtcatgagccgatgccccccacccttgggaccaatgtgctggggaggaaggtcctctatctgccgagcttcttcacctacgccaagtacatcgtgcaagtggatggtaagatagggctgttccgaggcctgagtccccggctgatgtccaacgccctctctactgtgactcggggtagcatgaagaaggttttccctccagatgagattgagcaggtttccaacaaggatgatatgaagacttccctgaagaaagttgtgaaggagacctcctacgagatgatgatgcagtgtgtgtcccgcatgttggcccaccccctgcatgtcatctcaatgcgctgcatggtccagtttgtgggacgggaggccaagtacagtggtgtgctgagctccattgggaagattttcaaagaggaagggctgctgggattcttcgttggattaatccctcacctcctgggcgatgtggttttcttgtggggctgtaacctgctggcccacttcatcaatgcctacctggtggatgacagcgtgagtgacaccccaggggggctgggaaacgaccagaatccaggttcccagttcagccaggccctggccatccggagctataccaagttcgtgatggggattgcagtgagcatgctgacctaccccttcctgctagttggcgacctcatggctgtgaacaactgcgggctgcaagctgggctccccccttactccccagtgttcaaatcctggattcactgctggaagtacctgagtgtgcagggccaagctcttccgaggctccagcctgcttttccgccgggtgtcatcaggatcatgctttgccctgggagtaacctggaatcatctaaaaaacacggttcttcaacctggtccaccgtgggtgtaggcctgaccaccttgggacacctgcaagacgactccaacccaacaacaaccagatgtgctccagcccagccgggctttcagttccatatttgccatgtgtctgtccagatgtggggttgagcgggggtggggctgcacccagtggattgggtcacccggcagacctagggaaggtgaggcgaggtggggagttggcagaatccccatacctcgcagatttgctgagtctgtcttgtgcagagggccagagaatggcttatgggggcccaggttggatggggaaaggctaatggggtcagaccccaccccgtctacccctccagtcagcccagcgcccatcctgcagctcagctgggagcatcattctcctgctttgtacatagggtgtggtcccctggcacgtggccaccatcatgtctaggcctatgctaggaggcaaatggccaggctctgcctgtgtttttctcaacactacttttctgatatgagggcagcacctgcctctgaatgggaaatcatgcaactactcagaatgtgtcctcctcatctaatgctcatctgtttaatggtgatgcctcgcgtacaggatctggttacctgtgcagttgtgaatacccagaggttgggcagatcagtgtctctagtcctacccagttttaaagttcatggtaagatttgacctcatctcccgcaaataaatgtattggtgatttggaaaaaaaaaaaaaaagtcgacgc

SEQ ID NO: 56956 - DNA, 996 bp, Homo sapiens
cggacgcgtgggcggacgcgtgggagcagccaaaggcttgtccctgactttatatggctgctcctggcgagcgactgagtcgtccgtgaggaaaaagaggcgaggcttttccgagatcgtctcagcgatggcgcttcggtcgcggttttgggggttgttctcggtttgcaggaaccctgggtgcaggttcgcagccctgtcaaccagctccgagccggcagcgaaacctgaagtggaccctgtggaaaatgaagctgtcgccccagaattcaccaaccggaacccccggaacctgggagcttttatctgtagccaaggaaagagcggggctggcggacggtgtttccctcccgtgagtttcttggcacaaggttgcgagttataaaggactcagcatcatgtagaagcacttgtggagcatcagaatggcaaggttgtggtttcggcctccactcgtgagtgggctattaaaaagcacctttatagtaccagaaatgtggtggcttgtgagagtataggacgagtgctggcacagagatgcttagaggcgggaatcaacttcatggtctaccaaccaaccccgtgggaggcagcctcagactcgatgaaacgactacaaagtgccatgacagaaggtggtgtggttctacgggaacctcagagaatctatgaataaatggaagcattaattgttttgaacatgtaaatataaatctgtcagccactacagccatcaaaagagagcatctggaagaacagccagcttggaagttttacagcaataatgttgcagtggaatattatttgtagttaaggtcatcctcctcccctttctgtttttttaaatcaagaactacattctgcccctctcttgggcttcagaagcatctaagaaaagcagtcatcaattataattaactttcaaagggcaagtcagaagttgtttataaattacaaaataaaggcatattatgaactcttaaaaaaaaaaaaaaa

SEQ ID NO: 56957 - DNA, 1914 bp, Homo sapiens
ttttttttttttttttttattacacaaagaaaaagattttattgtcttcttagtcaatatccctggtgaaattagaggcatagcttgagactggtgacagtgcaacacagaccttcaggagctgctttgaggactggcctgcccagatgcctgctgttaagccagcagccccctcactccggcccctgccatcttgacagatggagctgccatggtttcagggacactcagcagggcatctgggttggtccctcccacatggaccttgtaaagttgctattcaggggaacctggtatcgtttcaggcaaaacacagaaccatattagcacttctaagcccccttgccccggccgcctccccggaacatttgggcttgtcgcacattccaggagggagcaggagcacagctgcagccacagcttgccaggaacaggcctgggctcccgccctgtgtggggggagggcagaggctgagggcttcctctgggggccctgagtaagctcaccctcaccccacctctctgacttcatccatccaaggccgccttggcccaagagcccaggcagggtgaggggctgtctcccagacccaggcctgggctgcctagcagaggtgggggagggggagcttcaagccctagccccaactctccagaaaccaggggtagccctgctgagctctgaaatgcccagaagtttaagaaaagagggaagggggcaagaggtggtggtggtagtggtactttgctatttaaaggtagaagaatgcaaggaagtaaaactttttttctccatttgttgtttggcgaccccattggagaattccaggaggcatgcaggatgacatcatgttttacaactgagaaatctcagtaattctgtaaaatggagtccctgcctgctccatgttcctgatggaagctgctttgtatttatgtgcttaaagctgtattttatgtcacatttaaatgagggtttaataatcttaattatctaccaaaagtagattacgacgcatgaagatcacataaaatgaacttcacttctcagcatcacaaacatttggaatacaaaaagtccagggatggatattagaagtaagaaaagtacaaaagaggtttgcttagaaataacaaaaaattaaaaaaaaaaaacggatcccccctccccccaatccaaataatcgtggtctaggtaaccatcggggtaaatgcttcctttgctcactcctgtaataagaatgagcgcacacagaactgtatgtccaagtgtgtgtgccagagacgctcacatgcatcacacacacaagcacatacacccacagggacagacgcacagccaggttgtggtggttctaggcacttcatatccacgttcttaagtctgccaccttcccattacatttaacaagttacttcttcggcggcaggacgttttcttcgaagaagccctcattgacaacattccccgctgggaagtatctggccaccacaaaggaggacccgtcacttgcggacgccttccccacgcccatcttcttggtgttcttccataccatggccgtgaagtgtccagtccccgaggtgaagccaggctgctggaagttatagttcttgatttcactgtaccatctatcagccacctcctttcctgtctgatcataggatgcccatgcaaggttctccccacactggccacggctggactccgggctgtgcttgaggatcctcgtgctggccagggcctcagaatactgttgagcctcccggttgaggttcttgcagagcttcagtggggggacgccgtgcttctgccggtactcattgtgggccttcaggacctcattatgaaactgtttggaagctgaccttgccatggccgcgtccgcgctcctcgctccccccgtgccgaat

SEQ ID NO: 56958 - DNA, 1824 bp, Homo sapiens
gacgacgtagcagccatcttttccctggctttggtgattcagaaactcccgttctgtggcgaaattctgtgagtccatgaagctggattgtccctgacctcttttgaggaaggagagggttgcttctaactggtcctgggagatgccactgtgatgtatccgggatgaagacacaatcctggttacttcatagcctgtttttcttccccagccctgacttctcaaaaagcactgcacagaggaggaggcagcagaaccccatttcagcttcttaggactctgcacttccccagaaggaagaattaaaaatgaatatgttcaaggaggcagtgacattcaaggatgtggctgtggtcttcactgaggaggagctggggcctgctggaccttgcccagaggaagctgtaccaagatgtgatgctggagaacttcaggaacctgctgtcagtggggcatccacccttccatggagatactttccacttcctaagggaagaaaagttttggatgatggagacagcaacccaaagagaagggaatttgggaggcaagactattgcggaagcaggaccacatgaagactgccctgtccagcaaatctgggaacaaactgcaagtgacttaacccagtctcaagactccatcataaataattctcacttctttgaacaaggtgatgtcccctcccaggttgaggcaggactatctataattcatacaggacagaaaccttcacagaatgggaagtgtaaacagtccttcagtgatgttgccatctttgatcctcctcagcagttccactcaggagagaagtctcatacatgcaatgagtgtggaaaaagcttctgttacatctcagctcttcgtattcaccagagagttcacttgagagagaaactctctaagtgtgacatgtgtggtaaggaattcagtcagagctcatgtctgcaaactcatgagagagtccacactagagagaaaccattcaaatgtgagcaatgtgggaaaggcttcagatgtagagcgatacttcaagttcactgcaagttacacacaggagagaaaccttatatttgtgagaaatgtgggagggccttcattcacgatttaaagcttcagaaacatcagataattcacactggggagaagccttccaaatgtgaaatatgtggtaagagcttctgccttaggtcaagtcttaataggcattgcatggtccacacagcagagaaactgtacaaatctgaggagtgtggaaaaggcttcactgatagcctagatttgcataagcatcagataattcacacaggacagaaaccgtacaattgtaaagaatgtgggaagagcttcagatggtcctcatatcttttgatccatcagcgaatccacagtggagaaaaaccatacagatgtgaggagtgtgggaagggctacattagtaagtcaggtcttaacttgcaccagagggtccatactggagagagaccttataattgtaaggaatgtgggaagagctttagccgggcttcaagtattttgaatcataagaaactccactgccggaaaaaacccttcaaatgtgaggattgtggaaagaggcttgtacaccggtctttctgtaaagaccaacaaggagaccacaatggagaaaactcatccaaatgtgaggactgtgggaagcgctacaagaggcgcttgaatctggatataattttatcattatttttaaatgatatgtaagttgtacatatatatgggatatggtatgaaattttaatatgtgtatataatacgtaatgatcaaattgatgtaattagtgtatt

SEQ ID NO: 56959 - DNA, 1936 bp, Homo sapiens; identical to SEQ ID NO: 13202

SEQ ID NO: 56960 - DNA, 1110 bp, Homo sapiens
ctggcggtcccgggtgctgctggttagtgtgctctgagggagggtccgagccagccgctgttttgccggaggagcccctcaggccgtagtaagcattaataatgtctttcatctttgagtggatctacaatggcttcagcagtgtgctccagttcctaggactgtacaagaaatctggaaaacttgtattcttaggtttggataatgcaggcaaaaccactcttcttcacatgctcaaagatgacagattgggccaacatgttccaacactacatccgacatcagaagagctaacaattgctggaatgacctttacaacttttgatcttggtgggcacgagcaagcacgtcgcgtttggaaaaattatctcccagcaattaatgggattgtctttctggtggactgtgcagatcattctcgcctcgtggaatccaaagttgagcttaatgctttaatgactgatgaaacaatatccaatgtgccaatccttatcttgggtaacaaaattgacagaacagatgcaatcagtgaagaaaaactccgtgagatatttgggctttatggacagaccacaggaaaggggaatgtgaccctgaaggagctgaatgctcgccccatggaagtgttcatgtgcagtgtgctcaagaggcaaggttacggcgagggttttccgctggctctcccagtatattgactgatgtttggacggtgaaaataaaagagttttacttctctggactgatcctattcacagcttcctcatgaacttttctaatagaacaaggaaagctctccaaccatgtctggcgttgagaagccaagagtctctgtcaactctctcattgcccagtggtgacatgtgctcttctccacactgttgggaggtaatgctgccccacgtgctggtgcaggtcagtatcctgggacttggaagctggcaggatttgccgggtaaagctgtatgccatcatggggcacctgaaaagaaaaacacgtctcaccactgtggttgattcaaaagaaagtgattctattttttaaagaaagcgttgttaatgtaattggtatccctcctaactttttgagttcacaatttacttggtccagag

SEQ ID NO: 56961 - DNA, 427 bp, Homo sapiens
  misc_feature (1)...(427): n = a,t,c or g
tttgantccanctcgacatgattacgaatttaatacgactcactatagggaatttggccctcgaggccaagaattcggcacgagggcatggtggcgcatgcctgtagtcccagctactcggcaggctgagccaggagaatcgcttgaacccaggagatggaggctgcagtgagctgaaatcgtgccactgcactccagcttgggtgacagagcgagactctgtctcaaaaaaggagtttacaaacaagcttaaaatacaatttatcatcagtattaggtaatcaatatttgaaaagttaaactgacgagcccagtgttttaatggaggtaacagatttgctattttcaataaagctcagttatttccagaacttcttttccattatgcctgttttcttagttacatgaattttcatattggttcagc

SEQ ID NO: 56962 - DNA, 3123 bp, Homo sapiens
tttttttttttttttttttaaggattaacttaaatttattaatgccaaggggaaagaaggtaacagttcctgaccctccagctgtatccacagttcggccaggaacaggctctgccagaggctagggccagcgctacatagtctgtggttaatggaggtgactagggaggggtgagcacaccagctgctctagtctcctttccttccccagaaatgaggaagtggtcatgtattattttaggagttcccctgcccacccaatcctctcataattgggagcaatcaggtacatttttttttttttttccttttcacctcctggagtcctggacttccccacatctcccctgcccctcccacgtttccatagtccaagggccagagtaaatgaaaatacagcagccgcccaagcaatggggcccatgctggggcttcagtcatcagcatcttcactggagtctgagttagctggcatcataggatcatcaatgagtgagaagtccctttctgagctatcatagccctgagataagtcatcatcatcttcttcatcctcatcgtcatcctcctcaggttgcagtggtggcaaccgcaaggtagtaccagaggcggtagtcactggtgaagaggggtagccaggggctctcaagcctggatggtgatggtggtgatggtgggggtgggggtggtggtggtggtgatgaagcatggtgctggagtctacatgaggggatgatggtgcaccacccatcacaaatggcataaaaggcaaagatgcagaagtggcactgctgtgacccaaagatgacacagactgtaggccactactgctgtgttggaacgtgttatgcagagatagagacccagtgcttccaccctgcatgagggccatcatcttagaaaggtctggtcgcatcctacgggcccgcttcttgctgctctctggtgcaataggccctggcaaaacccggttgaacaccgtttcagtgtgatgaccctttttcccatttctagagttagctgtctgtactggttccattcccaaacagttcaattctgccttattattttttttacatctttgccacttctgttttctgcgatcctccatatacgctagaaatcggggatcaacagcaaactctggatgaccctgtaaccacatctccagttcagcccggcgaggggcatcctcacccaccagcaaagtaccatccaccttattgatgacagggatccgggtctccaggtccacatcaaggtgattaggctcttccatgcactccacctccagctctactagcttctttctgttccccttcttcttatgaaacagtggatgtccatctcccattactccattcgccatcaacttgtgcttctggaatgttaacttcaatccttcctcatctttgatttgaactgtaaactccttttcatccatgcctcggcgaagtttggtgaactgggctgccgctgtgctgactgcagatgcttcctcctctgccatggaagctgcactactacttcgtggtgtggggactggagagtcaccatattctccaggagtcaatgagggactgtctagcaagtggttgcctggccccaaaattcctcctgttaccatttcctggctcctacggctagaaggccacttccctgagagtacagcctggcagacgaggtcaatacggtttatcaggacacgatccttggccctgcagaacgtggggaccggcgaaggcgcgttgtgaagcagccttcaagctgaaagaaattgcacggcgggagaaacaacaacgatggacaaggcgtgaacaaactgatttttatcgagtggtgtctacgtttggtgtggaatatgaccctgacaccatgcagttccattgggatcgcttccgcacttttgctcgactagacaaaaagacagatgaaagccttaccaagtacttccatggctttgtggccatgtgccgccaagtatgccgccttcccccagcagctggagatgaaccccccgaccctaacctgttcattgagcccatcactgaggagagagcctcacggactctctaccgtatagaattgcttcggcgcttacgggaacaagttttatgccacccccttttggaagatcggctggcattgtgtcagcctcctggtcctgaattgcccaaatggtgggagcctgttcggcatgatggggagcttctaagaggggcagcccgccatggggcagcccgccatggggtgagccaaacagactgcaacatcatgcaggacccagacttctctttttctggctgcccgtatgaattatatgcagaaccatcaagcaggagcaccagctccatccttgtcacgctgctctactccactgctgcaccagcagtatacctcacgcactgcctcaccactgcccctgcgcccagatgctcctgttgaaaagtcacccgaggagacagctacccaggtccccagtctggagagtctgactttaaagctagagcacgaggtggtggccaggagccgaccaaccccacaagactatgagatgcgagtatccccctctgatactacccctctggtttcccggagtgttccaccagtcaaactggaggatcaggatgattccggactctgagctggacttgagcaagctgtcaccatcttcttcttcttcctcatcctcatccagctccagctccagcactgatgagagtgaggatgagaaggaagagaagctaactgaccagtcccgctcaaagctctatgatgaagagagtctcctgtccctcactatgtcccaagatggacatccactgtttcataagaagaaggggaacagaaagaagctagtagagctggaggtggagtgcatggaagagcctaatcaccttgatgtggacctggagacccggatccctgtcatcaataaggtggatggtactttgctggtgggtgaggatgcccctcgccgggctgaactggagaatatggtgactctccagtccccacaccacgaagtagttagtgcagcttccatggcagaggaggaagcatctgcagtcagcacagcggcacgccagttcaccaaacttcgccgaggcatggatgaaaagg

SEQ ID NO: 56963 - DNA, 691 bp, Homo sapiens
gctcccacagctaacatggcggcgccctgtgtgtcctacggcggagcagtttcgtaccggcttcttctctggggtaggggtagcctcgcccggaagcaaggcctctggaaaaccgcggcccctgagttgcaaacaaatgtcagatcccagatattaaggctaagacatactgcatttgtaataccaaagaaaaacgttcctacctcaaaacgtgaaacttacacagaggattttattaaaaagcagattgaagagttcaacataggaaagagacatttagccaacatgatgggagaagatccagaaactttcaactcaaggaaggatattgacaagaggttattgcttaccttttcccaagtggtttgtttgagaaacgagccagggccagtaatgaagcatcctgaacagatttttccaagacaaagagcaatccagtggggagaagatggccgtccatttcactatctcttctatactggcaaacagtcatactattcattaatgcatgatgtatatggaatgttactcaatttagaaaaacatcaaagtcacttgcaagccaaaagtctgctcccagaaaaaactgtaaccagagacgtgattggcagcagatggctgattaaggaggaactagaagaaatgttagtggaaaactgtcagatctagattatatgcagttcattcggtg

SEQ ID NO: 56964 - DNA, 1314 bp, Homo sapiens
  misc_feature (1)...(1314): n = a,t,c or g
taaccgcactcaggaatgaccctnacgacccagaggctaccaagcgnctnaagttcgccatgatccagcagtacctgaaggtggagagctgtgagagcagctcacacagcatggacgaggtgtccctgagcgccttcggggagtggaccgagatccccggcgctcaccacatcatcccctcgggcttcatgcgggttgtggagcttgctggcggagggcatccctgcccacgtcatccagctagggaaacctgtccgctgcattcactgggaccaggcctcagcccgccccagaggccctgagattgagccccggggtgtgctaaagaggcagtacaccagtttcttccggccaggcctgcccacagagaaggtggctgccatccaccgcctgggcattggcaccaccgacaagatctttctggaattcgaggagcccttctggggccctgagtgcaacagcctacagtttgtttgggaggacgaagcggagagccacaccctcacctacccacctgagctctggtaccgcaagatctgcggctttgatgtcctctacccgcctgagcgctacggccatgtgctgagcggctggatctgcggggaggaggccctcgtcatggagaagtgtgatgacgaggcagtggccgagatctgcacggagatgctgcgtcagttcacagggaaccccaacattccaaaacctcggcgaatcttgcgctcggcctggggcagcaacccttacttccgcggctcctattcatacacgcaggtgggctccagcggggcggatgtggagaagctggccaagcccctgccgtacacggagagctcaaagacagcgcccatgcaggtgctgttttccggtgaggccacccaccgcaagtactattccaccacccacggtgctctgctgtccggccagcgtgaggctgcccgcctcattgagatgtaccgagacctcttccagcaggggacctgagggctgtcctcgctgctgagaagagccactaactcgtgacctccagcctgccccttgctgccgtgtgctcctgccttcctgatcctctgtagaaaggatttttatcttctgtagagctagccgccctgactgccttcagacctggccctgtagcttttctttttctccaggctgggccgtgagcaggtgggccgttgagttacctctgtgctggatcccgtgcccccacttgcctaccctctgtcctgccttgttattgtaagtgccttcaatactttgcattttgggataataaaaaaggctccctcccctgcccctcaaaaaaaaaaaaaa

SEQ ID NO: 56965 - DNA, 584 bp, Homo sapiens
cctacagcattttaaaatataacaggtatattgaaaagtctgattcagttacaatcagtgtatggaatcacaagaagatccataagaaacaaggtgctggatttctccgttgtgttcgtctttttccagtgccatcaaccacctcaaagacactggttatcagaggttggatttatgcaaacttgggccaaaggacagttagaagacagtagctgaagaagcatctgtagggaatccagaaggagcattcatgaagatgttacaagcccggaagcagcacatgagcactgagctgactattgagtcggaggcgccctcagacagcagtggcatcaacttgtcaggctttgggagtgagcagctagacaccaatgacgagagtgatgttagcagcgcactaagttacatcttgccttatctctcactgagaaatctaggtgcagaatcaatattgttaccgttcactgaacagctattttcaaatgtacaagatggagataggctcctgagtattttgaaaaacaatagaaagagcccctcacagtccagccttctaggtaacaaatttaaaaacaaaatatttg

SEQ ID NO: 56966 - DNA, 2417 bp, Homo sapiens
atttaataagtgctgctggaaggggattttccaagcctggaagggtattcagcagctgtggtggggaaacatttctcctgaaagactgaacgtgtttcttcatgacagctgctcaaagcaggtttctgagatagctgaccgagctctggtaaatctctttgtcaaattacgaaaacttcagggtgaaatcctatgcttccatgtacattacatggcttaagattaaacaaaaacatttttcaagtctctaactagagtgaactctagagcacagtagttcagaaactatttagagcttccaggatatatttcacagcttcaggcatgtgatcagttagagccgatgaaacctatgcccgcctgtatatatattagcagcttagctagttcataacctgtatattctaaagactgctaaggttttgttttcattttaaatcctagctgattgttgtgggtcaatgaaatacccagtttctgggagggccagggtgggaaatgctttcactggaccaacacacaaatgatcatcctgagggatctgagcttccctagactccacacaataaccttgggggcaccccttttagagaagactgttgaaacccacagcactcgttggggtatgaggaaaccaggggcttggcacaggaagttcccctttgtagctaaaagtccagaaagaaagggttcatctttttgacttccaactgatattgggaagtttggttgaggttcaagtgtgactccttccagagccacaggtaggggagtgtgaagttgagggggaggaaagctggaaggactctgccttgggagattcccagctctgctttccagcgcttggtggaatctgggctggggaaagacggcaccgggaaactctgcttccccattgtttccatctgatcagctgtggtgtgaggacttctcagacaaaggcaaggcctcgtgcccctgcccagcccattcatggagccctgggccttcttggcttccatagatcctaagctcttgactgtagtttagccagacttgttttgctatcttataagcagttcagaattagggaatgctggttttgaagagcaaaggacaggtagtctagagagggtcgtctggcctgcttgctgggtctttgtaacccagcacttcctcttgccctcctggctttatgtttatggggagaggactcaatagctccaccccttcctggcaccagatggggcttggttagtttgcaataagcaccttgcagaggttaaagccagcgggtccctagtcttaggcccagcctgcttgtgtgggctctggcctggcctggtggctggcccagggggcagcagtgcttagagcttctgcagggcttctcttgtttacacagctgcatcagacaatgccatttctccccaccacggaaccttccatctaagatttcttccagggaatgccagcaatcaggcagcacccagctgtgggggcagtggggtgggggagacccacattgatgactttttttttttcttttaatgaagaaacaccaaagaaagctgtggaaaggacctgccccacatgaaaaggataagccaagatggctgtaaacacagagcatttgagctgccactcttggagcacattgatttttcaaaagccagctctgtcaggaaaggaggtgctgttatgagcagctcttccagtgggcaaagaggacgcccataatttcttccattgctagctcatctgtgggaccaatttggtgtaagcaacctgtggcctgcacttgtggcctcgaaggaagcacaaaccctccatccacttcccatttcctctgcccttttccacctcccccttccatcccaccagcttccaagtggctcccagaaagccttattgagccccttgttgacacttggggctgcggaggcctctccctactggtctggcctttcctgagaggcaggtcttccgtcctcagagcctttctggaacaaggagaatgcctgtgcaggtggacacacaggcctggcctgtcgctctcacttgtcttccagcggggagcttcacgttgccgagtggaagaaccatgacctccacttgcttccaaggtgctagggaagtttcagggtacgctggttcccctctccagctggaggccgagtttctggggactgcagatttttctactctgtgatcgattcaatgcccgatgcttctgtttcattcccgaccctttctactatgcattttccttttatcaggtgtataaagttaaatactgtgtatttatcactaaaaagtacatgaacttaagagacaactaagcctttcgtgtttttccacaggtgtttaagcttctctgtacagttgaaataaacagacagcaaaatggtgccaaaaaaaaaaaaaaaaagtcgacg

SEQ ID NO: 56967 - DNA, 2923 bp, Homo sapiens
  misc_feature (1)...(2923): n = a,t,c or g
gttctgctgccagtgtgtggacgtggtattttacaaccccaatttaaagaaagttgtagaggcccacaagatcgttctctgcgctgtaagccatgttttcatgctgcttttcaatgtgaagagtcccactgacattcaggattccagtatcatccgaactacccaggatctttttgctataaacagagatactgcatttccagggtgctagccatgaatcttcaggcaacccaccattacgagtcattgttaaagacgccctcttctgttcttgtttatcagacatccttcgcttcatttattcaggtgcttttcagtgggaagaattggaagaagatatcaggaagaagttgaaagattctggggatgtttcaaatgtaatcgagaaagttaaatgcattttaaaaacaccaggggaagattaattgcctaaggaattgcaaaacctatccaagccaggaaaacctttgtgggttttattaacactttccccttcaagtttttccttaattaagccgatgctttgcccgatggttgtcttccggaaattcaaggtacgacagtgcccagcccacagggcattcctgggtggcccgttgtgaagtgatgggcagccatgtttaatggtaattacatggaagcaaagagtgtcctgattcccgtttatggtgtttccaaagagactttcttgtcatttttaggaatacctgttacacaggactcctgctggcccagcttggcatattccaggccatgtgtctcctgatctgtgccgagatgtaccaagtgtccagactgcagcacatctgtgagctgttcatcattacccagctgcagagcatgccaagcagggaactggcatccatgaaccttgatatagttgacctgcttaaaaaggccaagtttcaccactctgattgcctttcaacctggctacttcatttcattgctactaactacctcatcttcagtcaaaagcctgaatttcaggatctttcagtggaagaacgcagttttgttgaaaagcacagatggccgtcgaatatgtacttgaagcagcttgcggaatacaggaagtatattcactcccgggaaatgtcgttgcttagtaatgtaacctggagcttttatacactacatttcttttttattattatgaagaatggggatacctccaggttccagtaaaattcttctgaccgaaaccaatgtgggtgttagaaaaattaccatatagcttaatatgtttattagttctctttggaaaaaactaccactgtggtcttaaaagggagcaaaatataccataggctaaaactaaggctttcactctagaatgcaaagctgttttgcagctgttttcccttaaagatgtcctgttgctttagtgatatttagacccctctcagttaagaaatgcttagattaaaaaaaaaaaattacgtaggattaatacagaaatttaatcatgtctgattaattgctctattaaaataaggggcatttaaagacccagcataaccatttgtataatgagaaatctaggggaaaaccaatcagtccaacatgagattttaggaatagaaatttgccggccatttggaaagtgaaatgccacttagttctcaattgatgacagtgtttgaatcatcataaaaaaaatacctgcttttcatctggacaacccaattgagccactttatctccttttggcaatctgagtaggcggggaacctaggcagggctggctttcttagcgtgtaacttgtgtagcagcacagggcccacacttagaagggaccccacacttgggttcaaggctctgctatagcggaaattcttaataatgtttgaagaaggggccccatgatttcattttgtgctgagccctcaaaattatgtctgtttcgtggtgggaaatatccccatgttttcttgctcaaacacctttctctctgaaagcagaaaaaggcactgatataaagggaagagaaggaggctcaccggagggaagagaacatagtgaagattcccgcctttggggaggtctggaccacccagggcctccactgccaccttggctggcaagggcagaaatgtgttgtgttgtcttagctttaaaacagtcacagttcttgctctatcatagatgaacaaatactttcttgatcattctgtaagaccaggaggttggtaagagtgactaaccagcctaactttaatacacatgtataaagatgttcacagagaaagatgctctgtagagaatttgctaccgaagttggctcaagaatttgtttttagtgttatttaccaagattaggacgtcagtggcttaaattctttgaattcttttcaaggactgcaagattatttgataaagagtagcatgaatcttgtgctctaatattacacagtaagttcaaagaaaggatgtatgtcaaagacttgttacatagagggaaaatggactgggatagaggacagactgatagtttctttctttcatatcacatgtatagagaaataattatatcagaaactcacaaacctagacatggaaaaacagattactgtctattgtcagcatcattttcatctgtaagtcactactggaatatatttttcttttaatttccagtgactttagaatacacacagtttttccgacttttcaaaaatttgattaaatggttttatagtataatattgggaccccataccgttagcccttgtatgtataccaacactgccaaagtaaaacattaggtcaggcctgggtgggcttcagggcctgttaatccccagcatttttggggagggctggagggccaagtgggataaactttgagggtccatgagtttcggaaacccagccngggcccaaaacagtggaaaccccgtcttntactaaaattacatt

SEQ ID NO: 56968 - DNA, 462 bp, Homo sapiens
  misc_feature (1)...(462): n = a,t,c or g
tttgaaaacctctatgacctgattacnaatttaanacgactcactatagggaatttggccctcgaggccnagaattcggcacgaggggcttgcttcaagagcatcttccgcattcatacagaaactggcaacatctggacccatctgcttggtttcgtgctgttcctctttttgggaatcttgaccatgctcagaccaaatatgtacttcatggcccctctacaggagaaggtggtttttgggatgttctttttgggtgcagggctctgcctcagcttctcctggctctttcacaccgtctattgtcattcacagaaagtctctcggactttttccaaactggactattcagggattgctcttctaattatggggagctttgtcccctggctctattattccttcnactgctccccacagccacggctcatctacctctccatcgtctgtgncctgggcata

SEQ ID NO: 56969 - DNA, 1048 bp, Homo sapiens
tttttttttaaacttggctaagttgccctttattaacgaaaacatagagctttcggtcaattccaccacggagaacacaaaccagagataaaacccacaccaagggctatttcccaagctggggaatttgagaacacacgggcagagttcacgcccacacaactacactgggctcgtccttgggaggcgttcacaggaagcaatcacgagcgccaagccacccacaaggcagtgcggcaaggctcccgggatccttacaggcatccaagcgaggtacagaaacctccacagcagtggggataaggggaaaatattttctcttgctaaagaatatccttagttctcaacataaacatgactacgtatatattcagcttcaaatgaaaaacaagtttacaaatcactactggatacttaaactctatgttgcttttctttttggcagcaccagcctaaactctgtgggtttgcaatatttcagaaacttcaggtacattacagtcttctgagaaaggcccagaacttcagaattcccggagcggccagaatgtttttggcttcttctgcatcctgcaaagggctctctccatattcttccttcagccactgccgatactgatggacctcatgcttctcaaactcctggagctgtctctggaagcccacgttggggttggcacaggatctcccagcacgcacggtgtgcagggcatcctcccagccaaagtcagtgacggtcatgatgtatgcgatcaccagtgtcacgctcctggagaccccggccaggcagtgtacaaggcagctctcaccgcggagccggcactcgtgaatgaatttaatactttctttgaaatgtcttgtcaggttttgagatggtgaatccgctgctgggatgcacaggtatttaactccctccaacataggcctggcactatcgtggacagacagaatatgtgtcaccttgttcttgctcaattgttccgcgtctctggcatctttgaagttgccgatgtacaggccgggcaggatcttgttcatcccattcccc

SEQ ID NO: 56970 - DNA, 1943 bp, Homo sapiens
ttttaatagtagaaaaaatacctttttattaattattaggaataatccattcatgtaatgcaggatgtatgttggagaaggttaagtacagccacatgaatgaggggaaacgtgcaagaggaacagtggtgagaagggggatggtcccccactttccacaaactataaacagcaacatgaacacagagaatcacaaataagagggtctttcctcatgtctcctctcaccccattcttccataatgagtcccagttggtccctagaggtgccagggcatctggaagttctgggctgggagtggggtgcagtgagtggcctcaaagttgtgcagatgcttccgagccagaaacaaagccagctgccgccgtccatctgcactcatgtcctcccccacgctccaggggaagtcgggcccgtgttctgcctggtaggagcggaggacagacagacaccagtcctcttccacctcccatcggctataaattgaggcttcctccagctgtgaggaggcctccaaccactgcctcaccactcgaagaccctcctctgccatcacccggggataccgatgctgcaggagcttcagcaggaggtcattgcctcggttggacatgatgtcctcaggaaccgtggtggtgatgatctcatccttggttctccggatcagcagtacaggaccctggtatctgcacagctgctccgcgttgtttagattgagatgctgcctcacggtcctggtcaccaggcccctccagctgtctggcatgaccttcaaggccaagggcaccaggtcatcaaaggaggcatccaggatcatggcactaacatctgggtaggacatggctgcccacgtggcagtgaagccgccgatggaccaggcgtagatgatgatgtcctggggctggaagcccaggcggtggatggcaaactggaccaccacatccatggcattagcctcattctgcgggaatggcacccccgtgcttccagcaaagcctggatgattccagcccaggactgaatatccagcttccaggggcgtggagacgcagcccacctcataaaacccagcattcccctcacagcagatcaccagcttctgtccctggggctcagctgtcccccgccggtccacaaacatggtgtcaatctcattgccatcacaggccagcagctttgcccggcgcccattacactcttccaccagtcgggcctggccctgcagcagcacaggcatgagggccttctgcagcaggtacacagagcctggatacagcatccggcgccctagggtgtgcgccaccaggtagctggtgatctgacaaggccagcttctttaacccggttgaggagggtgtctgcttgtccccccggtgcaggggctctgggcgaagcagggccacaaccccggcgggaagggccccctcgagacttcattcgaggctgctgggttcttcccagtggaagtcgacttggccagctccggaagtcaaagttgtagttggcaagctgcctcttgttttctgaagactggttccgatgtgttgcttccaagatggtgatgaactgccggtactgggggttggtccagcggccaatgcctcggaggcaggccacacctgccaaaaattagcagcaaatgtcccaagcatagtgaagaaaacggcacccactttggacaaactccaagtaacctttccctgtacaagtaagaaagaaggcgaagggagaggagtaataagagatggaccagaatactgaagccagtgcccaggatgctgtcagcatgtttctcccagggcacggggctgatagtacgtatcccaggagctggaatggggggcagtgactgccgttggcgtctcagggacgctggccggggccctttcagagtccctctcccggtagagtttgtagagccgggggcctaggacgcagctac

SEQ ID NO: 56971 - DNA, 1120 bp, Homo sapiens
gggctgccacggcatggagaatggctccgcttctgttgcagctggcggtgctcggcgcggcgctggcggccgcagccctcgtactgatttccatcgttgcatttacaactgctacaaaaatgccagcactccatcgacatgaagaagagaaattcttcttaaatgccaaaggccagaaagaaactttacccagcatatgggactcacctaccaaacaactttctgtcgttgtgccttcatacaatgaagaaaaacggttgcctgtgatgatgggatgaagctctgagctatctaggaggaagagacaggaaacgagatcctgcgttcacttatgaaggtgatagtagttgatgatgggcagtaaagatcaggacctcaaaggtaggctttttaaatattgccagaaatatgggaaggtgacaaagtaccgtgtgataaccctggtgaagaatcgtggaaaaggtggagcgattagaatgggtatattcagttctcgaggagaaaagatccttatggcagatgctgatggagccacaaagtttccagatgttgagaaattagaaaaggggctaaatgatctacagccttggcctaatcaaatggctatagcatgtggatctcgagctcatttagaaaaagaatcaattgctcagcgttcttacttccgtactcttctcatgtatgggttccactttctggtgtggttcctttgtgtcaaaggaatcagggacacacagtgtgggttcaaattatttactcgagaagcagcttcacggacgttttcatctctacacgttgaacgatgggcatttgatgtagaactactgtacatagcacagttctttaaaattccaatagcagaaattgctgtcaactggacagaaattgaaggttctaaattagttccattctggagctggctacaaatgggtaaagacctactttttatacgacttcgatatttgactggtgcctggaggcttgagcaaactcggaaaatgaattaggttgtttgcagtcttcagttgtgttcttatgcttcagtgtcacatttcatttcatttgaaactaaaattttaagtaaagctgaaataaacttcttgtcattgtctgcctttta

SEQ ID NO: 56972 - DNA, 498 bp, Homo sapiens
gctatgactgattacgaatttaatacgactcactatagggaatttggccctcgaggccaagaattcggcacgagtgcatctttatcatgagtaaagcttagaaataatcaggtactttaacttgtactgtttctttcatggaaaaggaccaaactcttacccaggatctactggagcagctgttggagcccatgacgcctgtcgggatgcaaaagagaagcgctctaaaagccaagatgcagattcacctggaagttctggggcccctgaaaacttgacattcaaggaacgccagcgtcttttttcacaaggtcaagatgtatccaataaagtgaaagcttctcgtaaattaacagaactggagaatgaactgaacacaaagtgaaagaaaatgaggagaacactttgtatttaccccaaaatcttttcagttgtgggtttgtaggtgcgagtttgaagaggaaaagaggaagggggttatatttctaagtgatttag

SEQ ID NO: 56973 - DNA, 1639 bp, Homo sapiens
ttttttttctttttttaacaaatccaaagtttaattattaaggattacaaatatttttagcagtgtagttaggcaatccaagcctggacttccacttcattcctactaaactacttgcagagctgaggaggcaggagactagagtacagagagcattttagttctatcacaaaggtctagaactgtctctacagtcacaggaagaaacaggtatggcaccgtggccagaagggggtaggtattcacagagagtgggtatcaaggtgtcaaactttgtcttctgatagttttccagagattcctgtagagaagggagcagggagagcctactatccgaaaccattccctgaaccctctgaattctgaagcatgtggatttctcaagtcttgttctacccatcccctttcccagctttctgctccttcccactcacctttccttccccctggccattttcttcctcatcagagtctaaaaccaagtcccctatggtaatgacggagctgcacagagacggaggacacactgtaggagggaaaccagaatcaaactactacttctagatgaacacaggctcttgagagtccccaagagaggaggctgttgatccaatcctgactcagactacctacctggcttcctggccctaggaggtaataatgatagtctcagggggtccatgtagcaatccaagcaattcctgaggtgagagcaagcaaagaggataggatgaagggaaggcaggcaaagaatgtgctcctagtaagaagcaactctgttccactcactccttttgctctgtggcaggcaagtcaactgggttctccttcagagcccttccccccagggtctggcatggactcttagacttcccagtggaggctgctcttgtgcccatggctaggtctgctgtgtatatcgcatgttcttccttgctctcaggcttagatatgacctgggttggtgagccgagattcctaaagggaaacagcatgactgtggggcgctccttatggcctcccctagtggaggcccattgggactgaactcttcgtcggcctagaggggccagattgaagtgtcggccagctagaggttctgggtgcgtccttgaagatggtccctgaggaagatgtgtgccaggcttggcttttggcaggggattgtggagtgctagtctttgttgctgaggaggattctgttccatgggctcagccaggttcactgagtcagtaacagagcactctggaagcagccaccccatgtccacaccatattgtctccaggcaagagaagaggtgatagagactccaggctgcatccaactcagcacatcctgaagctgctgtgctgcggtgtaggcagtgctttctccagctgacacaagtactcaaaaagcagcttttccatggcagccagaaagggttccccatactcttgttcaagttcctgcagcttcgaggccaaatccacaggagcctctgacagctgcttcacctgctggtaaaaagtttcctgtgcctccaaaattgtcctcagatcctgctttgtagccttgggatcccgcactataggtccagattctggaaagtggtgattcagggctttcaggactgtggccaaggccgccctgcagga

SEQ ID NO: 56974 - DNA, 1285 bp, Homo sapiens
cccacgcgtgcgggcatggcggcggctatgccgcttgctctgctcgtcctgttgctcctggggcccggcggctggtgccttgcagaacccccacgcgacagcctgcgggaggaacttgtcatcaccccgctgccttccggggacgtagccgccacattccagttccgcacgcgctgggattcggagcttcagcgggaaggagtgtcccattacaggctctttcccaaagccctggggcagctgatctccaagtattctctacgggagctgcacctgtcattcacacaaggcttttggaggacccgatactgggggccacccttcctgcaggccccatcaggtgcagagctgtgggtctggttccaagacactgtcactgatgtggataaatcttggaaggagctcagtaatgtcctctcagggatcttctgcgcctctctcaacttcatcgactccaccaacacagtcactcccactgcctccttcaaacccctgggtctggccaatgacactgaccactactttctgcgctatgctgtgctgccgcgggaggtggtctgcaccgaaaacctcaccccctggaagaagctcttgccctgtagttccaaggcaggcctctctgtgctgctgaaggcagatcgcttgttccacaccagctaccactcccaggcagtgcatatccgccctgtttgcagaaatgcacgctgtactagcatctcctgggagctgaggcagaccctgtcagttgtatttgatgccttcatcacggggcagggaaagaaagactggtccctcttccggatgttctcccgaaccctcacgggagccctgccccctggcttcagagagccgagtctatgtggacatcaccacctacaaccaggacaacgagacattagaggtgcacccacccccgaccactacatatcaggacgtcatcctaggcactcggaagacctatgccatctatgacttgcttgacaccgccatgatcaacaactctcgaaacctcaacatccagctcaagtggaagagacccccagagaatgaggcccccccagtgcccttcctgcatgcccagcggtacgtgagtggctatgggctgcagaagggggagctgagcacactgctgtacaacacccacccataccgggccttcccggtgctgctgctggacaccgtaccctggtatctgcggctgtatgtgcacaccctcaccatcacctccaagggcaaggagaacaaaccaagttacatccactaccagcctgcccaggaccggttg

SEQ ID NO: 56975 - DNA, 343 bp, Homo sapiens; identical to SEQ ID NO: 13228

SEQ ID NO: 56976 - DNA, 1800 bp, Homo sapiens
ttttttttttttttttttgacggtgtcaaactctgctttattggaatagagaatacaggcagcaggaatcacgcttggtgctggcagctccaggtcccctgcccccacgggctctcccacttgtctggatcaggggagacctccactttgaagaacaatatggggtgggagcttccaatgtgcattctgctaccagcctcaggattagcagcaagatgccaacagcaacagcaacagcaacagcaacagcaacagcaacaaaggactggactcgacacttcaggaaaggacgtgtagaagagaaagtcagacccacagtgtcacgtgttaacaacggtcccacaacagcagacacgacactggtgtgcacggctgtaccacctgtgggaggctgacagcacaccgacagccctgaggggcccggcattctcactcccaacatgagaaagaattaacacaacacacacacatgttcacattctctgcgaggacagtcaaattaaggtaccaaagggaggataaaacatttttagagaacacaaaagcctgctgccctgccccagtaggcgtcaggctggacacgacaggctggctgtggcctgggctagccggtgagctcgacaggcagctcacggccacacagggcctcccactggcgagccaacagcgagatgagcttctctctgctctcagcactggggacaaacacctgccactggacttcacggccctggctggctctagccgggccacctggcacctccccaaagtggtccagggtgacactgcccatgaggtcatgaccttgcacgtcatcgaagacgagggtgagggcctgcgggtaggtctggtagcccatgagcactcggtccaggtcccggacgcggcggccatcgtccagccggtacctgtctctctgcggcggctctttggcaaactcgggcagtgggtagtggacacagtcctcatccaggaggaagatctcggagctggtgagcaggagtgtcttggggcgcagggggcccctgcagcacccagggggtggcatgcccacctggaaggcctgcacgtacagcaggatgctgagggctggggccttctctggctcagccatcttttgggccacagtgaacgtcaggtccccaatctcctcctcactggggtaggtaaacttgacgcgactagagtggatcagctcgtagttctccatcttccctgtggtcttgttcccaaactcggagtagaagtccttgtcaacaggctccggcgagggcgtgcgttccagagaggacagcacgaccatgaggtgctggaggaagcagtgcgtcaggtagctgtcccgcgtcaagcacgtgaccacctgcatcggggtggaacccgtcagccggaaatgctggtcgaaaagccccacattgactgactgcaggtcactaagctttagcacgaagcactgggagatgtggaaagggctgttgttgtagtcggtgtttttctgatgccagaaatcctgcagtggctctgagaagtagcggcggaggccgtcgtggagcacaaagtacacagccttggtggagagcagcacgcaggcagtcacctccagccctggggtctggtagaacaccaccgaggaccacatgaggtgcctcagctcctcgttttcaacctcagcaatgctgctgtggaagagctcgatgatggcgctgccccgcaggctggcgacgtgccggagcgacgggcaggcaggcaagtgcgaggggatctgattctcctccgaggtggcctggatgaggtgctcactcg

SEQ ID NO: 56977 - DNA, 643 bp, Homo sapiens
ggactactgcgagcagttttaccgcgacctccggaggccggcgtgacaggctctgtcactaaaataggagtagaggtttaccactcttaggtgactaagcagtatcacaaataaaccctccagcaagtttaaaaataattaggtccaactcagaggaagtggagtttctcctgttgcacaaaaatgatgtctaacagctccagtgaaatcgatgtgcaggaaccgaatattgtatctgacgcatcctgtaatactgaagagcaactgaagacagttgatgatgtccttattcattgccaggttatatatgatgctctgcaaaacctggataagaagattgatgtgattcgtagaaaggtttcaaaaatccaacgtttccatgcgagatccctgtggacaaatcataagcgatatggatataaaaagcattcttaccggcttgttaaaaagcttaaactccagaaaatgaagaaaaatgaggtttacgagacattctcctaccctgaaagttacagccccactttaccagtgtcaaggcgtgagaataattccccgagcaaccttccaaggccatccttttgcatggaagaataccagcgagctgagctggaggaggacccgattcctcagcccgcactccgag

SEQ ID NO: 56978 - DNA, 2056 bp, Homo sapiens
atattgtgcttccaccactgccaataacaaaataactagcaaccatgaagtgggtggaatcaatttttttaattttcctactaaattttactgaatccagaacactgcatagaaatgaatatggaatagcttccatattggattcttaccaatgtactgcagagataagtttagctgacctggctaccatattttttgcccagtttgttcaagaagccacttacaaggaagtaagcaaaatggtgaaagatgcattgactgcaattgaggaaacccactggagatgaaccagtcttcaggggtgtttaggaaaaccagcttacctgcctttctggaagaactttgccatgagaaagaaattttggagaagtacgggacattcagactgctgcagccaaagtgaagagggaagacataactgttttcttgcacacaaaaagcccactccagcatcgatcccacttttccaagttccagaacctgtcacaagctgtgaagcatatgaagaagacagggagacattcatgaacaaattcatttatgagatagcaagaaggcatcccttcctgtatgcacctacaattcttctttgggctgctcgctatgacaaaataattccatcttgctgcaaagctgaaaatgcagttgaatgcttccaaacaaaggcagcaacagttacaaaagaattaagagaaagcagcttgttaaatcaacatgcatgtgcagtaatgaaaaattttggggacccgaactttccaagccataactgttactaaactgagtcagaagtttaccaaagttaattttactggaaatccaggaaactagtcctggatgtggcccatgtacatgagcactgttgcagaggagatgtgctggattgtctgcaggatggggaaaaaatcatgtcctacatatgttctcaacaagacactctgtcaaacaaaataacagaatgctgcaaactgaccacgctggaacgtggtcaatgtataattcatgcagaaaatgatgaaaaacctgaaggtctatctccaaatctaaacaggtttttaggagatagagattttaaccaattttcttcaggggaaaaaaatatcttcttggcaagttttgttcatgaatattcaagaagacatcctcagcttgctgtgctcagtaattctaagagttgctaaaggataccagggagttattggagaagtgtttccagactgaaaaccctcttgaatgccaagataaaggagaagaagaattacagaaatacatccagggagagccaaggcattggccaaagcgaagctgcggcctcttccagaaactaggagaatattacttacaaaatgcgtttctcgttgcttacacaaagaaagccccccagctgacctcgtcggagctgatggccatcaccagaaaaatggcagccacagcagccacttgttgccaactcagtgaggacaaactattggcctgtggcgagggagcggctgacattattatcggacacttatgtatcagacatgaaatgactccagtaaaccctggtgttggccagtgctgcacttcttcatatgccaacaggaggccatgcttcagcagcttggtggtggatgaaacatatgtccctcctgcattctctgatgacaagttcattttccataagggatctgtgccaagctcagggtgtagcgctgcaaacgatgaagcaagagtttctcattaaccttgtgaagcaaaagccacaaataacagaggaacaacttgaggctgtcattgcagatttctcaggcctgttggagaaatgctgccaaggccaggaacaggaagtctgctttgctgaagagggacaaaaactgatttcaaaaactcgtgctgctttgggagtttaaattacttcaggggaagagaagacaaaacgagtctttcattcggtgtgaacttttctctttaattttaactgatttaacactttttgtgaattaatgaaatgataaagacttttatgtgagatttccttatcacagaaataaaatatctccaaatgtttccttttcca

SEQ ID NO: 56979 - DNA, 1698 bp, Homo sapiens
ccggagcgctgtggacatctcccccggcccaacatcacccagtcttgccagctgcgcctctgtggccattgggaagttggctctccttggagccagtgctccgtgcggtgcggccggggccagagaagccggcaggttcgctgtgttgggaacaacggtgatgaagtgagcgagcaggagtgtgcgtcaggccccccacagccccccagcagagaggcctgtgacatggggccctgtactactgcctggttccacagcgactggagctccaagtgctcagccgagtgtgggacgggaatccagcggcgctctgtggtctgccttgggagtggggcagccctcgggccaggccagggggaagcaggagcaggaactgggcagagctgtccaacaggaagccggccccctgacatgcgcgcctgcagcctggggccctgtgagagaacttggcgctggtacacagggccctggggtgagtgctcctccgaatgtggctctggcacacagcgtagagacatcatctgtgtatccaaactggggacggagttcaacgtgacttctccgagcaactgttctcacctccccaggccccctgccctgcagccctgtcaagggcaggcctgccaggaccgatggttttccacgccctggagcccatgttctcgctcctgccaagggggaacgcagacacgggaggtccagtgcctgagcaccaaccagaccctcagcacccgatgccctcctcaactgcggccctccaggaagcgcccctgtaacagccaaccctgcagccagcgccctgatgatcaatgcaaggacagctctccacattggcccctgggtggttacagggcccggctctgcgtctacccctactacacagccacctgttgccgctcttgcgcacatgtcctgggagcggtctccccaggatccctcctgaaaggggtccggggcaccttcacggttttctgtgccaccatcggtcacccattgatcggcccactctgaaccccctgggctctccagcctgtcccaggtctcagcagggatgtcctccaggtgacagagggtggcaaggtgactgacacaaagtgactttcagggctgtgggtcaggcccatgtgggtgggtgtgatggggtgtgttgcacatatgcctcagggtgtgcttttggggactgcatgggatatgtgtgtgctcaaacgtgtatcacttttcaaaaagaggttacacagactgagaaggacaagacctgtttccttgagactttcctaggtggaaaggaaagcaagtctgcagttccttgctaatctgagctacttagagtgtggtctccccaccaactccagttttgtgccctaagcctcatttctcatgttcagacctcacatcttctaagccgccctgtgtctctgaccccttctcatttgcctagtatctctgcccctgcctccctaattagctagggctggggtcagccactgccaatcctgccttactcaggaaggcaggaggaaagagactgcctctccagagcaaggcccagctgggcagagggtgaaaaagagaaatgtgagcatccgctcccccaccaccccgcccagcccctagccccactccctgcctcctgaaatggttcccacccagaactaatttattttttattaaagatggtcatgacaaatgaaaaaaaaa

SEQ ID NO: 56980 - DNA, 767 bp, Homo sapiens
  misc_feature (1)...(767): n = a,t,c or g
gcggcacgagtgctggtttaaatagaattaaaaatttattttttgctggtgacctggagagtgtttcttaaaattataataatgaatacttttcatgctctgatttatgtataggaattattaagagcttcactctgataaagttatttaccacttggctactcaggggtggagtcatttcacaaaggatctgcagcgaatgaattagaccaggagtaacttcacccttctgcttgtcccagctggagcaggattaggactcattcagctgcagctggttcccaggaaaatgaaagcagttccttctggttttttcctttcatatgaaagtcatagttcccagcagatggctttcatcagccctgtacatgtatctgnaaattcaaggccaaggaattatttcaacttcattagggaacaggtgaagaaaccatttgtagtgtggcactattttattaggagttgaaattaagcatagagattatagtagtatgcccattctgggtcaaaatagtttttaactgtcagcaatttaaagaaaaaaaaagactgctaaggaaaagtaagtctggctgtagtgttgattgaggtatcttttatggttgaattgtattatgcttacgaaacatagattattagaaaaaaagacttgtatcttctgcattgtgtagaatgttcagccagtagcaatcttggatcacagtgattctaatctgatttcacaaataatagggaaatttgagagccaaagaggttgaagtgtcttg

SEQ ID NO: 56981 - DNA, 482 bp, Homo sapiens; identical to SEQ ID NO: 22478
  misc_feature (1)...(482): n = a,t,c or g

SEQ ID NO: 56982 - DNA, 3274 bp, Homo sapiens
gcgccgaggatgaggaggtgcaacagcggctccgggccgccgccgtcgctgctgctgctgctgctgtggctgctcgcggttcccggcgctaacgcggccccgcggtcggcgctctattcgccttccgacccgctgacgctgctgcaggcggacacggtgcgcggcgcggtgctgggctcccgcagcgcctgggccgtggagttcttcgcctcctggtgcggccactgcatcgccttcgccccgacgtggaaggcgctggccgaagacgtcaaagcctggaggccggccctgtatctcgccgccctggactgtgctgaggagaccaacagtgcagtctgcagagacttcaacatccctggcttcccgactgtgaggttcttcaaggcctttaccaagaacggctcgggagcagtatttccagtggctggtgctgacgtgcagacgctgcgggagaggctcattgacgccctggagtcccatcatgacacgtggcccccagcctgtcccccactggagcctgccaagctggaggagattgatggattctttgcgagaaataacgaagagtacctggctctgatctttgaaaagggaggctcctacctgggtagagaggtggctctggacctgtcccagcacaaaggcgtggcggtgcgcagggtgctgaacacagaggccaatgtggtgagaaagtttggtgtcaccgacttcccctcttgctacctgctgttccggaatggctctgtctcccgagtccccgtgctcatggaatccaggtccttctataccgcttacctgcagagactctctgggctcaccagggaggctgcccagaccacagttgcaccaaccactgctaacaagatagctcccactgtttggaaattggcagatcgctccaagatctacatggctgacctggaatctgcactgcactacatcctgcggatagaagtgggcaggttcccggtcctggaagggcagcgcctgggtggccctgaaaaagtttgtggcagtgctggccaagtatttccctggccgggcccttagtccagaacttcctgcactccgtgaatgaatggctcaagaggcagaagagaaataaaattccctacagtttctttaaaactgccctgggacgacaggaaagagggtgccgttctttgccaagaaggtgaactggattggctgccagggggagttgagccgcttttccggggctttccctgctccctgtgggtcctcttccacttcttgactgtgcaggcagctcggcaaaatgtagaccactcacaggaagcagccaaggccaaggaggtcctcccagccatccgaggctacgtgcactacttcttcggctgccgagactgcgctagccacttcgagcagatggctgctgcctccatgcaccgggtggggagtcccaacgccgctgtcctctggctctggtctagccacaacagggtcaatgctcgccttgcaggtgcccccagcgaggacccccagttccccaaggtgcagtggccaccccgtgaactttgttctgcctgccacaatgaacgcctggatgtgcccgtgtgggacgtggaagccaccctcaacttcctcaaggcccacttctccccaagcaacatcatcctggacttccctgcagctgggtcagctgccggagggatgtgcagaatgtgcagccgccccagagctggcgatgggagccctggagctggaaagccggaattcaactctggaccctgggaagcctgagatgatgaagtcccccacaaacaccaccccacatgtgccggctgagggacctgaggcaagtcgacccccgaagctgcaccctggcctcagagctgcaccaggccaggagcctcctgagcacatggcagagcttcagaggaatgagcaggagcagccgcttgggcagtggcacttgagcaagcgagacacaggggctgcattgctggctgagtccagggctgagaagaaccgcctctggggccctttggaggtcaggcgcgtgggccgcagctccaagcagctggtcgacatccctgagggccagctggaggcccgagctggacggggccgaggccagtggctgcaggtgctgggagggggcttctcttacctggacatcagcctctgtgtggggctctattccctgtccttcatgggcctgctggccatgtacacctacttccaggccaagataagggccctgaaccggatgctggccaccctgcagcctgaaccacctggggaggaggcgggagagggagctgccatctctaggcacctcaagccccctgaccccattccctcccctcccaccccttgctccttgtctggcctagaagtgtggggaaattcaggaaaacgagttgctccagtgaagcttcttgggggttgctagggacagagagctccttttgacacaaaagacagggagcagggtccaggttcccctgctgtgcagggagggcagccccgggcagtgggcatagggcagctcagtccctggcctcttagcaccacattcctgtttttcagcttatttgaagtcctgcctcattctcactggagcctcagtctctcctgcttggtcttggccctcaactggggcaagtgaagccagaggagggtcccccagctgggtgggctggaatggaactcctcactagctgctggggctccgcccaccctgctcccttccggacaatgaagaagcctttgcaccctgggaggaaggaccaccccgggccctctatgcctggccagcctccagctcctcagacctcctgggtggggtttggcttcagggtggggtttggaagcttctggaaagtcgtgctggtctcccaggtgaggcaagccatggttgctgggctgtagggtgaagtggcttgcttggtgggacctgacgagttggtggcatgggaaggatgtgggtctctagtgccttgccctggcttagctgcaggagaagatggctgctttcacttccccccattgagctctgctccctctgagcctggtcttttgtccttttttattttggtctccaagatgaatgctcatctttggagggtgccaggtagaagctagggaggggagtgtcttctctctccaggtttcaccttccagtgtgcagaagttagaagggtctggcgggggcagtgccttacacatgcttgattcccacgctaccccctgccttgggaggtgtgtggaataaattatttttgttaaggcaaaaaaaaaaaaaaaa

SEQ ID NO: 56983 - DNA, 393 bp, Homo sapiens; identical to SEQ ID NO: 22482
  misc_feature (1)...(393): n = a,t,c or g

SEQ ID NO: 56984 - DNA, 538 bp, Homo sapiens
  misc_feature (1)...(538): n = a,t,c or g
aannttggaaccctntgactgattacgaatttaatacgactcactatagggaatttggccctcgaggccaagaattcggcacgagatgatcagtacagccttgtggccagccttgacaacgttaggaatctctccactatcttgaaagctattcatttccgagaacatgccacgtgtttcgcaactaaaaatggtatcaaagtaacagtggaaaatgcaaagtgtgtgcaagcaaatgcttttattcagggactttaactgcacttcgaatgtgttaccaaggttatggttaccctttgatgctgttcctggaagaaggaggagtggtgacagtctgcaaaatcaatacacaggaacctgaggagaccctggactttgatttctgcagcaccaatgttattaataaaattattctgcagtcagaggggctccgtgaagcattttctgaattggatatgacgaagtgaagtcctacaaattaccatgtctcctgacaagccttatttcaggttatctacttttggaaatgcaggaagtt

SEQ ID NO: 56985 - DNA, 347 bp, Homo sapiens
gtcgaaatgttgagggaagtgacagtccaaaaatggtaggagttgtaagggtaaaagcgtcttttactgcctttcgagacagcacggtgaagagcaccagtgctggaaataaacagacgtgggttgtcaatttgctacttgcccttgctgcttgctgactgtgtgatcttggacaagttacttaacctctctgggcttcagttttctcaagtgcaaagtgggactagatgatatcattattacatctaacttaaagtgtttttttatgaggattcaatgaaacaatgtgagaaaaaggctgagcattgtgtcaggcatcagatacatggtacattctcgctacgtgg

SEQ ID NO: 56986 - DNA, 1335 bp, Homo sapiens
ggaagaagctgagatgaaacatgactctcataaacaggaactttattaaactacatgttacataaaagaacatataaatggaccattaaatacattcagtttattttaaacaaatttacatagatacttatttacatttctccattgtattcttaaattatttttccaagcttactaccgataaaaggtaatacaatgatcatctgctcacacagatgcatagagaagttgtccacagggctaagtaaagcaccacttcccaggggaacacagcttattacgatcttccagcaacaactcatgctgaaggtgctctcttctgagcagcccttgaggtgaggcttttgctttagagatgctgggggttggttctgaggagctgacccagggcagagatgggtccttgctgattgacctgacttggactcacagaggtggaaagacctgtggagaccatcatcgaggccatggccccacatctgtgatatgggaaacaggcttgggaagaggtggtgacttcccaaggtcaccccagccatccatgatggaggaagggcctgggagcttgggtacccagggttccctccaagaggtcccgatcccttctgctatccacaaatccacaaacttagaatcacttgcatccattttccacccaccatggaccttatgctttgaactgttttgtctacctgattaaatatataacttcttaggcttcttgagatggtgaaaagcagcctcaggattccccataagcaactttgtggagcccctggaaataccctactcagggctgtttttacaagaggttttgtggtcaggtgctttactacttcagccataacgtttacctttaaaactcagctgacttatggaagctcagcatttccaattcgcttagatgacaggcaacagtctgcagaagggaggttctaacgtcaaccacgtggattccccacaaacgcatcatatttgcctaaatccatctatctaccaatgtcagatctaaaatgaggtttcactaataagtgacctaaaattaaaaaaaacacaaaaaagtttcttaaaaaaaaaattccaagaatttccccgtttcccaattagtctcagaggagtcgtgaaatgggcattgggtagaaaaagtcccatgttttcaactgtttcttttgaataaagcctgattcccccactctgcccccgaacttttcccgatgatatacattcttctgaaagcaatttcatgcttttagtctgctttaaaaaacctgacttggttcttctcaggatttaaaaaccactgtaccaaggaagagatgtccacgttaaaaacta

SEQ ID NO: 56987 - DNA, 2130 bp, Homo sapiens
  misc_feature (1)...(2130): n = a,t,c or g
ggtgtttgtatccggcggtgcacggtgctgcgggatgcccgaatccgttcccattcctggcttgagtcctgcattgtgggctgtgctgccgcgtgggtcagtgggtacgcatggagaacgtgacagtgctgggtgaggacgtcatagttaatgatgagctctacctcaacggagccagcgtgctgccccacaagtctattggcgagtcagtgccagagcctcgtatcatcatgtgaggggatgcagtggggctggccgagccccggttttcccatcagcaaggggagtgctggcctgacacatcagaagaccctggacttgtcattatttgtctggggggcactgggtgaagctgaagctgttggacacctgccttctcatgtggacatcatctggcaggatccctgctgggcacaccccacaaaccccactccctcaagaagggccagggccagggctgtatggaataataatttaatgctcactgtggccctgactgaaagtcaagctcaggcacaattagggccatggctgggctcccaccaatgaggatacaggcaggcaaggaggttggatgtggtggtgtgggatacaggagaagggcaaagggagctcataaatagggcccagcctggctctgggttcaaaggtggaggttccaggatggcacaggctgtgagggctaggcagctgaggaggtagtactcgtattggctcccttctcccagtcctctacagacacgatggtggttttgcagaagaagcagtccttgttgttcatcaggtgctggttgatacaggctttgcaggacttgtggccacagggctggaacacagcagagatggggtgggcatagcagatggggcagaggtcctcctcactggtgggcagggaggcagctgctgcctgggcagatgcagaggtcaggtgcgcccagcaatctgttccacttgggccagctcatcggcactgatataatccgcatagctctgcagggagaagcgcttccggtcaggggctggcagagcagtgccaggtgctgggggctctggctgtcccaggagatagcatattgagcgtagctggaagcagggatctgccaggagcactgatgtggcttgctctctctctgaggctgggccacgcacccaggagctgcaccaggatgcccgtcactgccaccagaatgggatagtggtccacgctctctaggccaggcagccgtagggtgaccacacgatcaaacaggttcctctcagctgtcacccggttcagcacctggtttagcagctgtgcaagacgccgcagcagcatctcagaggtaggccgggtccagtcaaggaatatctcaggcaccagtgtgatagtcatctccaagacacgcagcaggctgaccgagaggtcaaagcaggtggcacataccttgagctgccggctgtccacaaagttccgctccaggcgctcagcagcctgctggatctcttggatcatgccaatgaattcagagaaggcccagttgagctgattgaggacgctgttgaggaagctgggtgccacatcaggaccctgctgtaggaggtccgccatgtgctgctgcagcagggtggaagggcagggcttctggaggctgggcaaattggcgtcctcaagtttggttttcagcagatgtggcagccgtgtatagnggtacccgaagccacagcccctccagagccgcaccaggatccagttggtctgggcccagggccgctgctcatagggcgccaggaggttcctcaccatggcgatacgctgctcctcggggattcgctccacagcccgcagggagtgtgggtagcacacgtagctggccagggcctgcatcagtgagtctcggatgtcagtgcccacaatgcgtgcgtcggcaaagtgtttggcgagaatggcagccaggcgggtcagggtctcttcatagcctgggagctcctccatgctgtgcacgggaccaaagtaattcttgagagcactgtagctgttgatggccacgctcaggtagaactcgggcctcgtgccgaattcttggcctcgagggccaaattccctatagtgagtcgtattaaattcgtaatcatntcatancggtntcaaaa

SEQ ID NO: 56988 - DNA, 324 bp, Homo sapiens
ggagacagcggtgacaggagcagcggccgggagcccttagggaggcagacagagcctgcagccaatgccccaggagccctcggttccaaccaactgatgcccctgtgcccactggcccacgccatgcagccccagtccgttctgcacagcggctacttccacccactacttcgggcctggcagacagccaccaccaccctcaatgcctccaacctcatctaccccatctttgtcacggatgttcctgatgacatacagcctatcaccagcctcccaggagtggccaggtatggtgtgaagcggctggaagagatgctgaggccc

SEQ ID NO: 56989 - DNA, 1899 bp, Homo sapiens
ttttttttttgcatttttaaggtaagcaattattttatttccttgggcctgatggcattgacttcattatacaagaacttgcagctgacagaactgacacacacatttcccccaagagaaagaacccttttcattagcagagatgaattgaaatgtcatgtctgagtgcaattcctgctccccactcccaccccacaaaatcccaaaagtgaaaataaatcaataaaatccccatgatttactaaaagtcatccctccaaacctttctaactagcagctgcagtggatgataaccaaggagggaagcagctggccatcatgtagcattcctgtgcatgtgagcctgaagggacagcagcatgggagcaagaatcctgaatgagagtagtatataattacccttacttcatacttgccccctccctacataagacacctctgtcctgatacatggaaaatactagaggagatgctaagagtggttttagtctacaattggaaatgcctgagacttattaaattccaaggaaggggtgagataaggggcaccaaagagaaagagcaggttagacagggatgctcaacactcttgtcaattccagtttaatgctatttaataacaaaaccatcttcttaatcacaaccaccttcatgcctaacccctattttccaaaggtaagagatccctgtctaaatttctgggttgttgtctactgccacccctggggtggtactgtgatgtctgagtgagattgcaaccgggatgggagaaaagaagtgtgagacagggaagatcaggggccacaatgcatcaattacagtgggtctcttttggtccccaggtatggtccactaccacaagtcccctttccctacctgtcttgtgcaaatgtcaaaaatagaatctctgcccaaagagaagggagcacagggagttgctgctggactgccatcatctctggccccaacttgtccacctcctgacccatctatgaaactgcacaacaattaaaccccaggaatgctgtaaacttacatcatccccattcctctatcaaagccaatccaacagctctgtcctgacatgctttctccctgggccgaggaagcagcaaaaaatatcaattgagcatgtgaaaatgtgatgacggtgtgtgtggtgtaatgtttctagatgtcttcaccttctgtctccttgcggtgggagccaccctctttccccatgtcgcgcacacacacccctcccctacccccaagtccaggtgctccccatctgctgggcttccaaccactcatttcccatagacactctcatcactgtaggccacatacagaaaatagtcttcctcatgattgtcctcatacagttggcccatggtagcactggtgggagggatggtgttgttgacaaagaagaataaggcgtcctcaggtctcaggtggattctcttccggattaagaagtagaactggccaacagtaaggtcagagggcactaggtacttcctcttgtccagatcaggcaccctggcttttggagccttctctacaatcacgggggaccctgtccggatatttcttccggatcttttctccttcctttttccgatactcaaagggatggtcctccttgtactggaacttcatgatgcaccgcagggcttccgagatccccgcgcggggcctgcctccttcgccgctgaccctgtcccgctccctcagccgacgtcaaggtgtgctcagaatagctgcagaaacgtccgctccgggggcaacagcgctgggccgagtgtgcagggggggttcggggcggggatctcgggtgagcctgcctggaggtagaggagagccagatggagaaataccggcggcttttcgctagagcttgtgagcacaaaa

SEQ ID NO: 56990 - DNA, 1310 bp, Homo sapiens
  misc_feature (1)...(1310): n = a,t,c or g
gtttcaccatcatctatgagacctgcagggaactctatgcagtagccccccattggtggtcggaactgttcacnagaacgatacactcatagtgaagtgttctctgcagcacngggatgancgcgacaccatccgcagtctgctctttcctggttgtnctttcactgattcccaagttctagttttacnagtagganccatgtacgttgttttttcaagcttgacccattttccttctgaaattaactcctctgaaatgatatactgtttgccattctgagaagatnccgttggttcttggctctccattttcaaacgagtctttacagccctnaggtganaagtncacctcnaaggcgccggtgtttcgagccgtggcaccggcatcggctgacactgctgcctccagctagttatttcgtcctcttccgttcttcacccctacactttggaggtgaacttctctcctgagggctgtaaagactagtttgaaaagggagagccaagaaccaactgaattgtctcagaatggaaacactatattatttcagaggagttaatttcagaaggaaaatgggtcaaacttgaaaaaacaaccgtacatggatcctactggtaaaactagaacttgggaatcagtgaaacgtacaaccaggaaagagcagactgcggatggtgtcgcggtcatccccgtgctgcagagaacacttcactatgagtgtatcgttctggtgaaacagttccgaccaccaatggggggctactgcatagagttccctgcaggtctcatagatgatggtgaaaccccagaagcagctgctctccgggagcttgaagaagaaactggctacaaaggggacattgccgaatgttctccagcggtctgtatggacccaggcttgtcaaactgtactatacacatcgtgacagtcaccattaacggagatgatgccgaaaacgcaaggccgaagccaaagccaggggatggagagtttgtggaagtcatttctttacccaagaatgacctgctgcagagacttgatgctctggtagctgaagaacatctcacagtggacgccagggtctattcctacgctctagcactgaaacatgcaaatgcaaagccatttgaagtgcccttcttgaaattttaagcccaaatatgacactggccatttttgtaaacgagaccaccaggccttcttcactaagactttgtattcaacttagtttaatgtagatttgccattagctttttcgtaaaataaaagcacagaacagatgtggtggtggtatgtgaattgtaaaaa

SEQ ID NO: 56991 - DNA, 871 bp, Homo sapiens
gttattcttggacagtataattggctttcctatgaagatgtctttgttcgagcctttaattttggaaatggattacagatgttgggtcagaaaccaaagaccaacatcgccatcttctgtgagaccagggccgagtggatgatagctgcacaggcgtgttttatgtataattttcagcttgttacattatatgccactctaggaggtccagccattgttcatgcattaaatgaaacagaggtgaccaacatcattactagtaaagaactcttacaaacaaagttgaaggatatagtttctttggtcccacgcctgcggcacatcatcactgttgatggaaagccaccgacctggtccgagttccccaagggcatcattgtgcataccatggctgcagtggaggccctgggagccaaggccagcatggaaaaccaacctcatagcaaaccattgccctcagatattgcagtaatcatgtacacaagtggatccacaggacttccaaagggagtcatgatctcacatagtaacattattgctggtataactgggatggcagaaaggattccagaactaggagaggaagatgtctacattggatatttgcctctggcccatgttctagaattaagtgctgagcttgtctgtctttctcacggatgccgcattggttactcttcaccacagactttagcagatcagtcttcaaaaattaaaaaaggaagcaaaggggatacatccatgttgaaaccaacactgatggcagcagttccggaaatcatggatcggatctacaaaaatgtcatgaataaagtcagtgaaatgagtagttttcaacgtaatctgtttattctggcctataattacaaaa

SEQ ID NO: 56992 - DNA, 7315 bp, Homo sapiens
  misc_feature (1)...(7315): n = a,t,c or g
taaccgtttttctttattctacttagtggggcacccagaaacttccctgggggaaatgcttgttcaaatagagaacacgcagaagatgcacttcaccggcctcctctggctgctgagcccgtactctctctttggctcaggctaggcctcttcttctccttggacttaacgtggcttaggtccctgagtcggccaagacctcccagaggagacctgcccagctgccaccaccaccattattgattggcttcccggtactggtgcagcaggtcactgacatctgtactttctactttcacccaaccatcttccttcatgtggtacatattggacaaatgagaaaagaacatggagtcacctttcacctcagcaagttcctgtcactgatgttatgttgaaggcagcaacaagacacatgcgcaagcttaaaaccatatgactgggcctttaatgcccttcttctgactctgaaaatttcctccctactactctccctcctttgagtctnnnnnnnnnnnnnnnnnnnnnnnnnnnnnnnnnnnnnnnnnnnnnnnnnnnnnnnnnnnnnnnnnnnnnnnnnnnnnnnnnnnnnnnnnnnnnnnnnnnnnnnnnnnnnnnnnnnnnnnnnnnnnnnnnnnnnnnnnnnnnnnnnnnnnnnnnnnnnnnnnnnnnnnnnnnnnnnnnnnnnnnnnnnnnnnnnnnnnnnnnnnnnnnnnnnnnnnnnnnnnnnnnntctcaatctcaaatcaccccccccaccacccgccgactcctcccaggcatggtggtgggagcattggtctcttactattgacaacgcctccagaatagctgtctctgtgagtggcataagcaatagccctgcggccaaggtcataggcctcttcagggctaagattaggccgatagccactgtccatgacaccgtaggcataagtgttcccactacccgtggagaacatatttcctgagagccgagtcccatgttcatccacgtagtagagtccaggaccctataagatgaaagatttcaggctgaaattggagaggaagatgttggtaacatgggggttcaaatatgagacataaaaagtgaacaaaagaattattattaccacaagaacattggaattaggaaaccactttggtaaagtcatcgaactttagaaatgaaaaaggaaaaacaaacttgaaatcaactgtttaccaaaagggacaagcttacaaaacacatgcaatgattcatatctgggccaataaatagtccatggatatactgaaacagttctataaccaagcactctatatgccatgcatcttgtcagggagggagtaggagtatatgatgggaaacagatctgtcatccatagggaacatggtgggggaacatgaagaatggagagcacccaccttcttatcccagccacagatcatactgcccatagagaggcccatgccccggtactggcacatcatgttggacagcagcttggaggctgccgacactgaaatacgttctccatttcgcagatagtacagcctgggtgaggacaaggtggagtgaggaaagagaggttagctctttccaacttgatggggcaggaaatgattaaagagataagcattggaaaggaattattttgtaggatctaaagatcagagaaagatttggaatttaacgtatctgaaacatacaaaggcagcctagtaaatcatactgtcccgccagggtggatgtgtcagtgctaaatacctgacgtactatctggcttatgagtggagcacaggctgagatttgggagaagggtcttatcaccaaaaagctgttttgtgaaatatactattagcactaagatggaccacataggacaagagtaaggagcaatgatctgagagatccagggattaaccactaggctaagaaaggaagatgagaggcctcgcttacctgcattccttggccagcaggcgctcccagtactgacagtctgctgcacagccagacatggtgccaagcaggtaagggttaatctcaatcaccttgttcacccgtaaggcacctggaagaagatggagctttgggagagaagggatgaccccatagatcccccagtgtgtcctaaatcaatatccacttccactttgttgcagagttggcctcctgtggaaaggagagcccagctccccagattctgcctgctggagcgtatacactcactaatgtaggacccagctgaggcccgagaatccactgctgcaatcactccatgctggaacttgaaggcgagcgtggtggtgccatgggccatctcaatctgaacgttcctttctccgtccccacccagggactggaagaattctgtgggctgataagagaaaagaggttgagaaaggcaatgaaaaattctgtagtaagaggctccaggaaaaggttttagggagtatgagggtgaggagatatgcagaaatgatctaaccatcaataaatgaaacagttaataaccaatctctagaaggaaatggcttgggagaaggaaaagaagaggcatgccagtatcaaccttttccattttccagcacaacagaaatgaaagcaagcacatgttaccattactaaaaaattttgagagtgacttaaagggtttcttccatgcataaagcattcaaccctcacaaaacacgtttagtaacagtatcctcactttacagaagaggggcttgggacctagactaagtgacttgttctaagtcgcgcaacagtgagttgctgagaggaggccagcaggcaaatttcataggtttcccaagacaccacacacctcctatatcatgtgataaccccatgaaagaaggctccaccatttgtgtgtggacaagggcaggaaagttctcttgtcttcctttgggagcccccacctcacctgtaactctttgtcctaacttgcacttcctcctctcaggccccatccccatgtggcctcttctttgggtctggcgctctccgggactgaaggctacccccgaccctgtaccccgcgctcccgctctcgcctcctcctctcaggcgaccctccactcctcagcgcccgcctccctgcatccctaggggcttccctactgccccgacctgcattccccggggtaaagcgagctctggagatcgcatagagaaactgtagtgtcctgggtccgagcgacgcccgcttcccgcaaccgggagagccgattccggccgctgccctcggggggctccgcatacatctagtagcgccatgaccgccagcacccagagatctgtccgctctcggaggaggaagtgaaagcgaaagccacagatcgaaggggagggaacaagactcttttccacatccccctgccttttccgagaaaaggacagttagtgcctggaccaggaccatcacactggggaccggcttctctgctctcccgttatgggggtcgggggaatgatgggtcaagggtcttccgaagaaagcgagaaaggaacaggcgccttcaaaagcccacttggcgatgggttacagtaagaggtacctccaggcccgggcatccgctggaaacaggggtgggtagggtcgtgtcatctaaaggcgcagcttcaaccagaagactagaagtcagccaggagctgggagtagtgtcacgcggggtgggggttcctatgagcatcactttacaaaaccaggagggacggaagtgcgagggggcagagtcttggaaacaggtcctgggccaactgcaacagaatatacccgccgcgtgtaggggaaggcggcgccagggagagggcgcagtctctgaatctttccacggggtccatcctagggcccctccaggttcaacggtctcctaacctgtagtcacccacaagagcgtgccctttctgcccgcccttcctagcgttgctccctgcttggctgagcactgcggagtttcacgcctctaaaccccgcctcttcttgcaacctgtgttggcctcatctacccagcaactgtcgacgtcacacgacctgggcctccctgaatgggagatatttactaggcaatcccgcctactgttctgaggtttcccctccaggtgcagcttcagagccaggcgagccaggaaggaccagcgggcgaggtggtgagttgtgaggcgcgcccagtccctctgttcccgcctggcacttgctctggccgcgcccgccccatctgccacttcggagaggccacggctctgagctgcggccgctagtgccctgatgggccctgtggctggggtcttgcacattcttgggggtgggcctaaggggataggggaagtggaaggggcctcataggaattaaaaagcttaagggaaaaggtgatgcagttagggggtaaaacattgaggatgataaaagaggagacatccgcagctgaaaagtgcgctgcaaaaggcagtgggccgtttggtgtgccggaaacataagaaaccacagtacaaaacaccaattttattataaatatcaagaacctacagggtgtttatgggccagcatatgccttcagttatgttgaaaatagctgatcatctttccgtacattctgaacatttctcagtttcagagtgctggccacaccaaagcatcagccctggctctaaactccgttacagtaaggaattacaaatcctgtgtttgtactccaggaagtctgcattatcacgaggagcttggaaaggaggtaacacactcaaggcaaatttcaagtaactcatcctgggaggcagctgcctactctgcagctgtggttctccaccacagagagaagaaaagggagggagatggagtgcgcaggtctgagaaggctttcattctggagcatctgcaggagcctgcaccatggcccagtagcacccctttttctccatgagctgctggtgggttcccccctcccggatagcgcctccttccagaaagaggatgtggtcagcctgctccaccaggctgaggtgctgggtgatgagaagcactgagcgggagtaccgctcagggctttcgtacaggagctgctccacctgtaactggctgtttgcatccagggcactggtggcatcatccaggataagtacacacggtttccggatcaatgctcgggccaacgccactgcctgtcgctgaccccctgacagctggctcccagcctcgtctacctctgtgtcatagccctgagggagtccagagatgaaactatgggccccagactttactgcagcagctgtgatttcctccatagttggcttctgggtcaggccataggcaatattttcttgaagacttcttccaaatacctgtggctcttgtcccactgcagccacctgcctgtgcaggtagcggtgctcatattggggaaggggcttccccatccaacagcagctgtcccccggtgggctggtacagattctgcagcagggcagccactgtgctcttcccagacccattgggtcccaccagcgccgtcacctcgccagggcgtagggtgaatgtcagcccctgtagcactaagacatctgggcggtttgggtaggcaaaggagacatcttggaactggacaaggccctccaagtgtaagggagtcaacagaccactgggtgggcagcgaggggtgcggtccaggtactcaaatattttctctgaggagcccacagccttctgtactctggggtagatggagagcagtacctccacagcctgggtgaactgcatctggtagagaacaaatgtgacaaggttcccactgcttacagccccactggtcaccagctgcccaccaatgtagaggattcccactttcagcagcatacctgaaatactagtggtccaggagttgactgcataggccacagcctccttctggttgagtgtctttatttcttgcagcttttccctaaacttctgggcttcgccctcctcgttggcaaagcttcgaactgtaggcatggccgacagagcctcaatggccacctggctggactttgccagagattcccgcacctgcacttccagcaactggtaccattttcccaccttcttgggcagaaggaaaagcagaggcagggtgatcagggtgaccatggtgagggacactgatccccagagcatgatccccaagagacataggcctcgcaccaggtaccacagaaataagctcagattctcactcagagaatcactcagggtggacgtgtcctctgttacccgagacatgatgttacctgtctggttctgttggaaaaactccgtctcctggcgcaggacagccccaaacacctctccctgcaagtggctgtgcacgtggcccatggtgttgttatagatcccgtcacccacgaactccagcactgcactggctatggtgagaatggacatgagagttaagtttcgagtgaaggtatcggctgagccatcttgtagaatccagtcagtgaggcggcccgtaaagaatggaatggccatctccccaagagaggagaggaccaccaggaccaggaacagcgagaggcggcgcgtctccgagcccaggcagcctagaagccgacgcacagggtttccagagccgccctgaccgccgggcacccagaggctcccgagtttgtgccacagggctgctgcgggcagtgccgctgcataactgacaacgaaggcggtagggtgacttccccagtgcagtagcctggtgctatccgcggacccgggggctccccatgagatcagctctcggaacaaggcaagtcccggcagggccaagcccagtgccgcagctaatggcttcaaagcagccagccagccctgggcacctgcgttttcgctcttggagccaaccgttgccctgaggaccccgcaggcccccagccagagcacggcccagcggctcaggcccaccgcccagacccggagcagtggcagcgcggtgggcaccagcagggagaatatgcggggcagcgcggtccggagcagcacccagtcggcgagaagtagcagtactgtccccagccatgcgagagaagctccggggaggcagcggcacccgcggggagcgggacacctagagctagccattggcactcggacgccgtcccggtcccggccgggtctgggactctccgcgccccggtggggcctgaagctccgggtaccgccgagtcctcccctactggcggctgggggagggaacgagggcggggctctcggaaagtcccaggaacaggctgatcctgcgctggcgagaagctcagccatttaggggaaagcgaaatcgaaagcggccgc

SEQ ID NO: 56993 - DNA, 650 bp, Homo sapiens
gcccgagcggcagagcgtgatccagttcagcccacccttccccggcgcccaggctcctctctgacacgcctttaggcgaaacatgccccaagacacagggaccgtttctcccctaggagcagcggtggggagcagggccaaggtcccctgaccactgctcagaggagccctaggccctggccgcagtgccttcagcgcccgacccgggcccccacctggtcagccctggcggggcccactcaggacagctgggggccggggcgtggcagggccctctctgtgcctctcctcccaagtaggaaggggctccgggtggctgctctgggactgggcacccacaagggctcagtgggcccaaacccttgaaatccgtgaaaccgggtggtcccaagagctagaaactcaggaaaccccaggtgctcagggccccgcgtctcgggggctccgtggggcagacccctgctaatatatgcaattctccctcccccagcccttccctgacccctaagttattgcccgctcacctctcccaggccccaggccgcggagctggcagggtggcgcctgcggtttctatgtatttatagcaagttctgatgtacatatgtaaaggacttttttaaatatatgtgccttttgcctacttccaa

SEQ ID NO: 56994 - DNA, 367 bp, Homo sapiens
gggggtttttcagtatctacgattcatagatctggaattcgcggccgcgtcgacgttccctgttgcccttggtctcggggtcgctgtaggcgctgaggctgcagctatcatggtgaacttacttcagattgtgcgggaccactgggttcatgttcttgtccctatgggatttgtcattggatgttatttagacagaaagagtgatgaacggctaactgccttccggaacaagagtatgttatttaaaagggaattgcaacccagtgaagaagttacctggaagtaaagactggctagattatcgaatgttcacattttaaagttctgagagaaataaaaacatgaagaatctgaaaaaaaaaaaaaa

SEQ ID NO: 56995 - DNA, 2039 bp, Homo sapiens
ccaaatgtacagaatgaatgatacgtgaaaagaataatccatggcagatagttgaactgcaattatgataactcaacaggatcaattttatttacatgctgaataaatgaatgaaacatattctctacatccataacttaagtacaatcagttataattacaacactgcagcaatctgagctgccacctgctgggatcggtctaagggaaacgttctgatgttccagaataatgttcttaatactctgcaaaaaatgaaacaaaataaaaacacaacttcacaattccttactgggttacggctggttccaagaatttcttttcttcagctcctgtttttgctgctttccaagagtcaacacacgttggatttacttctgaattgtcaatgaggtaatgtgtgcatcagtgaaataaacagaaaattcattcattcatggcctttgcacagcttttattattaagctatgagcatcctgtttgaggctagttttactagcggctatgtgcacatttgtccgcaataaaagaagtttactcattcccctgtccccttttctaatagaaggttagctttttttgttgtttttttttatttttttgcacatcccttttcactttacagtacatttgactatagtgcacaacatgattccgagtcaaaacagtggcccattgggcactgagcttctgattggtgtagggcagtccaatcagtgctggtgtcactgggttaccccaaccatgtccggccaaaatggcactacccagtggtagtgaaccatctaattaaaaccaaaactcccccagggaaaatgctacactatcagagtcagtcttgagtcagatctttatttggtgctccatccagatatatttttagtgctttctctttacgaggtgagtatgttacacgatgtccagtcttctggagtcgactgctttcttttttcatcagttcatttctttgctcatctgtcaattccattaattcttctgttttatccctataaaatatgaccgcaccatcatcacagatataaagaggccagacattcagggtagaaactttaggattccagtctaaatcctgatgaatatcaaggacagaaatatcacagggaaatgttcctctacccttagcaaattcaatatcatccaaaggaatcccactgatttcactaagcttctctcgcaattcgtccacactactgctttccaatacaacctccctggaagggatccaacttcatctctgaaggcttccaccgtcttgacaaaactgcaagctgtgacatggacttcatcttctctaccccatcaagaacttcaaggaaaacctcccagttgctggaaatattaatatcttcttcataaatatgataatccaaaaagacagtgccaggattcttccatgtttttttccttagacgaaacctgtcaatactgagctctaaaccacattgctccctgagctgaggaattaattcctcttttgattgccgtacagtcattcctttagcaaacacagcatctagcagaaacttgcatggctcttgttcattgaccaaaagctggtatactttaactctgtattctccttttttaagtgctctccccagtctaattgtaatcttattgtcatcagaaaatgatgaaagtgtctcattcagccggacgctctcaaactcttgattgctggcatacactcgaaagaccttgaagtgagaggacaaaactccaacaaagggctctaaatgttgtttgaaagctgccagagtaattcttttatcaacatgcaccatcaaccatttatgtccttccccagaaccttcatctgcagcataaggttcagctttgaaatacatgtactgcatttctcccctactcttgccactctcatcatattcactatcagttccagagtcttcttctgctgtatcccatgtttcttttttcccttcatttgctttcgttcttctactacttgtgatactgtgagagtcaagtccattatgcaaagggatctgagcattgtc

SEQ ID NO: 56996 - DNA, 2160 bp, Homo sapiens
  misc_feature (1)...(2160): n = a,t,c or g
tttttttttttctgatatgagcatatattattagtctattcaagcacagttttgaagttagcaaacatctaaatcctcacatctcctacaaggtaggtcaaagtatgattcttctcagttgtacaagataaatggctgtataacatgtctagtcatagttaagacaacaattggggacagtgctttggtctgattgccatgccagcatcatattttatctgtgaagggtggcttggttgtggaaaactataaaaactggatgcaaaagtaaaatgcaaccttgtttggtgacgtccagttcctctggaattaggaaaaaccacttgtgtttaagaacaggagtcaaatcaatttttaaggaaacagattctaatacaaaaaccttttctgttgggtctagtaggtctggacaaaacatctccctcttttccttttatattttcctcatcctcttcttgcagcgctggttgaaaacaggggaggaccccatgaggctgtcagtggagtgggaaccatagctgctatctgagtcatcagggctctgaggaatcccagcttcactcatgcctgacataggctcctcgaagacatcacttgcccagcacaccatgcccagagacattgccttcttcactttcttgaggctccattttcacatgggccagattccaaagaggagaagcatttacctctgcacttgaagcctgtggtgaagcttcaacctccaggttagatgggaagcgttcgctctgagccccaagcactcccataggcagtgactggtctccagaagcaaggtcagcctccagctcctcactgacaggaaaagtgatgtcgctcacaggttcctccttgatcttcacaggtttagcgtcctctgtggccttctcaggattgacaatcctttcatattcttcagagagttgcttactaatctgtagcatgtaactgtgatagtccttgatgcggtgctgccagaacttctggagggagagcacactgccaatacccacttcatggaatacctgctccatcacatcaggaaaaggagtctgtcccagccgggctcccggtccacagcaaaacgcagcaccttggtaaacttaaggcaatactcatgtgccaacatcagttaggtctccaggacactctcattagcacagtcaaaaccccgccgttggccaggattgtggccactgccctggtagaggagctgccgacaggagtgcccagctgagttcagtcacaggttcccctttcccacgataaaagtcactctctgggtcactgtgccggatctggaatggtgcattgggattcttacaatctaaaggcaggaggtcatcagggagaggaggtgacccagggcacgagggaagaggttcactctcttcagtttttacaccttctgtctgctgctgattctgggcctgagctgtggcaataaggttgcgaagacgtcggttgtgctgaatcaactgaatcgtatggatggtgagactacatggctctgaggggatgtccagcatagtggggggcttcggcttgttggctgagggttggtgcaggggtgggtcatggacttccaccagacggaactcccgtgggagcaaatcgaaggaacttctgttggtctggcttgatgatattggtatctctccccagtatctttgcagattcattgtcccatatgtctcttcaagttcaacaaacatttatcaaatgcccaggcattctgtgtcggtcaaagactgataatgtgagatccttgcctttaccgaaaggagcacgaagaacaggcacggagcccaaggaatgcccaagtccctccaggggtttcctcggtcacggtccgccggcgcaggcgccaatcacagggtcctgaggtcgcctgacgttcagggcagccggaagacggggaggtctggacctgaaccgagacaaggaggtaccacactattcactgctgcgtcgcagagcgggctgggcggctgtctggacctcgagaggcctgaggcaaggatcgcgtcagaccccgaaagctggtttgttgattagtgatcctcgtgccgaattcttggcctcgagggccaaattccctatagtgagtcgtattaaattcgtaatcatgtcataacggtnttcagtaggntntncaaa

SEQ ID NO: 56997 - DNA, 1112 bp, Homo sapiens
gctgtgctggtggcgttcaagatgtcgaccaagaatttccgagtcagtgacggggactggatttgccctgacaaaaaatgtggaaatgtaaactttgctagaagaaccagctgtaatcgatgtggtcgggagaaaacaactgaggccaagatgatgaaagctgggggcactgaaataggaaagacacttgcagaaaagagccgaggcctatttagtgctaatgactggcaatgtaaaacttgcagcaatgtgaattgggccagaagatcagagtgtaatatgtgtaatactccaaagtatgctaaattagaagaaagaacaggatatggtggtggttttaatgaaagagaaaatgttgaatatatagaaagagaagaatctgatggtgaatatgatgagtttggacgtaaaaagaaaaaatacagagggaaagcagttggtcctgcatctatattaaaggaagttgaagataaagaatcagagggagaagaagaggatgaggatgaagatctttctaaatataagttagatgaggatgaggatgaagatgacgctgatctctcaaaatataatcttgatgccagtgaagaagaagatagtaataaaaagaaatctaatagacgaagtcgctcaaagtctcgatcttcacattcacgatcttcatcacgctcatcctccccctcaagttcaaggtctaggtccaggtcccgttcaagaagttcttccagttcgcagtcaagatctcgttccagttccagagaacgttcgagatctcgtgggtcgaaatcaagatccagctccaggtcccacaggggctcttcttccccacgaaaaagatcttattcaagttcatcatcttctcctgagaggaacagaaagagaagtcgttctagatcttcttcatctggtgatcgcaaaaaaagacgaacaagatcacggtcacccgaaagccaggtgattggtgaaaacactaaacaaccctgagcccagggccaacccctacggaacaccactactttacccagacgccacaggtcatcatctggatcatcccattctggttcccgttcaagttcaaaaaagaaataatgtattaaaatttacatcttaaa

SEQ ID NO: 56998 - DNA, 1106 bp, Homo sapiens; identical to SEQ ID NO: 13266

SEQ ID NO: 56999 - DNA, 1130 bp, Homo sapiens
tttttttttttacaaaaccaaaaaaccaaaaatattttattgctgagtcatcctggggttccataaaggaccccaagccttgcttggagtctatagctttgctaggactcccatgacatcaggatagagattgaggcacggggtcctttgggttccgattaaggaactatctactctgattctgttgatcttattagtccctccaggtcacctctacttcatctgtccgatacctctgtgtaaccccagaatcactgagtggggtcctgtgtccagcccgaaacatctcccagccagcctgggctatcatcgctccattgtcaatacagaatctctcatctgtagcaaaaagccgggctccacgttcctggcacattgttgccatcatctcctgtagcctcacattacctacaaagaggcagggaacaggattagcttagttttagccatctcttcatgggtccagcagaacacgtcatgtgcactcacttagaacaatgacataggggattaggggcaaggattgggaagcctactccaaacgcttaatgatttagagtaccaggaggaagacgcatagtgttaagaataggaaagaggaacacttttcaataatacatacaccccactcctcccacaatgagggcctcctgggagccacaatgtgccatggctcgctctgtgatctctaccagcattgcaaacacagtttcctgtcagggacagataaggagaaaatattagaggggcatccccagattagttctgctctacaatataaaaccttcagccccaactttctgtcccagttttttactgcattacctgcagggagaaacacagatcctcaggagtacactcgcctgtggccagcatccgatgggctacatcctcaatgaaagacaggatccctgagaatgagacgtccatcccctttacagtgtatggcagctcaaccagcttcttgcctcgctttgccatctgttcaatgttgtatcctggacttgggtcgttagaaatctagcagaagaaaaaaataaggaaggagggaatggaagaggatgaaatcagatatgcaggaagcataagaagctcatttactatttcctccctccacctccatggcttcc

SEQ ID NO: 57000 - DNA, 3503 bp, Homo sapiens
ggtgattgggcctcttactgaaggacagagaagaaatgtggcagtagtgaattcattgtataagttgcaccaatcagtaacaaaggttgtttccagtcagagctcattcccactggcagctgagcaaactataatttcagctctaaaggatctgcagtacagtgttgaatagaactggctattcatgctcttatggaaaatgctgtgcaacccttactcacttctgtgggagatgctatagaggccataatcatcaccatgcatcaagaagacttttctgggtcattatccagctcaggaaaacctgatgttccttgttctctgtacatgaaggagctacaaggtttcattgccagagttatgagtgactattttaaacactttgaatgcttggattttgtctttgacaacactgaggctattgcccaaagagctgttgaactttttatccgccatgccagtctcataagacctcttggtgaaggtgggaaaatgcgacttgctgctgattttgcacagatggagttggctgtgggtccattctgtagacgagtatctgatttaggaaagtcctatcggatgctgagatcattcagacctctgctcttccaggcaagtgaacatgtagccagtagtcctgcattgggggatgtgattccgttcagcatcattattcagtttttgttcacgagagcacccgctgaactgaaatctcctttccagagggcagagtggtcccacacacgcttctctcagtggctggatgaccatccatctgaaaaggacaggctcctcctcatcaggggagccctggaagcttatgttcaatcagtgagaagtagagaaggcaaagaatttgcaccagtttatcccataatggttcagctgcttcaaaaggctatgtctgctcttcagtaatgacatgaaatctttgttcatctccactttgtgctaacccattcatagttggcagttaaacacatactccaaaagactgctactatctactattttaagaatgtaattgattgttcggtatttcctatcgacgtttatttacctctttagcacttatactttagcataaaaaatgttgagttatcaccacctttcaattccatggacctgatttttccagaaagatgttttcctctttcagatttttgtacaaggctaaaatgtctttcccatccataaccaagtcctcctatgggtacataaacccaaagtccccacttcttttaaagggatatgatcaagttataacatgtaccctgcttcccccaaccctgccttcttcactaaataagcatgtagctcagtggtttccaaatttggctgcacattcataccaatcaccaggggatttttttaaaatcctgatgcccaacttgcactccacattaattaacatgtctaggagtgggagcctgacagacaccactattaaaaaaaaaaaaaatccccaaaatgattccaatagacaacaaagttgaggaaccactggcacatcccaagctaagatacaaggttaaatggcctttttaagtatgtcatactggatctttaaataaagcaaggcttttgttacactttgtcatgttattaaaagcagacctttgggctgtttaaccgtgtaacaaaaatgccacgtgaaaaataaaaatttttattgtatagcaattctctataaatagtagataatctaagtccttattttctgatggctcttgttccactattaagattgtttttaatttttaaaatcctatcagcagcctcctaattagcagtgttaggaatttgccttatgttttccatctcatctcctgaacctgttattctgagaactcataaataaaattcagccaagattaatcaatcaatcaatcaatcagtagacgtcagagataagcaacttttttttccatttatttgaaataatatacaagaatatagtgtgcaaaatttaggggcaacatcatgaagaagtgtgatgaactgaaatcaattttacagctgtgattcctaaccagaaacaccacttggtaagtaacatgaaaagccatgattgtagctcagagcaaaagcagctgtattgccaatgtatttgctctaattttagacagttggaggaaaattaaagtgcaagtgttgcactgcagtaagtgcaaagtctgcccccaccataaagaaagattatgatgacaaaatatatttaagatacatggctgaggagatacagaacacgaagttaaaaaatacaatggtgttgactgtttgttaatagcaccattacagtgactatatccccaatgctattaactaactttaccttggcctgggctaggtctccattggaaataataacggatggctgctgccacctggtgcatcaactcagcatgccatggtaactgcagcaggtggctcttaggctgggacaccaacaccagccacctgcccccatgttctggtagcctcttggcactgaccagactaggagcgcctatgtttggcacagatgctgagccatgtggtggttactagaggaaaggccgactcccagcttctgcttcatttcatcatgtgtacaatacagattaataagcagtaaggagccaatgtataaacagcagttacatattttttaaattcccctttcgtacaatttaaaataaaacatgtatacacttctcctctctttctactgtactttagacacccacaggatatcaattttcaagccctattattaccctgatagacatatatgaagtttggaagaaaaataaggcaatttggtttaaaatgttgatagttttagcttaatgctctaatggagaaagcaaatcctcactcatattattaaatcatttcaagactcaatgctatcagtatcttatggtcacacggaattgaggacaaatggtgagaccttgatcttcttaagtctttccatcaagagtcaatgtatatgcaaatatagacttaagaacataagcatcctggtttaatgttgttgtgagccctgtggaaataaaattaaactcagtgaatgtttacaaatcaatacatagtaatcctatatatgaaagctaagatgtataagatgtttataaatttactattagaaaatactgctttcttaaaggtgattttaaaaagctagctgatatctgatggctcaagcatccagaaaatgtatgcaatgataagacattgactaggatgaacagaaaagggatacaggaaaagtccgaacacatgaaattctaaattaaccaagaactgccaaaattcagttcagccaccctctcatctgactactgactgaccactatttttaaagaaattgtgaaaaatttaaacagatatgacctgcattttactaagaaacaggcacatgtacacaatgaatttaaaacatctttggccagccctcctactataaaaatattgatatcttcccttcatctttcaatgatacttcaaattgaccc

SEQ ID NO: 57001 - DNA, 919 bp, Homo sapiens
  misc_feature (1)...(919): n = a,t,c or g
tatgactcctatcccttttctgaagcagcattgtgatagatgtggagcttctacctgcatttctaagcaattattaacccaacttttgagttgaaacttgcatggatccttgttatgtcccgtaattcctctgaatcaaggaatttattttgcatgcttattaaactcaaactgggtctgattgaaagtgcaagcaatagtgacaggaccttaactctggttttagagtacgaacattctaatgcatgactcaaaatgtccagtgttgtggttactagttattttatatatgncatttgttaataatgaagcaatagcggactaagaccaatagcttgaatatattcagattattttcatgttttaataaaggatttttcttacttccattgaaaatgggaagtagaagataaacaggggcaaccacaagacattcaaactgtcaggactagggcgtagcagtgcccaccctctaaccacttgcctggttccattagtccccaagcatgtttgaaaacaaaagacacaaactaagcatgctgaataaaactagctgctatggctgtaataatcagaaaggtgcagagtttcagaaagagtaggaaagtagggaatgccagtatggagtatgtaaaataactagatatggatatggggtttgtttatgatatgctttatgtagacaaagtttgaggtcttttaaaactgggatttgagttgaaaagagtcaggatgcacatatttccactatttcaggattttcagatgactaggcacatgttgtggatgatactggtaccaactaccaatgaccaactataaagtacccctgcaataagggagacttcctttttgtagaatagtcctgaaaatactgacagatctgtggttagtttgttattttattgcataaaaaaca

SEQ ID NO: 57002 - DNA, 1427 bp, Homo sapiens
ttttttttttgctctagagggggtagagggggggacatgagtgattttttttttaacttacatttttaataatattatttttaaaaaaacttggagctgggataagtggcagcagggaggaggggcccagagctttacccctctattaccagctgcctaggggaaggagcattcaacgaagccccgtaactttaagtccctaagggctgtgggtatagacaaccccaggcttgaaaggggtaaagtcagggggatgggaaacccacaatctggggtgaagatggaggcaaatgcccctggggggtggtcaggacatgtctcagaggcccaggttccaagtaggcatccacatgagtaccccctccccctaaaaggctctgtagaggccaggcccagcccagggccactgggggggcaaatcttggcacctgcccccagagagtccagttcctccctgaagcgggtggatggaggctgcccattttagatgctcagtctcttcattctgtcttctgctccctggggctgtgaggggtggggcaggtaggcagagcactgggtggccacagcagggccttttactgggaggcctgtgacgtggggttctccgatttgctttcttggctggacggaggcttgctgttccaggggctgttggcgcccagtgcaggggagtttgttaaagctgtcctcgtcgtcaatcgcgttggctgcgtcaaactgggtgttctccagccgggtgatgagcctctcgtcctcgtccccgaactccccgcccatcagggtgggctcccccaccaccatcacatcaggtacctggctggagagggcgaaggtgctagctgggctcttcttcttgctgttgctgttgttggtgttgccaccaccagagctcatggtgctgccccctgacatcttccgtttccgccgtttgctgggctgctgacgtgtgggctccgcagggggtgctaccatgcgctgccacttctggaaaaggcaggtcttgaggcagtcgcgggggctgaggctgtaggtcttgtggcgtgacatgagctcttgcatgggctcgagtatcacacagagtcggaggtagttgagagtggaattggacagcccacaccgagtgatgtttttggagagctgatccaacatctgggggtcttgggcatgcatggcaaggatgctgcgggggatgagctctcggtgctgccggatgctgaagtgccacgtctttatccgcatcatgtcgtcaaacatgaactccaggtacaaccggccctccacacacacctgggtgaacatgggcttgccatgctgggtcaccatgctgccctggtcacagtcgagggacacaaagttgctgtggaatgcctccttggggtgcttaagaacatagtacagctccgtagcacccccctcaaagatgc

SEQ ID NO: 57003 - DNA, 1296 bp, Homo sapiens
  misc_feature (1)...(1296): n = a,t,c or g
atgacctctgaaacgggctccctcccccttcctctagaatgggccaggctccttnaaagtctcttctccctccagcacaggatcagccgaggtctcctgtgccttctgctttttnagaccaatcccgttgtttgattgcccagaccacccctgtagcagggtctcagtccctttcctctggggcagtggcaacgaccacgtcctctgctggtgatcacaatggcatgctctctgtccctgcccctggggtgccccactctgatgtgggggagccacctgcctctactggggcccagcagccttctgcattagccgccctgcagccagcaaaggagcggcggagttcctcctcgtcgtcgtcgtcctctagctcctcctcctcttcatcatcgtcgtcgtcgtcctcctcctcctctggctccagttctagtgactcagagggctctagccttcctgtgcaacctgaggtggcactgaagagggtccccagccccaccccagccccaaaggaggctgttcgagagggacgtcctccggagccaaccccagccaaacggaagaggcgctctagcagttccagttccagctcctcctcttcatcttcctcctcctcctnnctcctcctcntcnntnctcctcctcttcctcttcttcttcttcctcctcatcttcctcctcctcgtcgtcttcctccccttcccctgctaagcctgggccctcaggccttgcccaaacctgcaagccccaagaagccaccccctggcgagcggaggtgagtgctgtcttgcctgagttgaaaggtgggtgggggagtgacttgaccagagaaggggccctggggtgtgagctccccgctgggtgtctcacgtggccttgggcatctggttgtgggggaggaggcacttgctctcctctccccatgctcgttgcaccctgttctggcgaagggctgcgccatccacagcggcgctcaggccaggaccagggggtccttggtttcttcctctccctccctcaacacatagcctgttcccagggttctagctttgtctccccacttgtatccagaagttcccaggggtgattgtgatggtggttgggactggaggttgtataaggtgttcttggaaggaaggggcaggagttggaattagttggtccctactgtcccccatgaggttgtgaacccctccccccaacttttcatgtttcttaaaggcattttggttttttaaaatctgtacagcaagagcaactttttctgtcaaataaaaatgagaaatgcaggaaaaaaaa

SEQ ID NO: 57004 - DNA, 1607 bp, Homo sapiens
  misc_feature (1)...(1607): n = a,t,c or g
agtaccaagattataaagactgggcaacatcttactatttaagaaaaaatatttatttgcaagaaatggaaatacaaaagcataacaatttcaatttatttttttttcccaaactaagtacaagtgtcctacaaagcttttttttttttggtatttacttagctatgataaagaataaaaagtcatttaaaaaacgcgataggacagataacagactcacaacgtatttagatttaaacactgctggtctacgtaacctgttacaaaagagagcaaaacctaactgtcagcatagacattaaagctcaccgttgattatagctcagggcctgctcagcattgtttaaaaagggtcactcacagttttgtccaaagagtgctggtgttctctatgaactccataaactgttttatctgaaaaggtgattttctaagtagtgtaagccatgggtacatggtgcaaaaagttcatgttctcactcagctggtgagcgaaggatgggagcagagaacagagctaaaacccctggttttcctttccccagatgtaaagcctgctagctggaactcacagaagattggaacaaaaagataggagatggacacctgggggactgctccagcacgaagggaagcgatgagcatcacacagcagggccattgcaggggacaggtgctgtaattcctgcccagagaacttgaaagcttacagtgtgctcacaggaaggaatcggctcagctagtccagaaattgctgcatttcccatattacttagttctttattcatcctgtggtaaagagtcacccttgttttccgtatctataaaactgaaagacttaaaatttacttagcacagcacggcaacaccctagtaaatgctcaagaaatattatttcccttccttctagaaaccaaggctaaataaaacattcctgaattttatgttgtcccaaaataacaaaacaaaacaacacctagttttttcctgtgttaagtgctgaccctttgacccacaaaggcatggaacattaatccttcaaatgagcccaggttcctttgcccctgagaaatgttccgctatgaggatttataatacctttaatccctggctggttgtttttttgatgtgattgcactcctgcaaactgggattttcctaatggacggtaaccctatttcttttctcctgatgtgcaaatctgatagtggctcacttttaggaaaccacttttgagccttcagaaaaaaatttttccccacacccaactcaatctaataataaaagaatatatacaaaatctcccagtgacgagggattcctcagtcatcctggatttacctataaggcacatttaaggcacaaatgagcatgtaagggaggaatgtgcacgtgtgtgtgtgtgtgtgtgtgtgtgtgtgtgtcagagagagaagaagggagagagaagtataagcatttgggtcttttgaataactattattaatgtttcctcaatcccttctattccccaatattccctagggcctcaggcaacactcttccttatgaaactgaaaagtcttaggagtaactgaatgagtgagtgaatgnacgaaacatctaag

SEQ ID NO: 57005 - DNA, 3416 bp, Homo sapiens
cgcatccccgcttccggtctaggccgttcctgcccgccccctcctctcctcccttcggacccatagatctcaggctcggctccccgcccgccgcagcccactgttgacccggcccgtactgcggccccgtggccaccatgtccctgcacggcaaacggaaggagatctacaagtatgaagcgccctggacagtctacgcgatgaactggagtgtgcggcccgataagcgctttcgcttggcgctgggcagcttcgtggaggagtacaacaacaaggttcagcttgttggtttagatgaggagagttcagagtttatttgcagaaacacctttgaccacccataccccaccacaaagctcatgtggatccctgacacaaaaggcgtctatccagacctactggcaacaagcggtgactatctccgtgtgtggagggttggtgaaacagagaccaggctggagtgtttgctaaacaataataagaactctgatttctgtgctcccctgacctcctttgactggaatgaggtggatccttatcttttaggtacctcaagcattgatacgacatgcaccatctgggggctggagacagggcaggtgttagggcgagtgaatctcgtgtctggccacgtgaagacccagctgatcgcccatgacaaagaggtctatgatattgcatttagccgggccgggggtggcagggacatgtttgcctctgtgggtgctgatggctcggtgcggatgtttgacctccgccatctagaacacagcaccatcatttacgaagacccacagcatcacccactgcttcgcctctgctggaacaagcaggaccctaactacctggccaccatggccatggatggaatggaggtggtgattctagatgtccgggttccctgcacacctgtcgccaggttaaacaaccatcgagcatgtgtcaatggcattgcttgggccccacattcatcctgccacatctgcactgcagcggatgaccaccaggctctcatctgggacatccagcaaatgccccgagccattgaggaccctatcctggcctacacagctgaaggagagatcaacaatgtgcagtgggcatcaactcagcccgactggatcgccatctgctacaacaactgcctggagatactcagagtgtagtgttggtggcgctgtgcccacgaggcaggggcttttgtatttcctgcctctgccccacccccaaagtaagaagaaacatgtttccagtggccagtatgtctttcattgctttgcacccactgttaccagaagctgctctaggagttcctggccagtcaccccatcgccctctgtggcagactcagtgctgtgtggcgccctcctcagcccagggctgagttttaagattttctctcctttcctcttctcctttggttcctcaattaaaaaatgtgtgtatatttgtttgtcaggcgttgtgttgaggagcagttcacgcactggctgtgtctattcctctgcccaggtgtctctgtttgctgcccaaggcagcagttcatgtctcgtccatgtccatgttcgtgttagcacttacgtgggaacaaataccaatttgtcttttctcctagtatcagtgtgtttaacaaattttaactttgtatatttgttatctatcaggctaatttttttatgaaaagaattttactctcctgcttcatttctttgtcttatagtcctccctctttgcaccttcttctcttccctcagtgcctggagctggtactgggcccctggccccatgagcagtttgccttcttgagtcactgcctgtgtagtacatacctgaccgggagtccaaaccaccttggtgctctgaagtccactgactcatcacacctttcttagcctggctcctctcaagggcattctgggcttgtaaacagacataggaagcctctgtttaccctgaagcaccactgtccagcccattggttcccactggcagcatggtagagctgagagaaacaggctctcagggtacctgacttgaggggaatcgtttcatgaagctgaacttcaagcatatttccagtacattctttcagagtctgtttttccatccaaatataagccccaggccattccacttagtgtcttttcaatgataggcaagaatgatatctgagttgaacttcggtgcttctgttgtttgagtttactgtgcctggtggtatattgggcattctttggattgagtgttctgaggtgagagagtcttcccgaggcatcctgtctgtgcttccaaccctgaacaagaccttacatgagagatggactgatggactgcggcaatcctgggctgtcaagtggatagatagttaaaaagcattatactgtgggtaatgaaaagggaggaaaaaaaaagaaggaaaaggaattatagacccccagggtcagccagttaagagctctacccacacctgtcaacccctctctcccccagtttaggttctgagcagtattggacttgtagcctgcagttgtcttttgacttgcaggccgcaggtgtctttctgttatgtgaatgagttccatggaggggcatatgtgtgattccaccgttagatgagcccttggggcaggcagtttgggatgtgctcttgggggaaagttggctgtttccttgcgctctgctcctacccgaaggtttttaagtccctctgaattgctcatctgagattagtagagtagcaggcctgaaggatgatggttttgtcctctttgggttctcacctgcttgagaagtaaaacagtaactttgttcttctgggcccttaagcttttttggttaagtcttccttttcagaagtagatgtcattatatgccaaaagtctagctctttgctttaccatacagggacctgtcccaaagaaaaaggctctttttttagccagcatatttccccttctacccttttactttgttgttctgattttaggactctggctggccatgtgcttgtggttgcctctcctgcatttgccactggatttgcactgcatcgtttggagatacaaagcgagcagttcttggtcagaaccctcctctgcttttcattgtgtttgataatggttactgggtccttctctcaagggtagcaaggccaagctgatggctgcttgtttaggaggccatcagttccttcctgtggagaagggtctgaaatggaagtcagtggtagaaggggctggtctgctgggcagggcttacatccactgagttctaagattcctttcctgatctgcacctacgcctggtctgtatggtggaatttgtcagctggaactcagaaacaacaacttgaaaaaaaaataataattagaacatatttgcataagatagctatttactcctgggaaaccaaccaa

SEQ ID NO: 57006 - DNA, 630 bp, Homo sapiens
tttgcctttgtgtgcggtatttatttcaaatgttttttaaaacagcactgttatttctcaggacaagagcaaaaatcaccccctgcagaagcttgggaactatgtacagaactttacagaatagaggcaatactttagcttaagcctgtctgctgaccagagaatggaattctgcgtggactcaaggaacaaaaggaaactaggcagggaaggggaagaaaagtgcccatctgaatcaaacttcagctgccatcagggcacatcttgtggtggtcacagattgtaggctgttttttggaagattcgggttcagcacaggattccatttgtctgcaatcagatgataagacgacaggtggcattagaactacttggctacacccctggctgaggtgccatgaggtcaatgtcactcaagttcctggccagccaaactcccgcagcaaagagtcccaaatttagtatcaagttcctccggaagtcattcctatcagtggcaaagcggtagacgccccgaagccaatctcccacgttgtccggtatttcgggagtttcattagccgagccagcagcgctcaccgggacagtgctggaagccatagtggaaagcttcgcatgggcctcggtgga
